United States Patent Application Publication US 2006/0134663 A1 - sequence listing, part 113

SEQ ID NO: 351191 - DNA, 1096 bp, Homo Sapiens
  misc_feature (834)..(834): n is a, c, g, or t
  misc_feature (885)..(885): n is a, c, g, or t
  misc_feature (949)..(949): n is a, c, g, or t
gggaccgtttgccagccaaagctatgtctgcgcgctcaccgacttcatagggtgccgaattcttttttccccaggcttgccatggctagtcgaggggctcggcagcgcctgaagggcagcggggccagcagtggggatacggccccggctgcggacaagctgcgggagctgctgggcagccgagaggcgggcggcgcggagcaccggaccgagttatctgggaacaaagcaggacaagtctgggcacctgaaggatctactgctttcaagtgtctgctttcagcaaggttatgtgctgctctcctgagcaacatctctgactgtgatgaaacattcaactactgggagccaacacactacctcatctatggggaagggtttcagacttgggaatattccccagcatatgccattcgctcctatgcttacctgttgcttcatgcctggccagctgcatttcatgcaagaattctacaaactaataagattcttgtgttttactttttgcgatgtcttctggcttttgtgagctgtatttgtgaactttacttttacaaggctgtgtgcaagaagtttgggttgcacgtgagtcgaatgatgctagccttcttggttctcagcactggcatgttttgctcatcatcagcattccttcctagtagcttctgtatgtacactacgttgatagccatgactggatggtatatggacaagacttccattgctgtgctgggagtagcagctggggctatcttaggctggccattcagtgcagctcttggtttacccattgcctttgatttgctggtcatgaaacacaggtggaagagtttnctttcatgggtcgctgaatgcccctcatactaattctgggggccctgtggntggtcattgacagctactaataatggggaaagttgggtgaattgccacccactcaacaattggnttttgatataaaggcccttttactccttcatgggaccccggatccttttatgggtacaagaaacccccgggggattttccctatttttaaaaataagagggggattttcccggaaaatttccccaatgttaaagcccccttttgggc

SEQ ID NO: 351192 - DNA, 2749 bp, Homo Sapiens
cgtggggccacttggtgaaggaggcgcccacaaggtgcgggcaggaggccctggcctggagagaggagaagcgggagtcccagctgagttcagcatttggacccgggaagcaggcgctggaggcctctccatcgctgttgagggccccagtaaggccgagattacattcgatgaccataaaaatgggtcgtgcggtgtatcttatattgcccaagagcctggtaactacgaggtgtccatcaagttcaatgatgagcacatcccggaaagcccctacctggtgccggtcatcgcaccctccgacgacgcccgccgcctcactgttatgagccttcaggaatcgggattaaaagttaaccagccagcatcctttgctataaggttgaatggcgcaaaaggcaagattgatgcaaaggtgcacagcccctctggagccgtggaggagtgccacgtgtctgagctggagccagataagtatgctgttcgcttcatccctcatgagaatggtgtccacaccatcgatgtcaagttcaatgggagccacgtggttggaagccccttcaaagtgcgcgttggggagcctgggacaagcggggaaccctgccctggtgtccgcctatggcacgggactcgaagggggcaccacaggtatccagtcggaattctttattaacaccacccgagcaggtccagggacattatccgtcaccatcgaaggcccatccaaggttaaaatggattgccaggaaacacctgaagggtacaaagtcatgtacacccccatggctccctggtaactacctgatcagcgtcaaatacggtgggcccaaccacatcgtgggcagtcccttcaaggccaaggtgacaggccagcgtctagttagccctggctcagccaacgagacctcatccatcctggtggagtcagtgaccaggtcgtctacagagacctgctatagcgccattcccaaggcatcctcggacgccagcaaggtgacctctaagggggcagggctctcaaaggcctttgtgggccagaagagttccttcctggtggactgcagcaaagctggctccaacatgctgctgatcggggtccatgggcccaccaccccctgcgaggaggtctccatgaagcatgtaggcaaccagcaatacaacgtcacatacgtcgtcaaggagaggggcgattatgtgctggctgtgaagtggggggaggaacacatccctggcagcccttttcatgtcacagtgccttaaaacagttttctcaaatcctggagagagttcttgtggttgcttttgttgcttgtttgtaattcattttatacaaagccctccagcctgtttgtggggctgaaaccccatccctaaaatattgctgttgtaaaatgccttcagaaataagtcctagactggactcttgagggacatattggagaatcttaagaaatgcaagcttgttcagggggctgagaagatcctgagtacactaggtgcaaaccagaactcttggtggaacagaccagccactgcagcagacagaccaggaacacaatgagactgacatttcaaaaaaacaaaactggctagcctgagctgctggttcactcttcagcatttatgaaacaaggctaggggaagatgggcagagaaaaaggggacacctagtttggttgtcatttggcaaaggagatgacttaaaatccgcttaatctcttccagtgtccgtgttaatgtatttggctattagatcactagcactgctttaccgctcctcatcgccaacacccccatgctctgtggccttcttacacttctcagagggcagagtggcagccgggcaccctacagaaactcagagggcagagtggcagccaggcccacatgtctctcaagtacctgtcccctcgctctggtgattatttcttgcagaatcaccacacgagaccatcccggcagtcatggttttgctttagttttccaagtccgtttcagtcccttccttggtctgaagaaattctgcagtggcgagcagtttcccacttgccaaagatcccttttaaccaacactagcccttgtttttaacacacgctccagcccttcatcagcctgggcagtcttaccaaaatgtttaaagtgatctcagaggggcccatggattaacgccctcatcccaaggtccgtcccatgacataacactccacacccgccccagccaacttcatgggtcactttttctggaaaataatgatctgtacagacaggacagaatgaaactcctgcggctctttggcctgaaagttgggaatggttgggggagagaagggcagcagcttattggtggtcttttcaccattggcagaaacagtgagagctgtgtggtgcagaaatccagaaatgaggtgtagggaattttgcctgccttcctgcagacctgagctggctttggaatgaggttaaagtgtcagggacgttgcctgagcccaaatgtgtagtgtggtctgggcaggcagacctttaggttttgctgcttagtcctgaggaagtggccactcttgtggcaggtgtagtatctggggcgagtgttgggggtaaaagcccaccctacagaaagtggaacagcccggagcctgatgtgaaaggaccacgggtgttgtaagctgggacacggaagccaaactggaatcaaacgccgactgtaaattgtatcttataacttattaaataaaacatttgctccgtaaa

SEQ ID NO: 351193 - DNA, 2295 bp, Homo Sapiens
  misc_feature (25)..(26): n is a, c, g, or t
  misc_feature (86)..(86): n is a, c, g, or t
  misc_feature (95)..(95): n is a, c, g, or t
  misc_feature (140)..(140): n is a, c, g, or t
  misc_feature (161)..(161): n is a, c, g, or t
  misc_feature (212)..(212): n is a, c, g, or t
taacatgttgcagggttcttcaggnngacagtccaatagagggagaagaggcagggcttgtctgcctccagtgccagccgtcagtngcagcagangccttgagggttgagcatcttctggatccagcagaggcctcccangaggggagccaggcggctganggcaagcactgggagggctcaggttctgccctgggggatcctgggactggnagattggcacctgccccccaaggcttggcctgtgcccttggtgccccctttgccatgcccaagtctactgcatgtgagctcaggatcctttccccgtaagccaggacatgtcgccagtcttgctgtgcagcacaaacagctccacctcccgcttccggatggcacggcctgaggcagcacctcagcgaccttggacacaatgggatcgtagttcatgctggccacggcgatcacctcgtcgcctttagtgtaaaaagccacaaacttcagctcctccagatccccctggatgatgacgtcgtcgaagccttctccgtagcccgcgtagcagggctcttgccaaacatggcggtccagaggtagggcacagtgctcatctccgcctcctgcgccaacatgttctgggctgccacgcgccccctgagcatgagccatctgccaatgtggaatgttcactttgcggttgttcctccaggcaagggggaaggtgacagcatcgcaagctgcaaacacgcctgggacattggtctgcatcatcttgttgacagggatgaagcctcgggaatccaaaccgatgccgctttgcctcaggaagcctgtggcgggcactgcaccaatgcccaccacgcagacgtcagcccgcacgaccttgctgctcttcagcacaacctccttcagctttccctcctggccccgcagctcagacaccaccgtctgcatgtagaacttcaaccggttgttctcaaacatcttcatgagggcacgacccacgcgctcccccaggaacctcctgaagggcgtctcctccagctccaccacagacacagagtgggccttctccgtcaggtaagcggccacctccatccccaggaagccggctcccacgacgaccacgttgcggcctcgggccagcctcaccacgcgattggcatcctctggcgtccggatagtgaacacgttctccacttctttgcctttgcagctcagagtcttggggctgctccctggtgccagcagcagcttgctgtactccagcttgaagccatccttgaacacgaccttcttagttctcacgtccactgtgaccacctgagcctcggtgagcacctcgatgccataggctcggaaaaactccttgggcctcagggccagctgctcaggctgtgtgtccagggacttgctgagcttgggacggtcgtagggaaggtgccggtctagcgtgcacaggacgatccggtcggagaagccctcctgccgcagtgtctctgcacacaccaggccagctgcacctgcacccacaatgagcacattggtgctactgctgtacccagcacttggagagatacacttggccatcaccttggtcccttcgctgcagctgtagggcctgcttggctggcccggacgtacaccttgctccttctcaatcttcacctggaacttgtgtagactgtccagggccagggaagtccttccaggtcccccagtgctgatgttgaagcaggcgccgtgccaggggcagcgcacccgaccacgggacagaacgcctttcaccaggggtgcgccgtagtgcggacacttatggcccagggcgtggaactccccattgtccttcaccagcaacaccttcccccagcccagctccacttcccgcatctggccattctcgaggtccttgacgtggcagacagcagcctccacgcaatcctgagggctggggtaggggtgaggggtggacaggcgctcctccgtgtggaagtggcgggccgtgccattgccctggtaggcccgggggctgcccttcccactggccgacagctcctccttgcctcgctccttctcaggcagcaccacctcgatcttgagctccactggtttgggtttggagaagcagccgcccatggcgagtggcctgaggatggccggcaggcaggagcacagatggggagctgtcggaggcctagggcgccccccatggggctggaccccctgcaggccttagagacgctggagccgccatcctgctggagctgctctaggacctgggctcggcgcgggcctgggctcgggaaccgcttggggc

SEQ ID NO: 351194 - DNA, 985 bp, Homo Sapiens
  misc_feature (27)..(27): n is a, c, g, or t
  misc_feature (33)..(33): n is a, c, g, or t
  misc_feature (43)..(43): n is a, c, g, or t
  misc_feature (45)..(45): n is a, c, g, or t
  misc_feature (61)..(61): n is a, c, g, or t
  misc_feature (79)..(79): n is a, c, g, or t
  misc_feature (87)..(87): n is a, c, g, or t
  misc_feature (91)..(91): n is a, c, g, or t
  misc_feature (97)..(97): n is a, c, g, or t
  misc_feature (114)..(114): n is a, c, g, or t
  misc_feature (133)..(133): n is a, c, g, or t
  misc_feature (139)..(140): n is a, c, g, or t
  misc_feature (142)..(142): n is a, c, g, or t
  misc_feature (151)..(151): n is a, c, g, or t
  misc_feature (175)..(175): n is a, c, g, or t
  misc_feature (180)..(180): n is a, c, g, or t
  misc_feature (193)..(193): n is a, c, g, or t
  misc_feature (200)..(200): n is a, c, g, or t
  misc_feature (203)..(203): n is a, c, g, or t
  misc_feature (211)..(211): n is a, c, g, or t
  misc_feature (217)..(217): n is a, c, g, or t
  misc_feature (221)..(221): n is a, c, g, or t
acctgacctcgtgagaactcgatgcanagctgngaaaactccntnggctcaggccagcgcncagctgtgtgtccagganttctaggntggnacgtcntagggaaggtgccggtntagagtgcacaggacaatncggtcnnanaaccctacntgccgcagtatatctgcacacacnaggcnagctgcacctgcnccacacnatncgcacatnggtgcncctnctgtccccagcacttggagagatccacttggccctcaccttggtccttcgctgcagctgtagggcctgcttgctggcccggacgtacaccttctccttctcaatcttcacctggaacttgtgtagactgtccaggccagggaagtcctccaggtccccagtgctgatgttgaagcaggcgccgtgccaggggcagcgcacccgaccacgggacagaacgcctttcaccaggggtgcgccgtagtgcggacacttatggcccagggcgtggaactccccattgtccttcaccagcaacaccttcccccagcccagctccacttcccgcatctggccattctcgaggtccttgacgtggcagacagcagcctccacgcaatcctgagggctggggtaggggtgaggggtggacaggcgctcctccgtgtggaagtggcgggccgtgccattgccctggtaggcccgggggctgcccttcccactggccgacagctcctccttgcctcgctccttctcaggcagcaccacctcgatcttgagctccactggtttgggtttggagaagcagccgcccatggcgagtggcctgaggatggccggcaggcaggagcacagatggggagctgtcggaggcctagggcgccccccatggggctggaccccctgcaggccttagagacgctggagccgccatcctgctggagctgctctaggacctcctcgcagggcagccactgctccgtgttccaggcccagcagtggact

SEQ ID NO: 351195 - DNA, 1580 bp, Homo Sapiens
tgccagcaagcaggccctacagctgcagcgaaggaccaaggtgatggccaagtgtatctctccaagtgctgggtacagcagtagcaccaatgtgctcattgtgggtgcagagacactgcggcaggagggcttctccgaccggatcgtcctgtgcacgctagaccggcaccttccctacgaccgtcccaagctcagcaagtccctggacacacagcctgagcagctggccctgaggcccaaggagtttttccgagcctatggcatcgaggtgctcaccgaggctcaggtggtcacagtggacgtgagaactaagaaggtcgtgttcaaggatggcttcaagctggagtacagcaagctgctgctggcaccagggagcagccccaagactctgagctgcaaaggcaaagaagtggagaacgtgttcactatccggacgccagaggatgccaatcgcgtggtgaggctggcccgaggccgcaacgtggtcgtcgtgggagccggcttcctggggatggaggtggccgcttacctgacggagaaggcccactctgtgtctgtggtggagctggaggagacgcccttcaggaggttcctgggggagcgcgtgggtcgtgccctcatgaagatgtttgagaacaaccgggtgaagttctacatgcagacggaggtgtctgagctgcggggccaggagggaaagctgaaggaggttgtgctgaagagcagcaaggtcgtgcgggctgacgtctgcgtggtgggcattggtgcagtgcccgccacaggcttcctgaggcaaagcggcatcggtttggattcccgaggcttcatccctgtcaacaagatgatgcagaccaatgtcccaggcgtgtttgcagctggcgatgctgtcaccttcccccttgcctggaggaacaaccgcaaagtgaacattccacattggcagatggctcatgctcaggggcgcgtggcagcccagaacatgttggcgcaggaggcggagatgagcactgtgccctacctctggaccgccatgtttggcaagagcctgcgctacgcgggctacggagaaggcttcgacgacgtcatcatccagggggatctggaggagctgaagtttgtggctttttacactaaaggcgacgaggtgatcgccgtggccagcatgaactacgatcccattgtgtccaaggtcgctgaggtgctggcctcaggccgtgccatccggaagcgggaggtggagactggcgacatgtcctggcttacggggaaaggatcctgagctcacatgcagtagacttgggcaggcaaagggggcaccaagggcacaggccaagccttgggggcaggtgccaatctccagtcccaggatcccccagggcagaacctgagccctcccagtgcttgccttcagccacctggctcccctcctgggaggcctctgctggatccagaagatgctcaaccctcaaggcctctgctgccactgacagctggcactggaggcaggacaagccctgcctcttctccctctattgggactggtcccctgaagaaccctgcaacatgttagacattacaataaa

SEQ ID NO: 351196 - DNA, 2258 bp, Homo Sapiens
cggagttttccgcccggcgctgacggctgctgcgcccgcggctccccagtgccccgagtgccccgcgggccccgcgagcgggagtgggacccagccctaggcagaacccaggcgccgcgcccgggacgcccgcggagagagccactcccgcccacgtcccatttcgcccctcgcgtccggagtccccgtggccagatctaaccatgagctaccctggctatcccccgcccccaggtggctacccaccagctgcaccaggtggtggtccctggggaggtgctgcctaccctcctccgcccagcatgccccccatcgggctggataacgtggccacctatgcggggcagttcaaccaggactatctctcgggaatggcggccaacatgtctgggacatttggaggagccaacatgcccaacctgtaccctggggcccctggggctggctacccaccagtgccccctggcggctttgggcagcccccctctgcccagcagcctgttcctccctatgggatgtatccaaccccaggaggaaacccaccctccaggatgccctcatatccgccatacccaggggcccctgtgccgggccagcccatgccaccccccggacagcagcccccaggggcctaccctgggcagccaccagtgacctaccctggtcagcctccagtgccactccctgggcagcagcagccagtgccgagctacccaggatacccggggtctgggactgtcacccccgctgtgcccccaacccagtttggaagccgaggcaccatcactgatgctcccggctttgaccccctgcgagatgccgaggtcctgcggaaggccatgaaaggcttcgggacggatgagcaggccatcattgactgcctggggagtcgctccaacaagcagcggcagcagatcctactttccttcaagacggcttacggcaaggatttgatcaaagatctgaaatctgaactgtcaggaaactttgagaagacaatcttggctctgatgaagaccccagtcctctttgacatttatgagataaaggaagccatcaagggggttggcactgatgaagcctgcctgattgagatcctcgcttcccgcagcaatgagcacatccgagaattaaacagagcctacaaagcagaattcaaaaagaccctggaagaggccattcgaagcgacacatcagggcacttccagcggctcctcatctctctctctcagggaaaccgtgatgaaagcacaaacgtggacatgtcactcgcccagagagatgcccaggagctgtatgcggccggggagaaccgcctgggaacagacgagtccaagttcaatgcggttctgtgctcccggagccgggcccacctggtagcagttttcaatgagtaccagagaatgacaggccgggacattgagaagagcatctgccgggagatgtccggggacctggaggagggcatgctggccgtggtgaaatgtctcaagaataccccagccttctttgcggagaggctcaacaaggccatgaggggggcaggaacaaaggaccggaccctgattcgcatcatggtgtctcgcagcgagaccgacctcctggacatcagatcagagtataagcggatgtacggcaagtcgctgtaccacgacatctcgggagatacttcaggggattaccggaagattctgctgaagatctgtggtggcaatgactgaacagtgactggtggctcacttctgcccacctgccggcaacaccagtgccaggaaaaggccaaaagaatgtctgtttctaacaaatccacaaatagccccgagattcaccgtcctagagcttaggcctgtcttccacccctcctgacccgtatagtgtgccacaggacctgggtcggtctagaactctctcaggatgccttttctaccccatccctcacagcctcttgctgctaaaatagatgtttcatttttctgactcatgcaatcattcccctttgcctgtggctaagacttggcttcatttcgtcatgtaattgtatatttttatttggaggcatattttcttttcttacagtcattgccagacagaggcatacaagtctgtttgctgcatacacatttctggtgagggcgactgggtgggtgaagcaccgtgtcctcgctgaggagagaaagggaggcgtgcctgagagggtagcctgtgcatctggtgagtgtgtcacgagctttgttactgccaaactcactcctttttag

SEQ ID NO: 351197 - DNA, 1136 bp, Homo Sapiens
  misc_feature (733)..(733): n is a, c, g, or t
gggtccggaattcccgggatcggcgctgacggctgctgcgcccgcggctccccagtgccccgagtgccccgcgggccccgcgagcgggagtggaacccacccctaggcaaaacacacgcgccgagcccgggacgcccgcggagagagccactcccgcccacctcccatttcgccccgcgcgtccggagtccccgtggccagatctaaccatgagctaccctggctatcccccgcccccaggaggctacccaccagctgcaccaggtggtggtccctggggaggtgctgcctaccctcctccgcccagcatgccccccatcgggctggataacgtggccacctatgcggggcagttcaaccaggactatctctcgggaatggcggccaacatgtctgggacatttggaggagccaacatgcccaacctgtaccctggggcccctggggctggctacccaccagcgccccctggcagcctttgggcagcccccatctgcccagcagcctgttcctccctatgggatgtatccacccccaggaggaaacccaccctccaggatgccctcatatccgccatacccaggggcccctgtgccgggccagcccatgccaccccccggacagcagcccccaggggcctaccctgggcagccaccagagacctaccctggtcagcctccagtgccactccctgggcagcagcagccagtgccgagctacccaggatacccgngggtctgggactgtcacccccgctgtgcccccaaccccgttttggaagccgaggcaccatcactgatgctccccggctttgaccccctgccgagatgccgaggcgcctgcgggaagggcattgaaacgccttccggggacggatgaaccatggccctcatctgacctgcccttggggacgtgcctccaacaaacgcaggggccaagcaggattccccactttcccttccccagacagggctcaccgcgtaagggcatctcgatcccaaccattttgcacaatctgtgaactgggccttgccccaatcttttcggagaagaacaaatcctccgcggttctggctgttagaagaccttccggcctctctttgccgcgcgtctttcctccctatatgcaccccggt

SEQ ID NO: 351198 - DNA, 1028 bp, Homo Sapiens
  misc_feature (942)..(978): n is a, c, g, or t
gccttccggccgggaccttgggcatttcgcaagggggtccaaagccggggagcatccagggatggtccctccggcttccaaactggggtgggggccacagcggggggtgacagtcccagaaccccgggtatcctggggtagctcggcacgggctgctgctgcccagggagtggcactggaggctgaccagggtaggtcactggtggctgcccagggtaggccccctgggggctgctgtccggggggtggcatgggctggcccggcacaggggcccctgggtatggcggatatgagggcatcctggagggtgggtttcctcctgggggtggatacatcccatagggaggaacaggctgctgggcagaggggggctgcccaaagccgccagggggcactggtgggtagccagccccaggggccccagggtacaggttgggcatgttggctcctccaaatgtcccagacatgttggccgccattcccgagagatagtcctggttgaactgccccgcataggtggccacgttatccagcccgatggggggcatgctgggcggaggagggtaggcagcacctccccagggaccaccacctggtgcagctggtgggtagccacctgggggcgggggatagccagggtagctcatggttagatctttgactcagcaactccacttctgtaagtctcttccccagacacacacctggccacggggactccggacgcgaggggcgaaatgggacgtgggcgggagtggctctctccgcgggcgtcccgggcgcggcgcctgggttctgcctagggctgggtcccactcccgctcgcggggcccgcggggcactcggggcactggggagccgcgggcgcagcagccgtcagcgccgggcggaaaactccgcccgctctcgacgaattcgagctcggccgatttggcctgatnnnnnnnnnnnnnnnnnnnnnnnnnnnnnnnnnnnnncgccgccaccgcgtaaagcccgagtcccctataatgtagggtccagtatt

SEQ ID NO: 351199 - DNA, 1045 bp, Homo Sapiens
agcccctataaaaccccgtttctggaaagggaaaaaagtagggattctgggcttgcccgtctggctttgttgggaggcggcctccccccagggcccgtcaaatgattggccctggcccattcggtcccggaagccctttcaatggccttccggcagggacctcggcaatcttggcagggggtcaaagccgggagcatcagtgatggtgcctcggcttccaaactggggttgggggcacagcggaggtgacagtcccagaccccgggtatcctgggtagctcggcactggctgctgctgcccagggagtgccactggaggctgaccagggtaggtcactggtggctgcccagggtaggcccctgggggctgctgtccggggggtggcatgggctggcccggcacaggggcccctgggtatggcggatatgagggcatcctggaggtgggtttcctcctgggggtggatacatcccatagggaggaacaggctgctgggcagaggggggctgcccaaagccgccagggggcactggtgggtagccagccccaggggccccagggtacaggttgggcatgttggctcctccaaatgtcccagacatgttggccgccattcccgagagatagtcctggttgaactgccccgcataggtggccacgttatccagcccgatggggggcatgctgggcggaggagggtaggcagcacctccccagggaccaccacctggtgcagctggtgggtagccacctgggggcgggggatagccagggtagctcatggttagatctttgactcagcaactccacttctgtaagtctcttccccagacacacacctggccacggggactccggacgcgaggggcgaaatgggacgtgggcgggagtggctctctccgcgggcgtcccgggcgcggcgcctgggttctgcctagggctgggtcccactcccgctcgcggggcccgcggggcactcggggcactggggagccgcgggcgcagcagccgtcagcgcctcgtgccgaattcgccacccaggcc

SEQ ID NO: 351200 - DNA, 1892 bp, Homo Sapiens
  misc_feature (4)..(4): n is a, c, g, or t
  misc_feature (17)..(17): n is a, c, g, or t
  misc_feature (20)..(20): n is a, c, g, or t
  misc_feature (23)..(23): n is a, c, g, or t
  misc_feature (29)..(29): n is a, c, g, or t
  misc_feature (35)..(35): n is a, c, g, or t
  misc_feature (39)..(40): n is a, c, g, or t
  misc_feature (44)..(45): n is a, c, g, or t
  misc_feature (56)..(56): n is a, c, g, or t
  misc_feature (66)..(68): n is a, c, g, or t
  misc_feature (71)..(71): n is a, c, g, or t
  misc_feature (78)..(78): n is a, c, g, or t
  misc_feature (98)..(99): n is a, c, g, or t
  misc_feature (113)..(113): n is a, c, g, or t
  misc_feature (119)..(119): n is a, c, g, or t
  misc_feature (122)..(122): n is a, c, g, or t
  misc_feature (136)..(136): n is a, c, g, or t
  misc_feature (144)..(146): n is a, c, g, or t
  misc_feature (149)..(149): n is a, c, g, or t
  misc_feature (193)..(193): n is a, c, g, or t
  misc_feature (228)..(228): n is a, c, g, or t
  misc_feature (241)..(241): n is a, c, g, or t
  misc_feature (257)..(290): n is a, c, g, or t
  misc_feature (386)..(386): n is a, c, g, or t
  misc_feature (459)..(459): n is a, c, g, or t
  misc_feature (467)..(467): n is a, c, g, or t
  misc_feature (474)..(474): n is a, c, g, or t
aacnaatttatttgcancgngtnagcgtnacccanagcnnagcnnagaggcacaanaaaaaagatnnntanaaaagantttgagaacatcccttgctnntggcaggaccttgnatgggnagnctacacccggaagngcctgccnnnccnccctctagtggcttccttgctccatttcactcaaagcaggaagntcacatctcctattcctgaaactcctctttgtttnactgcaaagactngatgctgctaaggatnnnnnnnnnnnnnnnnnnnnnnnnnnnnnnnnnnacctgcacctgggctttttcgtcatggtgcttttatagcctagtgggagagttggtgaagtagatagtgattcagtgagatgggtgttatgattgntcaggggtctgtgggagcaccaaggagacagacaagattgatgtgcacctactctgtcccaggcgtgtcccangcattggngatatantggtagtttaaacaccatttggtcttcaggagctttaattctagtgtgttgggtgcaggggggtggaatggggacagagagacacctaatccaccctgtgggggctttctggagagggaggcatctaagctgagctgtggctgggtggagtgtgggtggggatgagttccgggcagcgagagtggtggacaccagtttctggggatcagagaggatccaaagaggttctggaaggttcatgtggaatgtagcaagagataggagacatggacatggtgccgggtctggttgccaagaagtttagattttatccttaggccttggggagcgacggatatgatctgagaaagggagttagtggatttgagttttaggctggccatttggcttttccagcccaggtggaactcagaggagtttgcaatggcctctggccacattttagacaactgagcagaactttttgaaactaggaagaccctttggtccatcttttgataaacagaatccatacatgtctaccccagttggaagtatctctgcaatgactggaaagtaaagaggaccaaggtgaaaataaaggctcggaaggggagcaatcttgaaaacatgtcatcccatggtggtgggaagtccctggagaagatcaggggaaacacagtcataggctgcaagtctataagataattccattggggagggagcccatttgtcatgcatggctgcaaggggcagatacaagtgtggagtaagcttgcaagagctgatcctggtcccagagagggaaaaatatgccttggtgggtaatgaaccttttgttcccagaggcagaaggattgggactaggccaacatagagattggcgatggttgtgagattctaagagtgtgtgtgcatcttgacaatattagaggaggctgagcccaagcaggcacattctcttcgacccctccctcattcagtctgctttggagtctactgaacatcaagcttgctatgagcaggatcttagagctgaggaattggcctcccaatccgaacaggtgttataatcctttcttaataggttgtgctgtggacccaatgtgagggctgtgctggtgtaaatggtgacatattgagctggggggatgctttcggggtggggggactggttccattccatcaaaggccctcttgagagtctatccagggacccattgttttactttaacagaccagaaaagatgtttgttttccatgtcattacccccaggggataccgaatgtgtgggtagaaatttctctgtagattaaaaatcagatttttacatggattcaacaaaggagcgtcacttggatttttgttttcatccatgaatgtagctgcttctgtgtaaaatgccattttgctattaaaaatcaattcacgctggaaa

SEQ ID NO: 351201 - DNA, 1084 bp, Homo Sapiens
  misc_feature (11)..(11): n is a, c, g, or t
  misc_feature (17)..(17): n is a, c, g, or t
  misc_feature (22)..(23): n is a, c, g, or t
  misc_feature (28)..(28): n is a, c, g, or t
  misc_feature (33)..(33): n is a, c, g, or t
  misc_feature (36)..(36): n is a, c, g, or t
  misc_feature (38)..(39): n is a, c, g, or t
  misc_feature (45)..(46): n is a, c, g, or t
  misc_feature (49)..(49): n is a, c, g, or t
  misc_feature (55)..(55): n is a, c, g, or t
  misc_feature (63)..(63): n is a, c, g, or t
  misc_feature (67)..(67): n is a, c, g, or t
  misc_feature (71)..(71): n is a, c, g, or t
  misc_feature (81)..(81): n is a, c, g, or t
  misc_feature (87)..(87): n is a, c, g, or t
  misc_feature (89)..(89): n is a, c, g, or t
  misc_feature (91)..(91): n is a, c, g, or t
  misc_feature (100)..(100): n is a, c, g, or t
  misc_feature (102)..(102): n is a, c, g, or t
  misc_feature (126)..(127): n is a, c, g, or t
  misc_feature (132)..(132): n is a, c, g, or t
  misc_feature (149)..(149): n is a, c, g, or t
  misc_feature (158)..(159): n is a, c, g, or t
  misc_feature (162)..(162): n is a, c, g, or t
  misc_feature (167)..(167): n is a, c, g, or t
  misc_feature (172)..(172): n is a, c, g, or t
  misc_feature (178)..(178): n is a, c, g, or t
ccccccccaancaatanttatnnctcancctanacngnnttcccnnatntctcanggattccnacancaanggatgacatntttcangntnctcccctcngncctttatttcacttggtcctcttnntttcnagtcattgcagagatantccaactgnntanacatntatgnattctntttatcaaaagatggaccaaagggtcttcctagtttcaaaaagttctgctcagttgtctaaaatgtgccagaggccattgcaaactcctctgagttccacctgggctggaaaagccaaatggccagcctaaaactcaaatccactaactccctttctcagatcatatccgtcgctccccaaggcctaaggataaaatctaaacttcttggcaaccagacccggcaccatgtccatgtctcctatctcttgctacattccacatgaaccttccagaacctctttggatcctctctgatccccagaaactggtgtccaccactctcgctgcccggaactcatccccacccacactccacccagccacagctcagcttagatgcctccctctccagaaagccaccacagggtggattaggtgtctctctgtccccattccacccccctgcacccaacacactagaattaaagctcctgaagaccaaatggtgtttaactaccactacatccccaatgcctggcacacgcctggcacagagtaggtgcacatcaatcttgtctgtctccttggtgctcccacagacccctgaccaatcataacacccatctcactgaatcactatctacttcaccaactctcccactaggctataaaagcaccatgacgaaaaagcccaggtgcaggtcccagcgcccagagcagtgcctggcacatagtagatccttagcagcatcaagtctttgcagttaaacaaagaggagtttcaggaataggagatgtgagcttcctgctttgagtgaaatggagcaaggcagccactagaggatggcaggcaggcacttccgggtgtagactacgcccatccaaggtccctgccagcagccaaggcatgttcacaaagctcgtt

SEQ ID NO: 351202 - DNA, 1365 bp, Homo Sapiens
  misc_feature (1220)..(1220): n is a, c, g, or t
  misc_feature (1271)..(1271): n is a, c, g, or t
  misc_feature (1273)..(1273): n is a, c, g, or t
  misc_feature (1282)..(1282): n is a, c, g, or t
  misc_feature (1292)..(1292): n is a, c, g, or t
  misc_feature (1297)..(1297): n is a, c, g, or t
  misc_feature (1299)..(1299): n is a, c, g, or t
  misc_feature (1306)..(1307): n is a, c, g, or t
  misc_feature (1314)..(1314): n is a, c, g, or t
  misc_feature (1317)..(1317): n is a, c, g, or t
  misc_feature (1323)..(1323): n is a, c, g, or t
  misc_feature (1329)..(1329): n is a, c, g, or t
  misc_feature (1331)..(1331): n is a, c, g, or t
  misc_feature (1336)..(1336): n is a, c, g, or t
  misc_feature (1347)..(1347): n is a, c, g, or t
aaccccccccacacaacatctactcctgccttcctggtctgttcctttcagcagaaactaatggtttgtggatttttttctgactaacaacaggtctaacattccttgttactgttaacagcttggatgtcggcatggctgggaaggggctaacacagctttgaacttggctaacacaggtttgaacttgactaacacagggaaaagcatagctaacaattttgggcgtggtggctgctctgagtcagaacaatcagaagtcggtaaagatggtagttttctaaaggaggtgccagggctctggtgtggaccaggcctgatggagcagtggtacccaccaaggtggggtcagaagtatagccagtcttgcgaggttttggccattgggcatatcttcactcctcatagtctgcatttggtttcagttcttaaaaatatatagccttatagctacagtagtttgcacaagtagatgcagctcttataaaccttaaaatacctgtctggtgtctacagagcatatgccattttgtatagagtcacccttccccaggccagggcctagagtcttcattttggggactttgtgttttggaagttctaggacataaagctttagatcagagtattcagaagggttataactccgtcagtcatttacatgttagtagtataaattatctgagcttccctgttctaacttttagctcttctagcaataaactcttctgtgcaatttagctgcaccgaggaaacgggagtttttctggaagggacttttgatctctttagactgagggaacgtcctttgggagtagaggggcagggagcatacgcaagggattccaggtgcaggtaaaaggtggcactagttcaaggttttgctgactcagtctggtagtcagagtctgcaggagaagacagttcaaggcagggcctggaggattggatcagtttagggacaggtcaaaggctggcttacagaccttagaggcaggttgcttgggtcgttgaatgctagtctggtgctgagagcccttttctctggcaactgtggactcagagctaaccaattgtagttggcagtgggggtgaagggtgatccagaggcctgagctgcagagggcacaagagagaaaagatgtcttagaaagagctttgagaacatgccttggctgctggcagggaccttggatggggtagtctacaccggaagtgcntcctgccatctctagtggctgcttgctcatttcactcaagcaggagctcantntctattctnaaactctctntgttnantgcaaannttgatgngcnaagatntatatntncaggntgctctggcgngggactgcactgggcttt

SEQ ID NO: 351203 - DNA, 899 bp, Homo Sapiens
atgtgggggatggtgggtgggtacagagagctgggagggaggcaccccggggggcggggcgtgggagactgtattcgggggcgcgagctgccccagtaaatggaaatgttttctaacatataaaaacctacagaagaagaaaataattttctggatcaaattagaagtctgtattatattgatgtctccagattcaaatatattagaaagcagccgtggagacaaccatcttcattttgggagaaataactaaagcccgcctcaagcattagaactacagacaaaccctgatgcgacctctccagattgtcccaagtcgattgatttcccagctatattgtggcctgaagcctccagcgtccacacgaaaccagatttgcctgaaaatggctcggccaagttcaagtatggcagattttcgaaagttttttgcaaaagcaaagcacatagtcatcatctcaggagctggtgttagtgcagaaagtggtgttccgaccttcagaggagctggaggttattggagaaaatggcaagcccaggacctggcgactcccctggcctttgcccacaacccgtcccgggtgtgggagttctaccactaccggcgggaggtcatggggagcaaggagcccaacgccgggcaccgcgccatagccgagtgtgagacccggctgcgcaagccagggccggcgagtcgtggtcatcacccagaacatcgatgagctgcaccgcaaggctggcacaagaaccttctggagatccctggtagcctatttaaaactcgatgtacctcttgtggagttggggctgaaaatttacagagtccatttgtccagctttatcaggaaaaggtgctccgaaactggaactcagatggccgcatcccaggtgagaaactt

SEQ ID NO: 351204 - DNA, 911 bp, Homo Sapiens
atatcgtcgacccacgcgtccggggagactgtattcgggggcgcgagctgccccagtaaggggaaatgttttctaacatataaaaacctacagaagaagaaaataattttctggatcaaattagaagtctgtattatattgatgtctccagattcaaatatattagaaagcagccgtggagacaaccatcttcattttgggagaaataactaaagcccgcctcaagcattagaactacagacaaaccctgatgcgacctctccagattgtcccaagtcgattgatttcccagctatattgtggcctgaagcctccagcgtccacacgaaaccagatttgcctgaaaatggctcggccaagttcaatgctccagaacctggaactcaagatgccagcatcccagttgagaaacttccccggtgggcacttcctctgtggtgtacccagcagccatgtttgccccccaggtggctgccaggggcgtgccagtggctgaatttaacacggagaccaccccagctacgaacagattcaggtttcatttccagggaccctgtggaacgactcttcctgaagcccttgcctgtcatgaaaatgaaactgtttcttaagtgtcctggggaagaaagaaattacagtatatctaagaactaggccacacgcagaggagaaatggtcttatgggtggtgagctgagtactgaacaatctaaaaatagcctctgattccctcgctggaatccaacctgttgataagtgatgggggtttagaagtagcaaagagcacccacattcaaaagtcacagaactggaaagttaattcatattatttggtttgaactgaaacgtgaggtatctttgatgtgtatggttggttattgggagggaaaaattttgtaaattagattgtct

SEQ ID NO: 351205 - DNA, 1381 bp, Homo Sapiens
cagtttgatggggttactgtcctgcatagccataatggcccagtataaagcagctgttttgatgagataattgctttaattaagcaaaaggtagcaaagctttcactccgccctgtaccttctgtttccacttaggagccttcccatgtcagaatgtgcagatctgtctcattgtttcctgtgcagtgtgcccccacttcacccagtagtttctgtgtgtctgttatgtactaggtactacaaggtgccaggacggtgtagatacagcctctgctatcgtaaaactcaatgattcggtgggggaagacaaatgtcagtaatgtacaaagtaaaatggcagctgttagaagtatgagaggggcagggtagggggaggtagaatcttccctgaccaggttaagaaaaccagaggccttctctgagggcaagaggaggagaggagaaatagagtaaggcaggcagaggaaacagtctgagctaagaccctgtggctagaagtggcagagggagatggcagcaggaaggccagcggtggaggctggggcccagtgcatggcccaggttggacggagcgtagcacatggagtttggtaggagttttgggacgccctggtggatcttaattgtgatggggtgggtgtgaaaggcagtccaggttgcactggttgcacaggagaagtgatcagaagaggaccccagcaggtgtgagccgtgagctgggaggtgcttcagtagtgcaggccatagctgaaggtgtcctacatcagcagggtgatggtgaggtatgaaccactgtttcactgcatagtccctgctgatggacacttgagtgtacagatatattgctggtatattcagtagctgcagtggacataatcatacaaaatactacggtacacataaagatatatctgaaacggtaaattcctagcagtagaacttattagacgcaaacggaatttaacattaacggagtgtatagccaaattgccctcccaagtggatacagtcagcttaacctgacaacaatagatctatcctatgccagcactgaggcatcacatataccagataaaacagatgtaaaaacatatgtaaatggataacacctgaaagccaccatcatggagacggtgcgtacagtgtacacgtagacagacgagataccaagagagacaacctggacgcaaacccagcgtgagtaggatttccgacgccaggtcacgcacatgtgcgatcagattacaaatacaggcccagacataaaaaaccctaaggtaacagcgtgggcaactaaataaaggggcaggataaaagtggtggcaaactgcactattggagacaaaaagtagtgaggggactaaggcaacagcaataacag

SEQ ID NO: 351206 - DNA, 536 bp, Homo Sapiens
  misc_feature (39)..(39): n is a, c, g, or t
gagggccgaggagtgtggtggcccctaagcagctgggantggggacctccgtcccagccctgcaagaaattgaattttgccagcagcccccatgatggaggaaaggaaggatcctgccctgccagcaccttgacctctgacctccacaattgtaagcctgaggttttgtgtagtcaccatagaaaactcacacacataagaactctgtactgattcaacaatagaacatgtcacacacgaactggaaactgattctgtgggcgacaagagtctatagtaaacgttatgacagattctttgaatgcgctaatctcagactggactaaagttgggattaaatttaatttgtacttgagttcagtgcattgctgttctgggcataggaaatccaggttgctggtgatgaacagctgaaaagagctgtgtcaccatggttgtctctgtcagtcatgtgaccacccttacccttgtaaaatcaagcaagggagagattattttctaatgtaaatgaaaataaaaaataaagcagcttgcag

SEQ ID NO: 351207 - DNA, 1413 bp, Homo Sapiens
  misc_feature (1007)..(1007): n is a, c, g, or t
  misc_feature (1085)..(1085): n is a, c, g, or t
  misc_feature (1113)..(1156): n is a, c, g, or t
  misc_feature (1191)..(1191): n is a, c, g, or t
  misc_feature (1207)..(1207): n is a, c, g, or t
  misc_feature (1209)..(1209): n is a, c, g, or t
  misc_feature (1300)..(1300): n is a, c, g, or t
  misc_feature (1308)..(1308): n is a, c, g, or t
  misc_feature (1323)..(1323): n is a, c, g, or t
  misc_feature (1333)..(1333): n is a, c, g, or t
  misc_feature (1339)..(1339): n is a, c, g, or t
  misc_feature (1355)..(1355): n is a, c, g, or t
  misc_feature (1370)..(1370): n is a, c, g, or t
  misc_feature (1378)..(1378): n is a, c, g, or t
  misc_feature (1388)..(1388): n is a, c, g, or t
tggatttgagcaggtgaaggattacaccaagtggaaggaggcctgcaggagttgctgccggtccccgtcaccactgtgggactgttagacctgcaaggcagacccaccctcgtctggaatgaggtaacaccaagaggtgtggccagtgcacagaaccatagactcaagctttagaaagtggccattgtggccggcccaggagcagtgggcactgagaggtctcagcctctgtgggggtcgagagaggtcgtggtgtgcctgacagccccgtcctgccggaaagcaggggtgctgcctggagatgcggcgggtctcactgatgtcttcatcagagctccgtggagagcccctggttgcaggcaggacagcaaggctgaggggtcacacggggccacatctgctggtgcccgtcgtgctcctctgcagcaagcccagcctggccattgctggaggtcctggagcccacagtgccttggccttaaagagctcacttgagaaacggcttgttccggtggggtggggggtggattgaagactctgagacgagcagggaactcagaacactgagtccctatttgatgttaaaatatgaccgttaaacttctgggtaagataatgaatggcactatggtttatactgtttctgttttatgggctcttccagagacgtgaactggaaaaggctctgcagtgtctgggattcgctcagtgctgcaggggagggcaggtgtgaggggaatggccctggagggtgatggggctggggcatccgatgcacctttatagttctgtaattaccacttttaaactttttattacgaaaaatgtcaaggaccctggaattacggtgaggtaggcaggataatggcccccaagatgcccgtgttgtgacccccagaccttgtgagtgcctcacatggggagattgtcctaggtcatcttgcaggcccagggcagccccatgcccctttaaagcttgagagcctttcctgctgagtctgagaaantgccagaagcaggagaggttagaacccgaggagggccgcacctgcgctgctggccttagaggagggccgaggagtgtngtggcccctaagcagctgggactggggnnnnnnnnnnnnnnnnnnnnnnnnnnnnnnnnnnnnnnnnnnnncccatgatggaggaaaggaaggatcctgccctgcnagcaccttgacctctnanctccacaattgtaagcctgaggttttgtgtagtcaccatagaaaactcacacacataagaactctgtactgattcaacaatagaacatgtnacacacgncctggaaactgattntgtgggcgcnagagtntatagtaacgttatgncagattctttgaatncgctaatntcagactggnctaaagttgggattaattttaattt

SEQ ID NO: 351208 - DNA, 1184 bp, Homo Sapiens
ggagctgcatgggtatttcattgaaagttcacagacacaagggctctgagcggggtcacaccgtggaggaaggcagggtcggggagcacagagtgagtcctcccaacctgggacaattttgcataagcccttcctgctaggtgtcaggtccaaggggccccaggagcctgggaaggggcacgtgagggcagggacacaaacgctggaagccagggtgcagcagcgaggggagaagcccccaggccccagacacaggcagggcggaggccaggaggcggagggggtggactgagggccaagctcactgcccccttgctgtactcagcttctgatggccttgctgcccagttcacagctcaagggggccccaggacaagaagccctgccctgccccaacctcatgggatcctgcgtttcagggaccatgagaataaacatgtctcagtgcttgtctccgccagcagccgtgcctggcgggtccttagtagtcggtgagggggtaccgcaggaagatgaagacgaggatgattgcaggaggctgccagggcagaaactggtgatgtgcaacagcctgggccgtctttgcatcctccacggctccattcaggtcattgagaagcttcttgtctcgcactttgagggagtaggccaaggcgatgaagcccaggcagcagaagttgaggtagacgaagttgaagatggaccacaggtaatagtcgttcacctcggtggtgtccgggttagacctcgatgacggtcgtggggttggtcatcgtcttcttctcggctaggtgcttgcaggcagggggcgcgccggcagcccgcacgctgtcggtcttgctgctcttggactccatggggaacagtgtgggcgccatcgggggagaggccgagggctcaggggcaggggccgccggagcctgcagggcagggggcttggacacgcaagcgaagcagcccttgggcgaacctgccgggggcctcggaatccagaaggccccgtccagggggactcgggcttcctgggcgccgtccgtggtgctggccgggtctcccagcggggctgggcactggccggggccctgggcctacaagcgactcctcggcgcgcggccggaccccctgagcctcggtgcgcgcgtccttccgccgtcccgcgggccgctgtctgtccacgctccgct

SEQ ID NO: 351209 - DNA, 555 bp, Homo Sapiens
tccagacagaggaccccgaggagctaggccacttctacgactaccccatggccctgttcagcaccttcgagctgttccttaccatcatcgatggcccagccaactacaacgtggacctgcccttcatgtacagcatcacctatgctgcctttgccatcatcgccacactgctcatgctcaacctcctcattgccatgatgggcgacactcactggcgaagtggccccatgagcgggatgagctgtggagggccccaggtgagccccctggtggcagggagggttagggcaagtcatccccttcctaccaaggaacctgccaagctgagagacaggatatctccaccccacttatgtttggacagttgtggcaaagctagcaaaatcatgcaaaatgtacagaagcactgattagcaattcaaccaggcaatactggaatcgctgagaagaatgcctcacagttttctcaacagttaaaagctcagtgttttctagaggaatcaacaagaaataaatcaaaagaaaattaacgttggctaaaattgcactcagtac

SEQ ID NO: 351210 - DNA, 1010 bp, Homo Sapiens
agcgggtattgtccgtccctccgggctttgtagaatcgtcgccggcttacctggccgtgggcgcgtcctggccgctgcaggcccggagcagggatgccagaccgccgccgccgccgccatggtgtccccggtcactgtggtgaagagtgaaggacccaaactggtgcccgttcttcaaggccacctgcgtgtattttgtgctctggctgccctcatctagcccatcgtggggtcagcaccctcatcaagtgcctgcctatcttctgcctctggctcttccttctggcccatggcctgggattcctgctggcccaccccagcgccacccgcatctttgtggggcttgtcttctctgctgtaggtgacgccttcctcatctggcaggaccaaggatacttcgtgcatggtctgctgatgtttgctgtgacccacatgttctacgcctcggcctttggcatgcagccactggctcttcggacaggtctggtgatggcagcgctgtcgggcctgtgctatgccctcctctacccatgcctctcaggtgccttcacctacctggtgggggtctatgtggcccttatcggcttcatgggctggcgagctatggcagggctgcggctggccggggcagactggcgctggacagagctggcagctggcagtggtgcactcttctttatcatctcagacctgaccatcgccctcaacaaattctgttttcctgtgccctactctcgggcgcttatcatgtccacctactatgtggcccagatgctcgtcgccttgtcagctgtcgaaagccgggagcctgtggaacactacagactgaccaaggccaaactgaggtgccagggtctggtcacccctctctcctccctggggctggggcccagatccctggggacctgcaggaagctggatcaggatggctgcagtgccaccctggggcagcaagtactgcctgaggaatttgcaagttcccggtggggaaaggctgaaaaggatccccc

SEQ ID NO: 351211 - DNA, 709 bp, Homo Sapiens
  misc_feature (51)..(51): n is a, c, g, or t
  misc_feature (112)..(112): n is a, c, g, or t
cctgtgtgagccccctcagaccgagatttcatggagaccctcaaaacactnaaatatgccaatcgggcccgcaacatcaagaacaaggtggtagtgaaccaggacaagaccngccagcaaatcagtgcactgcgggctgagattgctcggctgcagatggagctgatggagtataaggcgggcaagcgagtgataggagaggatggcgctgagggctatagtgatctgttccgagagaatgccatgctacagaagtgcgcctgggtgcgcacccaggcgcacttctccacaggcataggtggcactgagccacctggcactatctccacgtgctccacacggaggggtgccttctcactggcagcagctgcacttctctgcttctgcctcagctgcctctccgcctttgcacacacagtccttggcacacttctcacactccgcagggcagcaggagcagcagctcttcttgcaggaggtgcatttgcatccctcgcacttgcaggagtccgcgcaggtgcaggagccaccagaagtgcgcctgggtgcgcacccaggcgcacttctcagagcagaggatgacatggagtgacagcaagaggttagagggaagtctcaatctcacttggcatcgtctagcagaaagaccaatgaattaatttgaggttagttcgtgtgggtcctgaggcctgcagaagtgcgcctggtg

SEQ ID NO: 351212 - DNA, 1621 bp, Homo Sapiens
cgggctccgtctcatcgggccagcagttgcacatgtgaggcattcatgctggatcctgcgcgtctccgcctttttcacaccccgtgtccgtggcacacttctcacaccttcccctgggcagtcaggagcagcatggcctgccagactttaatggaaggatcgaccacctctcttgagtgcacaagtcctacgcaaattcgtccccatcataagggtgatgggaaagggtcctggttggggggagtccatcctggttcattcaagccagggctagtcgcagcccccttcattagtctcacacctgctttgactcagcatctatgtcggcggcagtggcatcctgcacctccacaggagtgaggtacccaggaaatgaccagagccccttgggtggatgccaggaagtcctgggggtctggtgggcttaagcccagcttaggtgggtactaggccttaaggagaaagcatcacagggtaaacgaccttgaaaggggcctcaaaggataaacttgggaggggcagatatggtgcagatgtaaggggcccaggaaagccgtggggagtcggtggggacctgtgcctggtttcatacctagggaagaagggagccttcctcccacctcttactccctatgcatattacactgccgtgagctggggagattttgagatcaaactgagaggatccgtaaggccggagagaggccaagggaccggaactccagagctgagccgcagcctcactaatggcttccccaggttttggggagtttttgagggatgggtcgggaaaggttggaccagtgtggcagtcctcaatcccagctgccactggagtcttctggggatttacaaaaacctctcgtcccacgcctagcccatcaattcctgggtgtggggcaggggcatctgtattttaatgtctgcccgggtggttctattccaagcaagagtcagaaaccacgggatcggggcctggctgtctctccacatcctgcgtggtgagacaccgactccgcagagcagaggggcggcggcagaggggaagggtccccgcactcactcttcttgcaggaggtgcatttgcatccctcgcacttgcaggagtccgcgcaggtgcaggagccacctagagagggcgacgccacaggaagggttaatgtggacgaactcgggtccccacgcctgtcacgaggagatggggtgccaagtctccctgttctccgcgacacaggcatgcccgcccttcacgaggtgaagaatagggaatcaggggcccttcccccaagtgtccttgagcgaaggcgcagggcgtgggtttctttgcaggtacaagggcgcgcagtgcgcaggatgcgagcgggggcgggggctcaccagaagggcaggggcaggtctcagggtccatgtcgaggagagcagcagctggaggcggtgaacgggcttctccaagcaactggacgcgcggcttggctagtggcagcaggtggcgatgcttttatagcctcgggcgggggcgcgcatgccaagcccgctgggcgcccgcccctgcgcaccgcgcccgctcttaccgtttgtgcgcttgggctccggcgcacgcactgcatctgtcacccccgct

SEQ ID NO: 351213 - DNA, 1284 bp, Homo Sapiens
  misc_feature (61)..(97): n is a, c, g, or t
  misc_feature (562)..(685): n is a, c, g, or t
  misc_feature (730)..(738): n is a, c, g, or t
  misc_feature (888)..(896): n is a, c, g, or t
tccctccccctgaatgtatagatcactatagggcgaaccggagtgaacgcggtggcggcgnnnnnnnnnnnnnnnnnnnnnnnnnnnnnnnnnnnnnatcaggccaaatcggccggagctcgaattcgtcgagagcggaagccgcgcgtccagttgcttggagaagcccgttcaccgcctccagctgctgctctcctcgacatggaccctgagacctgcccctgcccttctggtggctcctgcacctgcgcggactcctgcaagtgcgagggatgcaaatgcacctcctgcaagaagagctgctgctcctgctgccctgcggagtgtgagaagtgtgccaaggactgtgtgtgcaaaggcggagaggcagctgaggcagaagcagagaagtgcagctgctgccagtgagaaggcacccctccgtgtggagcacgtggagatagtgccaggtggctcagtgccacctatgcctgtggtgaagtgtggctggtgtccccttcccctgctgaccttggaggaatgacaataaatcccatgaacagcatgaaataaaaaaagaaannnnnnnnnnnnnnnnnnnnnnnnnnnnnnnnnnnnnnnnnnnnnnnnnnnnnnnnnnnnnnnnnnnnnnnnnnnnnnnnnnnnnnnnnnnnnnnnnnnnnnnnnnnnnnnnnnnnnnnnnnnnttaaaaattccccccggggggcccccaatttttaaccccacccannnnnnnnngaaaaaaagggcccctcttacgggggcgtctctttatataaacgcgcggccggggcggctttcttttaaacccctccgcggtggtgggaaaaacattctcaccttcggggaacttttgcgggaaaagcaaacccctctcctttctgggcnnnnnnnnncccaccttcgggcggaaacccatccctcccccccacagaactctttcccgcccccttggggggggaaaataaaaacctttttcttttcctgccatccatctggtttcaaacacaacaccccaacaatcctcctttgccggttcaaaagaaatcccttctttttcttgcgggcgcacatctctcgccaaaaaacttatatattccccccggggccgagggcggcttctcccggggtgggtggcgtgtttctaaaaaacccaaccccccccgggtggtctttccttattgcgcccactactacccttccagaaccgcgtttttataaagtaactaaatacccccctccacacccccttttgtaacgagagccatatatcacgctgtctac

SEQ ID NO: 351214 - DNA, 733 bp, Homo Sapiens
atcaggccaaatcggccgagctcgaattcgtcgagagcgggcgcgcatagcggcggcgagtgggtcgtgcacgcggatgcggggtgggagtgggggcgcacgcgcgggcgtgggcgagcgggccccggcagtgcacacacacggcagggcgggcgacagatgcagtgcgtgcgccggagcccaagcgcacaaacggaaagagcgggcgcggtgcgcaggggcgggcgcccagcgggcttggcatgcgcgcccccgcccgaggctataaaagcatcgccacctgctgccactagccaagccgcgcgtccagttgcttggagaagcccgttcaccgcctccagctgctgctctcctcgacatggaccctgagacctgcccctgcccttctggtggctcctgcacctgcgcggactcctgcaagtgcgagggatgcaaatgcacctcctgcaagaagagctgctgctcctgctgccctgcggagtgtgagaagtgtgccaaggactgtgtgtgcaaaggcggagaggcagctgaggcagaagcagagaagtgcagctgctgccagtgagaaggcacccctccgtgtggagcacgtggagatagtgccaggtggctcagtgccacctatgcctgtggtgaagtgtggctggtgtccccttcccctgctgaccttggaggaatgacaataaattcgcatgaacaggaaaaaagagagaaagagaaactctccagggcg

SEQ ID NO: 351215 - DNA, 690 bp, Homo Sapiens
cttttccacagggcttaatgctgtgttctacaaagcaccgatgctcagggtactctaattattattattaagccgcaactcccacagagatgaaagataaaatgctcagagattcagagaggacacggccacgggagacactcatcactctcatcattagtattgttaccccacactgtctgcaggcctcaggacccacacgaactaacctcaaattaattcattggtctttctgctagacgatgccaagtgagattgagacttccctctaacctcttgctgtcactccatgtcatcctctgctctgggtctttcacttgctgctccaggtctttacctgctccaggactgtgcactccctgcactggctctgctcaagaatgtccctgatctcccctggctcagagagtggggcttcagaatgcaggacggacatgtgaacaggctagacagcactctgctatgaaaacaccgaacctgaggagagtctcagagcgcctaagagggcaatgtaaaccagaaacacttagggtggatgcttgtggcagggcggtctattcttagtccaggccagtttctagagaggggaggctcagaatcaattaggacagttttggagtttctccttctctcttattgctccaaccgcagaattaaaagtactcctagaggggccaggtacaattctca

SEQ ID NO: 351216 - DNA, 416 bp, Homo Sapiens
atcccgcatacaggcgcacttctggtggctcctgcacctgcgcggactcctgcaagtgcgagggatgcaaatgcacctcctgcaagaagagctgctgctcctgctgccctgcggagtgtgagaagtgcgcctgggtgcgcatacaggcgccgaattggtaccaatatttgtaattagactcagagttaatcagctagtgcaggcggctctgtacattgaccgcagggctctacccttgtgagtgtcccagaatagctgcggctacctgagagcaatccagttcctcagggactcgttattgtcccagataaacagcgttgccgcagccagcacgtaatggctgaatataactgtgataagtgatgggcagacgtgcccgagtgagtagatctctggtagggcctgggtaattggaa

SEQ ID NO: 351217 - DNA, 2576 bp, Homo Sapiens
  misc_feature (2323)..(2413): n is a, c, g, or t
gcatggactatgacagcggtaaaaaagcaggcggtacggtccggattcccgggatatcgtcgacccacgcgtcgctgttatttcaggtaagcaaatagctaaactgcgggacactctacagtagcaactcaggacagctggttacaagctggtgtcttaggacatggttacacggattcttagacactttaatggctgcgataactgtgactctccatgatccatgtttcttttatgcgcatatgatttgacgcacactcattcagagtcctccgagaggggcacccatacacggcagaagtgttcatctccaacatgaaagtgaccagctctcatcctcgtctccccaacaccataacgtcctcatcccgcctccaacccacaccaggccgaagccctcagagagtgttttcatcaggaaccactctcgaacctgaaggttgactttagcgtttagcaacccagggcggtgtgtgtgtttcccgttttgttttctgagtggtagcagtgatcaccgtaattccatgtagccatgtgctagcagaacccctgtgtcctcaccgtggcccgtgtgaccccagccgacgagtgcccggcggagtccccgctgccttcccatggtccagtgagctgccagggcatcacatgactctcagctgtgctcttgtcgcttctgtgttgtggtgacaccatgcgctccccagggccagacctgcacgcggcaggtctgtgcccgagtcacccacgggccatactttgtagtttcagcctttcgagccactgcagccgtcagtgctgtgctcctaagccatgggacccgaggactgccccccggcgcctgcccaggcggaggccctttcagaaagggcgaagctcacgcctgactctgcgggccgcggggccgcgtcccagtggacagcgtggtgagccgtggccggacggcaggaggagaggggagccccctctggctgtgtgtcaccttggctggctggctggccagggttttgccgatttccctcctcacatccctcccaccctcggtcatatcattgagatcaccgtaccagcaaatctgcaaaccaagcactttgttaatctccagagagagcaaatacagcaatctagagtttagcctttttaaaaatgtgactttaacccgcccacctgtgtcctcccattggcgtggcatttctttggtgtctgctcagaaagaaacagcatgggaccgtgtgattgggtccaggctgggctgtcagggaagcgccctggtgtctccgactcatcaattctcgggtcttttttaaaagccaggctccccaaagcactctttgtctcgcaattttgaggaggttgttccgacctggaagcgttaaactgctgcatgtcatctggcgtcagctgtgaggctgcgctctgcgtgttgtgcgtttgcaaaatgtattggcgtgactgtaaacacatcgttgaagtaaagcgattacatattgagtatgtcagcttttctcaccctcttctgtgctgggaggagagtctaactgtaacctttaggttgttccagaaaagattcaggccgtttggcacagaattgctctttctgaagggtagcagtaatgaataggaacagacagaaaaccccaggaggggctttcaggaaactctccctctccatcgccatcctgcaagctccacagcctcgggctgccagcctgtggcactgtcctcggtgtgtcctggagctgtgctgggcagcagggcctcgcgtaaggaactgctggaacccactgagcccttcccggggtttcccgccgcactcagtgtgttccttcaggctagtgaggtttcattctgttttatttgcaagcttatcaaaagtttgtggaagatacattgttgggttccagaggctggagtcatgctgcccacatcttgtttgggaaagcaaaagctcccagtgagctggtgtccccgtgtgtctttcatgggactgtcccctttagagatcccacctgtcagagccacagcttcggggtcctgtcatcacatcccctgggaggggaggcaggaggaggccgagggccccaggatgtctgcctggtcccttctcactgtgaggacgcccttggcacacctttctcaagtcacacaaattattgcagttacatacagaattgctgacaggagcaggagacgctgagggaaacagctggcaatgtgacaaaagtcttttctgggacaacaatcaaatcatgtatttgtatttttttaagtttaccaatgaattgtacaacaatgtaaaaataaagttcatcctaatatgctgtgnnnnnnnnnnnnnnnnnnnnnnnnnnnnnnnnnnnnnnnnnnnnnnnnnnnnnnnnnnnnnnnnnnnnnnnnnnnnnnnnnnnnnnnnnnncttgtccggcccgctctcggcccctcaaaaaatttttcataaaccattctcttttggggccgccggccccccaaaagggaaaggggaacttgggcccatacctgtgttccccaaggaaaaacccctgggccatgaccatagggctttgggaatctcccccccc

SEQ ID NO: 351218 - DNA, 849 bp, Homo Sapiens
acccccaccatgagctgcctctcatgatctcagattgctgctactgcatacagtcccactccatctgcaaccacaggtgcttccatcagccgggatgttctctcccttggcgttgctccactgtatttgggttgggggtaccagccggtggacctgcactccagatggatccctccatcctcataacccttcacttcgacgtgaagattagaacccagtgctgcaaccttcagctccaccagggctttttcatagaagtcaccatcttggaaataacacaagtactttccactgtcagaggctgtgacgttgtgtattcggagagcagccttccctgcagtgatgccatcccgcagaatcgaagttctccctcgatacggtgcactctgcctgtcttccacttcctttccatctgcatacacgttcaccacctgccttaggctggaacttacccacttcagctccatggtctctgcactcatggtcgggaacaggtgacagggcagatcagcgtcttcacccaccatggccaggatgggcccagagggtccaagcacagaaaactgagctgagcaaggagtgagcagctggaccaagaggagggagacatgaaagttgagcagaaggaaagccagggaacttgccattttcatctatgctctgccaaaatgtctgtccttgagtgtctttacctttgggttccagtatggaaaaccatcccttggtattcccattggagaatcagagcccacagaataaagacggtcaatcaataattctccattctttctattatggcttagcctctcatccggaaggaaggaaaaagagaaagcaactattatgcga

SEQ ID NO: 351219 - DNA, 1642 bp, Homo Sapiens
  misc_feature (31)..(31): n is a, c, g, or t
  misc_feature (44)..(44): n is a, c, g, or t
  misc_feature (71)..(71): n is a, c, g, or t
  misc_feature (81)..(81): n is a, c, g, or t
  misc_feature (90)..(90): n is a, c, g, or t
  misc_feature (102)..(102): n is a, c, g, or t
  misc_feature (111)..(111): n is a, c, g, or t
  misc_feature (129)..(129): n is a, c, g, or t
  misc_feature (1279)..(1343): n is a, c, g, or t
ttttccccggaaactttcctgggcaaaaagncctcccgtaaagnaaatgctggaaacccaactgaaccctncccggggttncccggccgnaactcaatgtgnccccttcangcctaataaggttccaanccggttttaatttgcaaaccttatcaaaaaatttgtggaaaaatacaatgttgggttcccaaaggctggaatcaatgctgccccacatcttgtttgggaaaagcaaaagctccccagtgaagctggtgtcccccgtgtgtcctttcatgggactgtcccctttagagatccccacctgtcagagccacagcttcggggtcctgtcatcacatcccctgggaggggaggcaggaggaagccgagggcccccaggatgtctgccctggtcccttctcactgtgaggacgcccttggcacacctttctcaagtcacacaaattattgcagttacatacagaattgctgacaggagcaggagacgctgagggaaacagctggcaatgtgacaaaagtcttttctgggacaacaatcaaatcatgtatttgtatttttttaagtttaccaatgaattgtacaacaatgtaaaaataaagttcatcctaatatgctgtgcacatcttgcttaaaaatgtcttcagcacccagtgcagtgatctttccctcacacactgcatgcagcaggagcctcttgtttttcttaatgagctgaaaagacagcagatgttcacagctgatgctgggtgttgactcagcgccacgggaagctctgtgcccgcaggtaagcacgcacagtcttacagttctccttgtaaaatatcatcacccttcctgcctgagaaacgagtacatttgtattttatgtaacaacaatagtcaaggcagcattgcaacactgagcagggtgaggtgggggtgctgagcacaggacaagagggaggaggcctgccctccattcagatgcatctgcatcgcccttctgtgtgcagtcacatcgagactgcacacagcatgcatctcctcttggaaaatatcttttgcctccgagttgttttaagcaattagaatcaggtcctgaatccccagactgttcagagacttcaagggacacctccctcacaagaagcctggcacccccactgtgtacctttgagaggaaaggagtgcgtttgttttcatctgcattctgtttgtcagtggcaacagactctatcaatgtaaaaccatggttgtgatcatgtggggaaatcaaataaatcctttgaaactttnnnnnnnnnnnnnnnnnnnnnnnnnnnnnnnnnnnnnnnnnnnnnnnnnnnnnnnnnnnnnnnnnccaatcataatatagtcaacaataaaagatacaaagaaaagagcgggcaggccactcgtcattcatatcccctagtataggcggcctcgtaaatcatgcgccccacacgccaaagatattcggataaacagatgcgcccccacactttagtggaccacgcatcattaaaaccccgacgacgcgctcccctataatcacaggcttagctgaggaaacaacagtcatcgctcgctcacacttctcgtggagctcctatcaccttcgggtggggagacgtaaaggtacacaccaccccacga

SEQ ID NO: 351220 - DNA, 690 bp, Homo Sapiens
aggtactttccacggtcagaggctgtgacgttgtgtattcggagagcagccttccctccagtgatgccatcccgcagaatcgaagttctccctcgatacggtgcactctgcctgtcttccacttcctttcaatctgcaaacacgttcaccacctgccttaggcttgaaacttacccactccagctccatggtctctgcactcatggtcgggaacaggtgacaggccagatcagcgtcttcacccaccatggccaggatgggcccagagggtccaagcacagaaaactgagctgagtgaggcatgagcagctgaagcaaaaggaggcagacatgaaagttgagcagaaggaaggccaggaaacttgccattttcattcatgctgcatatcaggagatactggaaggtggggggcagacactatgacctggaagaagctatagaattccaaatggaaacctccacttccctagagctaactcaagtatggtgaccgaagaagatctttcctctgccaaaaattctgtccttcagtgtcttcacctttgagtcccaacattgaaaatcacctcttagcattcccctctgaaaatcacagcccacagaagaaaggcagttaatagttctccattctttctactatggttaaatctccttctggaagaaaggaaaaagaaagcagagactccgct

SEQ ID NO: 351221 - DNA, 506 bp, Homo Sapiens
  misc_feature (55)..(55): n is a, c, g, or t
  misc_feature (133)..(133): n is a, c, g, or t
aaacccactccagaaaaacaaaaacgggaaaacacacaacaccgccccgggtttnctaaacgcctaaaatccaaccctccaggttccaaagagtggtcccctgatgaaaaaacaactcctcctgaaggccttncggcccctggtgtgggttgggaggcgggatgaggacgttatggtgttggggagacgaggatgaagagctggtcactttccatgttggagatgaacacttctgccgtgtatgggtgccccctctcggaggactctgaatgagtgtgcgtcaaatcatatgcgcataaaagaaacatggatcatggagagtcacagttatcgcagccattaaagtgtctaagaatccgtgtaaccaatgtcctaagacaaccagcttgtaaccagctgtcctgagttgctactgtagagtgtactgcagtttagctatttgcttacctgaaataacagcattataatactatttatgatagtattctgttaataaaataaggatt

SEQ ID NO: 351222 - DNA, 1756 bp, Homo Sapiens
  misc_feature (21)..(21): n is a, c, g, or t
  misc_feature (1668)..(1698): n is a, c, g, or t
ctaagagatacgcccgccacnttcacgacggcaccggtccggaattcatacgatctcaaaccaggcactgtgtctttcaagccttacaaaaccttttgcggactctcaggtctcccagctctcccctgcagcagcaacaggtgcttagtatccttcacgccaacccccagctgttggctgcattcatcaagcagcgggctgccaagtatgccaactctaatccacaacccatccctgggcagcctggcatgccccaggggcagccagggctacagccacctaccatgccaggtcagcagggggtccactccaatccagccatgcagaacatgaatccaatgcaggcgggcgttcagagggctggcctgccccagcagcaaccacagcagcaactccagccacccatgggagggatgagcccccaggctcagcagatgaacatgaaccacaacaccatgccttcacaattccgagacatcttgagacgacagcaaatgatgcaacagcagcagcaacagggagcagggccaggaataggccctggaatggccaaccataaccagttccagcaaccccaaggagttggctacccaccacagcagcagcagcggatgcagcatcacatgcaacagatgcaacaaggaaatatgggacagataggccagcttccccaggccttgggagcagaggcaggtgccagtctacaggcctatcagcagcgactccttcagcaacagatggggtcccctgttcagcccaaccccatgagcccccagcagcatatgctcccaaatcaggcccagtccccacacctacaaggccagcagatccctaattctctctccaatcaagtgcgctctccccagcctgtcccttctccacggccacagtcccagcccccccactccagtccttccccaaggatgcagcctcagccttctccacaccacgtttccccacagacaagttccccacatcctggactggtagctgcccaggccaaccccatggaacaagggcattttgccagcccggaccagaattcaatgctttctcagcttgctagcaatccaggcatggcaaacctccatggtgcaagcgccacggacctgggactcagcaccgataactcagacttgaattcaaacctctcacagagtacactagacatacactagagacaccttgtagtattttgggagcaaaaaaattattttctcttaacaagactttttgtactgaaaacaatttttttgaatctttcgtagcctaaaagacaattttccttggaacacataagaactgtgcagtagccggtttgtggtttaaagcaaacatgcaagatgaacctgagggatgatagaatacaaagaatatatttttgttatggctggttaccaccagcctttcttcccctttgtgtgtgtggttcaagtgtgcactgggaggaggctgaggcctgtgaagccaaacaatatgctcctgccttgcacctccaataggttttattattttttttaaattaatgaacatatgtaatattaatagttattatttactggtgcagatggttgacatttttccctattttcctcactttatggaagagttaaaacatttctaaaccagaggacaaaaggggttaatgttactttaaaattacattcnnnnnnnnnnnnnnnnnnnnnnnnnnnnnnntaaaataccagttttttttctctgggtgcaaagatgttcattcttttaaaaaatgttt

SEQ ID NO: 351223 - DNA, 1174 bp, Homo Sapiens
gtgctctccagattcactagccaacaagggccaatcaagccagtctctcccaacagctctccctttggcacagactatcgaaatctagccaacactgccaatccaagaggtgacacaagccattcacctactccagggaaagtgtccagtcccctgagccccctgtctccaggaatcaagtccccaaccatccccagagctgagagaggaaaccctccacccatcccacccaagaaacctggcctcaccccttctccatctgctaccactccattgaccaaaactcattcccaggcagcctctttgaccactgcagaagaccttgccagcagctgctcttccaatactgttgtagcaaatggtaatgatgttgagttacttttgcctaccagcagctagtccctaggagggagtctccacgtttgacattccatcagatttcgtccaaaagctcagtcagacttctgagtcagattatgttatttattttgatagtagctgaaaccatctgtataatacatttagtatatttcaccattttgtatttttttaagtagaaactgagtagtttggatttttatggctcacatctttttactgaagccagaaaggcacctcaaagatgtctcaagctcagcagtcaccgtcatgttgtgttgaagaaagcgaatcaccaggtggtgatttgctatctatttgagaactagaatcactcaacactcattttgaattatgcagaagtggttcatgcagatttttattccagatgaacatgttttaaaagtgcctgaaatatgactgccatatgaatgtgattctgcagcaaaaaacacaaaatagatccatttacattacagaaaatgagatcctctgtgaattctgaatgtgaaaaaccaacactgcttttaatcctcttttaatgttttaatacgagctttgtgttctgaaacaaggctgcataagtagaaaggggaatccttctaaaggtggggtgtgaactctaccacaagctggagcctttataggagcccttgagaaacccctcctgagcactaaagcagatggggatgctggaatttcttgtactcttttgaaaaatttagtcactccccagattcctggcataagtcttggacagagtgaatcgctttccattcgaaaaggttcaggttaa

SEQ ID NO: 351224 - DNA, 1689 bp, Homo Sapiens
  misc_feature (230)..(375): n is a, c, g, or t
  misc_feature (837)..(837): n is a, c, g, or t
  misc_feature (894)..(894): n is a, c, g, or t
  misc_feature (931)..(931): n is a, c, g, or t
  misc_feature (960)..(960): n is a, c, g, or t
  misc_feature (965)..(965): n is a, c, g, or t
  misc_feature (971)..(971): n is a, c, g, or t
  misc_feature (974)..(974): n is a, c, g, or t
  misc_feature (997)..(997): n is a, c, g, or t
  misc_feature (1008)..(1008): n is a, c, g, or t
  misc_feature (1016)..(1016): n is a, c, g, or t
  misc_feature (1020)..(1020): n is a, c, g, or t
  misc_feature (1022)..(1023): n is a, c, g, or t
  misc_feature (1040)..(1040): n is a, c, g, or t
  misc_feature (1059)..(1059): n is a, c, g, or t
  misc_feature (1077)..(1078): n is a, c, g, or t
  misc_feature (1092)..(1092): n is a, c, g, or t
  misc_feature (1110)..(1110): n is a, c, g, or t
  misc_feature (1118)..(1119): n is a, c, g, or t
  misc_feature (1121)..(1121): n is a, c, g, or t
  misc_feature (1127)..(1130): n is a, c, g, or t
  misc_feature (1132)..(1133): n is a, c, g, or t
  misc_feature (1152)..(1152): n is a, c, g, or t
  misc_feature (1156)..(1156): n is a, c, g, or t
  misc_feature (1159)..(1160): n is a, c, g, or t
  misc_feature (1167)..(1167): n is a, c, g, or t
  misc_feature (1186)..(1186): n is a, c, g, or t
  misc_feature (1231)..(1231): n is a, c, g, or t
  misc_feature (1235)..(1235): n is a, c, g, or t
  misc_feature (1242)..(1242): n is a, c, g, or t
  misc_feature (1588)..(1588): n is a, c, g, or t
  misc_feature (1614)..(1614): n is a, c, g, or t
  misc_feature (1616)..(1616): n is a, c, g, or t
  misc_feature (1633)..(1633): n is a, c, g, or t
  misc_feature (1636)..(1636): n is a, c, g, or t
  misc_feature (1640)..(1640): n is a, c, g, or t
  misc_feature (1643)..(1643): n is a, c, g, or t
  misc_feature (1647)..(1649): n is a, c, g, or t
  misc_feature (1653)..(1653): n is a, c, g, or t
  misc_feature (1655)..(1655): n is a, c, g, or t
  misc_feature (1685)..(1685): n is a, c, g, or t
  misc_feature (1687)..(1687): n is a, c, g, or t
tttggatttcaaaaaatgtgaagaactgtaatcctggtttagcattcttgcaccgcagcaagcagatggagctgaacagatgccctttttaaatgcggcttgggcactttagtttgccacagctcccactgctcccagctgttttacatcgcttgtgtgagaggcctgtttcactcatttatatgaccagttgagttttgtgacactggggttagtttagctctgcctannnnnnnnnnnnnnnnnnnnnnnnnnnnnnnnnnnnnnnnnnnnnnnnnnnnnnnnnnnnnnnnnnnnnnnnnnnnnnnnnnnnnnnnnnnnnnnnnnnnnnnnnnnnnnnnnnnnnnnnnnnnnnnnnnnnnnnnnnnnnnnnnntgatactgaagatctaggcttcatttggaatttcctcaccttcctgtggacaaattcctcctttgattgtgtcccagccacatctagttgcttcggtaggtaatcttaatgtgcagttctacttgtcctttatgctatattgcaaactccaaagatataatcacactagtatttatgtgtttaagtgtgtgtatgttaaacatgtaaaggggtaatgtatctatacagatatatgtatacttcccatttaagcaaaagttaatttggttttacagatacagataccaggttctggcagcttggagaataagtgtaacaatttggtaaaacttgtataattctgacctataatattacagagtgaatttcaagttattgctttttgattacagaataaaaaattcattctcttgcaaaacttttatacagaatgagtaaccatttcctattcaagttacagcnatcagaatcagaggttccttacacaacagtagatgcttgagacattttttgaatggngatgtgatttcattctgttcaagaacttatgcggganactgggagtgacttaatttttcaaaagtncaagngaatcngcnccccaactgcttagtgctcaggngggtttctcangggctctnttgngnntggcttgtggtgggttngcacccacctttggggggnttcccattctacttgtgnngccttgtttcggtncgcggggcttgttttagngcattagnngngggttnnnngnngtgttggtttttgacattngggnttnncagtggntctcattttctgtgattgngtgttctgttttgtgttttttgctgcagaatcacattcatatggnagtnatatttngggcacttttgagacatgttcatctgggatgaaaatctgcatgaaccacttctgcataattcaaaatgagtgttgagtgattctagttctcaaatagatagcaaatcaccacctggtgattcgctttcttcatcacaacatgacggtgactgctgagcttgagacatctttgaggtgcctttctggcttcagtaaaaagatgtgagccataaaaatccaaactactcagtttctacttaaaaaaatacaaaatggtgaaatatactaaatgtattatacagatggtttcagctactatcaaaataaataacataatctgactcagaagtctgactgagcttttggncgaaatctgatggaatgtcaaacgtngngactccctcctagggtntancttnttntttnnnaaantnactcaacatccttaccattttctacaacantntt

SEQ ID NO: 351225 - DNA, 850 bp, Homo Sapiens
ctggtaccggggtccggaattcttccggatcatcaacatagtgagaccccatctctattaaaaaaataaataggcagagctaaactaaccccagtgagcacaaaactcaactggtcatataaatgagtgaaacaggcctctcacacaagcgatgtaaaacagctgggagcagtgggagctgtggcaaactaaagtgcccaagccgcatttaaaaagggcatctgttcagctccatctgcttgctgaggtgcaagaatgctaaaccaggattaccagttcttcacattttttgaaatccaaattttcatgagaaacattctcatttttaaatatcaagaagtgattttaaaatgtttaaatggtgctggttaaacaaacacgtctgcagctggatttagcttgcaagctgccaagttgcaacctctttcaatctagaaacttctgtcattttcatcatagcaagtctatgcggacaaaagcctccaaactttccaactgtgtaggccagtacagctggcaaggttcatagaatataatggctatccccctctgccaaataagactatccacaacccagctcaaacacagtggttatatgattttgtgtccatacaggagaggccttggtgtcttcacatacattctctgagccaacatctatccagcagccctgacctcctgcaataatttaaagtctatttccctttttaatctaataagaggttgaaagtaaaaaaggccgggggatggaaaatcaggtgtaataaatcaccaatgggaaatataattgtggccacctccccacaggctttaaaaagtttttgaataaaaggggcaaaattacctatgg

SEQ ID NO: 351226 - DNA, 763 bp, Homo Sapiens
  misc_feature (223)..(247): n is a, c, g, or t
  misc_feature (552)..(667): n is a, c, g, or t
  misc_feature (672)..(697): n is a, c, g, or t
  misc_feature (705)..(722): n is a, c, g, or t
aactgatagatggtgcagcatgtctacatggttgtttgttgctaaactttatataatgtgtggtttcaattcagcttgaaaaataatctcactacatgtagcagtacattatatgtacattatatgtaatgttagtatttctgctttgaatccttgatattgcaatggaattcctactttattaaatgtatttgatatgctagttattgtgtgcgatttaaannnnnnnnnnnnnnnnnnnnnnnnnggttgtgcgctttcttttacaacaagcctctagaaacagatagtttctgagaattactgagctatgtttgtaatgcagatgtacttagggagtatgtaaaataatcattttaacaaaagaaatagatatttaaaatttaatactaactatgggaaaagggtccattgtgtaaaacatagtttatctttggattcaatgtttgtctttggttttacaaagtagcttgtattttcagtattttctacataatatggtaaaatgtagagcaattgcaatgcatcaataaaatgggtaaattttctgannnnnnnnnnnnnnnnnnnnnnnnnnnnnnnnnnnnnnnnnnnnnnnnnnnnnnnnnnnnnnnnnnnnnnnnnnnnnnnnnnnnnnnnnnnnnnnnnnnnnnnnnnnnnnnnnnnnaaaannnnnnnnnnnnnnnnnnnnnnnnnntttttcgnnnnnnnnnnnnnnnnnnaaaaaattttttaaaaactttttttggggggccgggccccc

SEQ ID NO: 351227 - DNA, 979 bp, Homo Sapiens
  misc_feature (862)..(862): n is a, c, g, or t
ggatgcgagttgagcgaaaagtttgaggccggagggagcgaggccggggagtccgctccagcggggcgctccagtccctcagacgtgggctgagcttgggacgagctgcgttccgccccaggccactgtagggaacggcggtggcgcctccccagcaaaccggaccgactgggtccagccgccgcagggaatgacgccggtgctcctacagccacggctccgggcggggaaggcgagccccacagccggccctgcgacgcccgcctgggcagcaccgataaggagctgaaggcaggagccgccgccacgggcagcgcccccacagcgccagggaccccctggcagctgggagccgcgggtcgaggttatggatccagcgggcggcccccggggcgtgctccccgcgtgccctgccgcgtgctggtgctgctgaacccgcgcggctggcaagggcaaggccttgcaggctcttccggagtcacgtgcagccccttttggctgaggctgaaatctccttcacgctgatgctcactgagcggcggaaccacgcgcgggagctggtgcggtcggaggagctgggccgctgggacgctctggtggtcatgtctggagacgggctgatgcacggaggtggtgaacgggctcatggagcgggcctgactggggagaccgccatccagaagccccctgtgtagcctcccaagcagggctctggaaacgcgctggcagcttccttgaaccattatgctggctattgagcagggtcacccaattgaagacctccctgaccaacttgccacgctatggctgtgccgccggctgctgtcacccatgaaacctgctgtctctgcacacgggctcnggggctgcgcctccttctctgtgctcagcctgggcctgggggcttcattggctggatgtgggaccttagaaaagttgaagaaattatcggccgttctgggggggaaaatgcgccttt

SEQ ID NO: 351228 - DNA, 856 bp, Homo Sapiens
caagtgctaggattacaggagtgagccactgcgcccggcctgctgcttcctcctcctcagggagacgccacagctctgcggcaagcaatccaccaggcaccagatccccagatacctgcccttcagggagaaatagcctgggatacagagaggcccagaggggagctctggctggacttggcttctcagcgtggggtctgggttcacaggtccagccgccgcagggaatgacgccggtgctcctacagccacggctccgggcggggaaggcgagccccacagccggccctgcgacgcccgcctgggcagcaccgataaggagctgaaggcaggagccgccgccacgggcagcgcccccacagcgccagggaccccctggcagcgggagccgcgggtcgaggttatggatccagcgggcggccccggggcgtgctcccgcggccctgccgcgtgctggtgctgctgaacccgcgcggcggcaagggcaaggccttgcagctcttccggagtcacgtgcagccccttttggctgaggctgaaatctccttcacgctgatgctcactgagcggcggaaccacgcgcgggagctggtgcggtcggaggagctgggccgctgggacgctctggtggtcatgtctggagacggggctgatgcacgaggtggtgaacgggctcatggagcggctgactgggagaccgccatccagaagccctgtgttgcctccccagcaggctctggcaacgcgctggcagcttcctggaaccttattgctggctatgaagcaggtccccatgaagacctccctgaccaactgcacgctatggctgtgccgcggttgctgtccccatgacctg

SEQ ID NO: 351229 - DNA, 586 bp, Homo Sapiens
  misc_feature (280)..(280): n is a, c, g, or t
tcccattctcctgacccaatgcctctgggacgagacgaggctaaggcctgcaaccttagtccccagtgcccagagaaggttcagacggggccagtctcgaatgaacagactgaggcatcctcctggctagaggtaagaggcagagagtgtgcacctgtccaaagcacagtttttctgtcctgggctatagctgcgagtgagtgccctggtggtggtggggagatgcggacctggctacagccctcaggaagagggtgttgggggtgagggtgatccctcnccccgtggctctctgggaatgagagagagagtgaaagagcaagtgacagaggacacagatagggagaaagaagccatgcacttccagctgagccaggaggcctggccaggggaggacaatggaataaggcactacgatctgtcctgctgattcttctgacgggaaaaccaagttcagatccctaacagccgaggtcaagagtccccctccaaagggctatccttgccacagagccgaggagaacaaatgactgccgtttgaagttttgaatactactagaacttgggcaggtcctacaaacttggt

SEQ ID NO: 351230 - DNA, 2586 bp, Homo Sapiens
  misc_feature (2110)..(2219): n is a, c, g, or t
  misc_feature (2396)..(2430): n is a, c, g, or t
ggcctgggtggcgaattcggcacgaggcccaggcctgcccccggctggtccccgcaccgagcgcttgactccgttttggctcctggtgctgacatgggctggggctctcttgagtccgcatagtccgcagctactactgccgctgtcagtggacagtggggtacccctccatgagttagcgtccccccgtttccagcggtgccgccctgggtcccatcttcagggaaaggcactgcccacgccaggctgcacttccaacaacgggcagcagagggcgcggggcggctccgacgcgggtccaagggcagcttcccgctcaaccagggcaccaggacgaggtggctgtagctcggacggacggaagtagatggagggggtggggacggcctgtaagcggggggtgcctgcctggctggggagccccagggatagcggtcggacttcaggttctggccaaggctgagggaccctggctgcagcggatcggcacgccgggtgggcgagagcttggcctgcatgtgcctcccacagaccctggggtgatggccttccccctcttggccgggacgttgccccacgttgagtcccacacaacatcctgtgagcctggctccccaggagggcccccagacagctcccaggcacgtcataggcaaagcctgttcccccgactcaggatttccaaggcctggggtcctgctcacccccctttgctctcacgcccagcctgtccccaggtttcagctgggagaggccacctccctcagccaaggaaaacgagaacccccagggtacaggaggaggctggggcaggtccccttgggtgtcactccctcagcccctgcccaggcccactcccgctggtgctggagtacgcactggtgggggggccctgctcagcccaacctggagggtcccagtgtcaccagaaccaggggcacggcaacagcatcgatgggttctgcagcccagggcccccgatgcggggtcagtgcgtggggggcgcagggcccccgatgccgatgtggggtcagtgtgtatggggcgcagggcctccgatgcggggtcagtgcgtggggggcgcagggccccctcgtgtccagggcactttggtacactgtcccacaaggcacctgtctcagaggaggggccctggcaggcagcgtggcaactcccttccggagcccagctccatgctaacctgcccacagcaaccccacagagccacattccctgctgcacctggtctgcaggggtgtcccaggacaggcccaagtcagcccagcatgcagctgccctcctaccctgaagatgggagtgggctttccaggggacataaggatgtcaggcctggacctcctgggcaggaaagggtgcaggtcctgagggcctgtgccccacagccccagcaccaggtggactgcagcgcagtgggtgggccagtggcagccagggagaagccccccgtcagcaggctggggtctgcccaccagggcctccccacgtctgcctttgagggtgcctgccatgccctgggggatcctggcatctttactggactggaagcaggagacagaacagtgtctgtcccggggtgacttcatcaggagaccgcccacatagagctggaccccgcagctgaagcggaaatgtgagacaggctggcacctccggaaaaactgcctttcagccttggtgttccgtgcaaggtgaaaagaaataggtcctcccagtttacagcttgaaatcaggctagtgagtggccctggagaccacgaggggagaatttaaaggccccggctggcagggtctaggtggctggcagaggcacatgcagaccctgcctggagcctgccctaggacgctgggcgggtcagtctccgtgcaggatgtgagcagcgtccctgggctctatccgcgaggtgccagtagcgtgtgcaggtacatacacgtgcgtgcacactgtgatgacacccggaaatgtctcaggatgttgaaatgtgtccttgggggcagaagtgtccccggttgagaatctgccccagaggaacacacccacaccaggcctcaggattttgtgttgatcaagttccaaggaaaaggaacatcnnnnnnnnnnnnnnnnnnnnnnnnnnnnnnnnnnnnnnnnnnnnnnnnnnnnnnnnnnnnnnnnnnnnnnnnnnnnnnnnnnnnnnnnnnnnnnnnnnnnnnnnnnnnnngaaagaaagaaaatgagagatccaggtttaaaaattcataaacaccacaaggaaacaatacactatgagacccagcagaagcaacagattgactctagacccagatactagaattatcagagagaatataaagtaacagtgttttatatatctaaagaaataaaagagatttctggnnnnnnnnnnnnnnnnnnnnnnnnnnnnnnnnnnnccctggtcggccgccttcggccttcaaaaagttttctaaacaattcgttttgggggccgggggcccattagggaaatggaacatgggccaaagttggtttcccaaagaaaaaaccctgggccaataaacaaagggcttgggaattcccccccaaat

SEQ ID NO: 351231 - DNA, 768 bp, Homo Sapiens
  misc_feature (490)..(490): n is a, c, g, or t
  misc_feature (602)..(602): n is a, c, g, or t
ggggcggaagtaggagctcttagaggctaagaaggtggagaccggagaagctgtgaggttctttagcgtcacctccctcactgggcagcatgggggagaagtcagagaactgtggggttccagaggatctgttaaatggtttgaaggttacagatactcaggaagccgagtgtgctggccctccagttcctgatcccaaaaatcagcattcccagagtaagctgctcagggatgatgaggcccatctccaggaggaccagggagaagaggagtgttttcatgactgcagtgcctcatttgaggaggagccaggagcggacaaggttgagaacaaatctaatgaagatgtgaattcctctgaactagatgaagaatacctaatagaactggaaaaaaacatgtcggatgaagagaaacagaaaagaagagaagagagcactagactaaaggaggagggaaatgaacagtttaagaaaggagattatatagnaagctgaaagttcttatagtcgagccctcgaaatgtgcccatcctgcttcccaaaaaggagagggtcgattctattttcaaatagagctgcagcaaggatgaaacaggacanagaaagaaatggccatcaatgactgcagcaaagcaaattcaatttaaaccccagctatatcaggggcaaatatttgagggaaaagcaagagtttgttatgaagaaagaccggaccagccttagatggaagccccctgtgaaagaactataaaattctaatattttg

SEQ ID NO: 351232 - DNA, 1468 bp, Homo Sapiens
ggggaagtgcacctgactgagcggaagtaggagctctcagaggctaagaaggtggagaccggagaagctgtgaggttctttagcgtcacctccctcactgggcagcatgggggagaagtcagagaactgtggggttccagaggatctgttaaatggtttgaaggttacagatactcaggaagccgagtgtgctggccctccagttcctgatcccaaaaatcagcattcccagagtaagctgctcagggatgatgaggcccatctccaggaggaccagggagaagaggagtgttttcatgactgcagtgcctcatttgaggaggagccaggagcggacaaggttgagaacaaatctaatgaagatgtgaattcctctgaactagatgaagaatacctaatagaactggaaaaaaacatgtcggatgaagagaaacagaaaagaagagaagagagcactagactaaaggaggagggaaatgaacagtttaagaaaggagattatatagaagctgaaagttcttatagtcgagccctcgaaatgtgcccatcctgcttccaaaaggagaggtcgattctattttcaaatagagctgcagcaaggatgaaacaggacaagaaagaaatggccatcaatgactgcagcaaagcaattcaattaaaccccagctatatcagggcaatattgaggagagcagagttgtatgagaagacggacaagctagatgaagccctggaagactataaatctatattagaaaaaagatccatcaatacatcaagcaagagaagcttgtatgagattacctaagcaaattgaagaacgtaatgaaagactaaaagaagagatgttaggtaaattaaaagatcttgggaacttggttctccgaccttttgggctctccacggaaaatttccagatcaaacaggattcctctaccggctcgtactccatcaatttcgttcaaaatccaaataataacagataacaaagataacaaaagctttacaagctgacttggaattgtgtgctgcttgctgttagctaggggaaaggccctgccaatgtttaacttttaaaagcatcttatctaaaagaaaggctatccagtagagcccagtgctcccttgtccctcttttatgatcagggtgaaatgtacttcctgatgtaatgaacctaatttgatttccattttaaggtggtgtctgtgcagctggtgtccccgattctggctgtcctatgtccaggaagaagcccatttgttgaggctgaccttcctgatcatacacacacacagcccagcaaaagcctctcctgaaccaaacaaacctgttggttgggagactgcccagacatgattgatgacgggttcccgcctgctgtcccctccctgatcacacagctaacgaggctgcctccagcatttcctgatttcctctgtggtaataaaagctttctgtgcttaaaaa

SEQ ID NO: 351233 - DNA, 1162 bp, Homo Sapiens
  misc_feature (362)..(419): n is a, c, g, or t
ggcaattcggacgaggggcggactcaggggatgcccggcgggctccccgtgcccgaggggaacgtcggaggcacaccatcgccagcggcgtggactgcggcctgctgaagcagatgaaggagctggagcaggagaaggaggtgctgctgcagggtttggagatgatggcgcggggccgcgactggtaccagcagcagctgcaacgagtgcaggagcgccagcgccgcctgggccagagcagagccagcgccgactttggggctgcagggagcccccgcccactggggcggctactgcccaaggtacaagaggtggcccggtgcctgggggagctgctggctgcagacctgtgccagccgggnnnnnnnnnnnnnnnnnnnnnnnnnnnnnnnnnnnnnnnnnnnnnnnnnnnnnnnnnnggtctggcagcagcagaccatcctcatgctgaaggagcagaaccgactcctcacccaggaggtgaccgagaagagtgagcgcatcacgcagctggagcaggataagtcgggctcagttaagcagtctgtttgaggcccgcgccctgatccagcaggacgggggacctctggattccaccttcatctagtccttgtggggccgcgtgggcccccaggccagcctgtctggggagccccattggtatagcggtcggttacttccaggtcctgctcacccgggccgtttgctctcacgcccagcctgtccccaggtttcagctgggagaggcctcctccctcagccaatggaaggacgataaacccccgtgtgttacaggtggaggctggggcaggtccccttggggtgtcactctctcaggcccgtggccaggtctgcactcccgggtggtgctggagtacgtcctggtgggggtggccctgggtcagcccaacctgggaggggtccgcaggtgtcaccagaaccaggggggcggacaccaggcatcgagatggtttctgcttgcccgaagagcccccgatgcggggtcagtgtgtgtggggcgcacggggctccgcgtgcgggggcagggcgttggggggcgccggcccccgtcgtgtccgggcctttgggacactgtcccgcaggcaccggtttcgggggatgtgcctgggggctttttggatccttcggagccggtcgctgt

SEQ ID NO: 351234 - DNA, 519 bp, Homo Sapiens
  misc_feature (198)..(351): n is a, c, g, or t
tcagccttggtgttccgtgcaaggtgaaaagaaataggtcctcccagtttacagcttgaaatcaggctagtgagtggccctggagaccacgaggggagaatttaaaggccccggctggcagggtctaggtggctggcagaggcacatgcagaccctgcctggagcctgccctaggacgctgggcgggtcagtctccgnnnnnnnnnnnnnnnnnnnnnnnnnnnnnnnnnnnnnnnnnnnnnnnnnnnnnnnnnnnnnnnnnnnnnnnnnnnnnnnnnnnnnnnnnnnnnnnnnnnnnnnnnnnnnnnnnnnnnnnnnnnnnnnnnnnnnnnnnnnnnnnnnnnnnnnnnntgccccagaggaacacacccacaccaggcctcaggattttgtgttgatcaagttccaaggaaaaggaacatctcagccgggcgtggtggttcacgcctggaatcccagcacttgaggccaggagttccagagcagcctgggcaacgcagtgagagaccccatctctac

SEQ ID NO: 351235 - DNA, 366 bp, Homo Sapiens
  misc_feature (50)..(50): n is a, c, g, or t
  misc_feature (122)..(190): n is a, c, g, or t
cctgcccctaggacgctgggcgggtcagtctccgtgcaggatgtgagcancgtcccctgggctctatccgcgaggtgcccagtagcgtgtgcaggtacatacacgtgcgtgcacactgtgannnnnnnnnnnnnnnnnnnnnnnnnnnnnnnnnnnnnnnnnnnnnnnnnnnnnnnnnnnnnnnnnnnnntgccccagaggaacacacccacaccaggcctcaggattttgtgttgatcaagttccaaggaaaaggaacatctcagccgggcgtggtggttcacgcctggaatcccagcacttgaggccaggagttccagagcagcctgggcaacgcagtgagagaccccatctctacaaaaaaaa

SEQ ID NO: 351236 - DNA, 1021 bp, Homo Sapiens
  misc_feature (935)..(939): n is a, c, g, or t
  misc_feature (968)..(968): n is a, c, g, or t
  misc_feature (971)..(971): n is a, c, g, or t
  misc_feature (979)..(979): n is a, c, g, or t
  misc_feature (982)..(982): n is a, c, g, or t
  misc_feature (985)..(985): n is a, c, g, or t
  misc_feature (987)..(987): n is a, c, g, or t
  misc_feature (989)..(989): n is a, c, g, or t
  misc_feature (1003)..(1003): n is a, c, g, or t
  misc_feature (1006)..(1006): n is a, c, g, or t
  misc_feature (1011)..(1011): n is a, c, g, or t
  misc_feature (1013)..(1013): n is a, c, g, or t
gatggggaacgaaagatggcggcggaaacgctgctgtccagtttgttaggactgctgcttctgggactcctgttacccgcaagtctgaccggcggtgtcgggagcctgaacctggaggagctgagtgagatgcgttatgggatcgagatcctgccgttgcctgtcatgggagggcagagccaatcttcggacgtggtgattgtctcctctaagtacaaacagcgctatgagtgtcgcctgccagctggagctattcacttccagcgtgaaagggaggaggaaacacctgcttaccaagggcctgggatccctgagttgttgagcccaatgagagatgctccctgcttgctgtaagacaaaggactggtggacatatgaattctgttatggacgccacatccagcaataccacatggaagattcagagatcaaaggtgaagtcctctatctcggctactaccaatcagccttcgactgggatgatgaaacagccaaggtggcaagagtgtgggattcaggaagaaagggttctggccaccggctgagagccctgacaagaaggggagggtcaagattagctgatctgtttcttggggcttggtggccattaggacaaagtttcctggggcctgggggcacaggccattcttttgtctctttggggacgcagtgccatccttcctctttgctatctttctcatgtcccccattcctgcctcatgtcttctccaggcctccaagcagcatcgtcttaaacgctaccacagccagacctatggcaatgggtccaagtgcgaccttaatgggaggccccgggaggccgaggttcggttcctctgtgacgagggtgcaggtatctctggggactacatcgatcgcgtggacgagcccttgtcctgctcttatgtgctgaccattcgcactcctcgggtctnnnnncaccctctcctccgggccccacccagtgntgnaccgcagncanccncngncaccctccccacanccngaggngnaaatggcc

SEQ ID NO: 351237 - DNA, 1028 bp, Homo Sapiens
aaatatacggctaggtacgaggctgggtggttgaattcggcacgaggtgggcgtgttgaggccgctgcctggcttagggcggaaacagattctctgcataagaaggggaacgaaagatggcggcggaaacgctgctgtccagtttgttaggactgctgcttctgggactcctgttacccgcaagtctgaccggcggtgtcgggagcctgaacctggaggagctgagtgagatgcgttatgggatcgagatcctgccgttgcctgtcatgggagggcagagccaatcttcggacgtggtgattgtctcctctaagtacaaacagcgctatgagtgtcgcctgccagctggagctattcacttccagcgtgaaagggaggaggaaacacctgcttaccaagggcctgggatccctgagttgttgagcccaatgagagatgctccctgcttgctgaagacaaaggactggtggacatatgaattctgttatggacgccacatccagcaataccacatggaagattcagagatcaaaggtgaagtcctctatctcggctactaccaatcagccttcgactgggatgatgaaacagccaaggcctccaagcagcatcgtcttaaacgctaccacagccagacctatggcaatgggtccaagtgcgaccttaatgggaggccccgggaggccggagggtcgggtcctctgtgacgagggtgcaggtatctctggggactacatcgatcgcgtggacgagccccttgtcctgctcttatggtgctggacaattcgactcctgggtttttggcgaaacatgtaacaggacacaacacaggggcggcacagaaggcaatcaatatggaaaccatatcctaaagaccgaaggaaacaatggccactaggtagaggggaaggcgacacaaaggcgactgggagaatagaaccatgagcgagcagaagaccaaggccccaagtgagaggagacagagggaggagcccccaaaaacgcagagtgtaacacgctaagaatgc

SEQ ID NO: 351238 - DNA, 950 bp, Homo Sapiens
tgacggcagtactcccggggtttaggtagcgaggcctgggtggcgaattcggcacgaggcgaaagatggcggcggaaacgctgctgtccagtttgttaggactgctgcttctgggactcctgttacccgcaagtctgaccggcggtgtcgggagcctgaacctggaggagctgagtgagatgcgttatgggatcgagatcctgccgttgcctgtcatgggagggcagagccaatcttcggacgtggtgattgtctcctctaagtacaaacagcgctatgagtgtcgcctgccagctggagctattcacttccagcgtgaaagggaggaggaaacacctgcttaccaagggcctgggatccctgagttgttgagcccaatgagagatgctccctgcttgctgaagacaaaggactggtggacatatgaattctgttatggacgccacatccagcaataccacatggaagattcagagatcaaaggtgaagtcctctatctcggctactaccaatcagccttcgactgggatgatgaaacagccaaggcctccaagcagcatcgtcttaaacgctaccacagccagacctatggcaatgggtccaagtgcgaccttaatgggaggccccgggaggccgaggttcggttcctctgtgacgagggtgcaggtatctctggggactacatcgatcgcgtggacgagcccttgtcctgctcttatgtgctgaccattcgcactcctcggttctggcccccaacctctcctccgggcccccacccagtgcctgcaccgcaggccatcctctgtcacccttccctacaggctggagagtacatgggcctacgttcagaagcaagccgtagactcaaagcagtatggagataaaatcatagaagagctgcaagatctaggcccccccaagtgtggagtgagacccaggtctgggggtgg

SEQ ID NO: 351239 - DNA, 1150 bp, Homo Sapiens
  misc_feature (21)..(21): n is a, c, g, or t
  misc_feature (53)..(53): n is a, c, g, or t
  misc_feature (59)..(59): n is a, c, g, or t
  misc_feature (65)..(65): n is a, c, g, or t
  misc_feature (71)..(71): n is a, c, g, or t
  misc_feature (80)..(80): n is a, c, g, or t
  misc_feature (89)..(89): n is a, c, g, or t
  misc_feature (1055)..(1064): n is a, c, g, or t
caccccttcccatcaatttgnccagcaggtaggatagtccccctttgacaatnacagantgaggntgcaangggaatgantataaatcncccagcaggtcaacaatggcccacgaccaagaccctgggtgttcagaccccaaggccagggctttcccgctgcatcaagatgccaatccctttgtgggcttcaccagtgcccaagtctctatggagaatgagaactggaagccactgctaccgtctacccagcaccagtagtgccgatgtgccacactgcccagttgaggcccctcacgctctgtgcccctagatccttcaggtccccaccctcagctgtcaccaccaccctccccaggggactccatctgagatgaggcctcgtcctcctggaagctgaggctgagaagggtggagcttggccctggggaaggcagaccagggtctgatggcttctagggatgctctgcgtgtgtctcagcaccgctatctcagccactttcagccttatgcacgtagaatgaccacagccactcgcatccgtatagcactttaaagtttctgcagtcctttgacacataggatctcatcgagcctcacgtctactcccttctgcagatgaggaaaccgagagaagtggcccaaggtcacgcaactctgagatgccacatttcatttgatcttgtacacattttcttttattccttcttttttcctcctttcatttcccactacgcacaaagagtttataaacactgttctcagaagagtcacagtttggggtgagatctggaaatcaagaaatgggtgtccactcttttctttcattagctaggatctactagatgcattatactccatacctgcttttcccatggccgccctacggaaaatcccatccacagaggccagggctacccaagcccctccaggtgagctgggcctttcctttatgaacctccatcctcccagccagctacagtagggcctcctcaccccgtaccccacagctagacagtgtcagcactcatctcctcctcccacatttctggagcnnnnnnnnnnccttccccattgacctttgtggtcttctgtgattatttatgctgcctcccaaggatagaattgaaataaaatgttttcaacttatc

SEQ ID NO: 351240 - DNA, 1050 bp, Homo Sapiens
  misc_feature (467)..(475): n is a, c, g, or t
  misc_feature (705)..(705): n is a, c, g, or t
  misc_feature (893)..(893): n is a, c, g, or t
  misc_feature (897)..(897): n is a, c, g, or t
agtcaggagggtttctggcattttccacacctgtccactccttggagctggtttctctcattgctttttctaaatctggttctttttctctttacctggggcctggcttttctgagattgtcttagggttgagctatttgggtatcctgggtttgagtgttaggggatggacataaaggaaaaagagtgatgagaagagaatggagagaatttgaataaaaggtgggaaaggagagcactgttctttgattgtttatccagtccaacctgatccattagggatcgaggtgctacactggcctccagggataagcctggggctactgttgctgggaacttaggcttaacataaagccgaagaaggtacctagaaatttgaaacttccctaaaaagctcctaatgcccacctgctagatagcttctctgtggcctcctatttagctaagcagcagtgtttttggatacnnnnnnnnnctgtttgtgaataaggccagcactcaagatgggcagccaagggtgcactgactattagctggcccataggatatctgtaaggcttggtgggacagttttggacctggaatcatgtgtaactaacaaggttggacgtttcttccccatcagggtagaaaaatcatctcaaactagccaaaaggcagttttggaaactacattgggggacgttatttttatttatatatggngcctaggccaatccaggatggtagctggaataccttccttcttaaaatctgatcatggcaaggatatgcagggcactttttactatttgcccttctaagcagattggggaggaggtattttctgggtttcgccttcctcccgactaataggacctgcccttctccctgggcagggaaaaaagctgggntggngctctcccctactctactcatactggactaaaagcttctggctggttggttgggcatcccaaaaaagggagggggaaaggatgagcctaaaaaccacaaccaaatggagggggggaaaagggagaattttcctcctttacagagggaaaaaaa

SEQ ID NO: 351241 - DNA, 866 bp, Homo Sapiens
  misc_feature (801)..(823): n is a, c, g, or t
cggtaccctccccgtacgcccaatctcaaactagccaaaaggcagttttggaaactacattgggggacgttatttttatttatatatggggcctaggccaatccaggatggtagctggaataccttccttcttaaaatctgatcatggcagggatatgcagggcactttttactatttggccttctaagcagattgggaaggaggtattttctggttttcgctttcctccgacttaataggacttgccttctccctgggcagggagagaggctgggttggtgctctcccttactctactcatactgacttagagcctctggctgctgtttgggcatccaagaaagggaggggaaggaatgagctaaaaacaaaacagaatgaggtgggaaagggagattttcttctttacagaggaaaataggaaaccctccaagaattgtgcaagtaaagacatttgttgaatgcactgagtcccttggtgtagtagcaataaggaaaaatgaaattactttcctgtgcacacagtccagcctaattggtatgtgatgttgcacttagcagccatgtggtgggcatgtgtgactactctggttttcactttagtttctaaactttttatccctctcaagtccagcatggatggggaaatgtctctggatccccacagctgtgtacttgtttgcatttgtttccctttgagatttgtgtttgtgtcctgctttgagctgtaccttgtccagtccattgtgaaattatcccagcagctgtaatgtacagttccttctgaagcaagcaacatnnnnnnnnnnnnnnnnnnnnnnncaattctgtgttttataaagacaacagtggcttctatttctaa

SEQ ID NO: 351242 - DNA, 1907 bp, Homo Sapiens
cagaacctgtccttccctttttatcttttttgttgtattttcgaatgtcctcctcgttcttgggtgacacttcacctttcatgagttctgcttttagtccttctgtcttttttcggtaacatgtttccatcattccaggcccttagaattagttatgttcttctgtgtctctgacatgtgtactattcgtggtccatcggattacaattccgccattgtccaggtcttgcaatgctcatagcttcgtcccacctgctcataatagttccacagtgtatctggaggggaaaagccgtgtcggtggtgatggggggcctggcacgccccattggtcatggcaggcagcagggatgctgtttactgagcgtccagtgttgtagttgcattcaagtgtgtagctgtggattatccctgaggctttgtagattgcaacacggccgcttccctctttagactggccatctctacggtctcgggcatacatattcttctctgagaaattgcagccctggaagtcgaagtgggctgaattcaaggagatgagctttggatatagcatgttttccacctgggtgctctcatcactaaagctgtttccgtacatgaagcagccccttttggaagcatgtccatgcaggtccacatagtaagcaacgccactctctttgggggggatggtatcaggggctgactcttcaagccccgcagactgttgtggcataatccacacactgttgagcttctgttctgctggctctgtttgtttccaggcttcagcgttatgcctgtcagctgagtgcccacactgagcttcattttggagattgttggctttctccaggtcagaaacaggagcatcaggagggagacaggaactgggctggtgctcagaggaactctgggagttcagacgagagtgcacatggtggtagagaagcacagctttggccccatagatggccgggtgcaggacggcatcaggcttcaggtactgacggttcagattcactccacgtgagtctgtgcggtagtgtccccggaccacaccatcggggttcaacatgggaatcagcttaaagacgaagaggcgacggagggtttgggcccggggatcatcaggtcggaggatgaagtccagaaagccattgaagacaaagctagatggagtctcccctgggtgtactctactgcttaagaagaatatcctcttgcctgcgaaacggaatggtcgaggggtgctggtatcaggaaatagctgctctagacggggctctcgatcttctcgaagcccatggcaggaagtgatcgtcagcagatctacacgaagtccatccagagaatagcaaaggagctcccgatggtaatagatggtatccagggggctgctatgggtagggtggttctccggaaagcgctggtctagctggtttagcagttcctggcagtcactgtaggagaaggggtagcagaaggcgaagaaggtggtggccccacggccctccacgaaacgatgaacaaaggataacacaaactgcgtctctgtcatctcaaaggtgggccggtctcgaatgcgttcccagcgtggccgggtgggcagtgtgcgcacaaagggggccatgccctgggaatacagcttgctctgcttgttcatgttcataatgttgatcttgatgagttttcctggcattcctccccggacgctgaagtagaaccatgacctgttcccattctcaaattccgtttcagcacagtctggtcgggtccacacgttgaattcatagtcaggggaagaggcaatgccactggtcagggctgacgccccacctcctaccccttccccatcactggacaaagattccaccttctccacgtggcctcgtgccgaatcgccacccaggcctcgctcc

SEQ ID NO: 351243 - DNA, 1175 bp, Homo Sapiens
  misc_feature (126)..(126): n is a, c, g, or t
tggaggggttaaaatttccctcccgggggaatttggggcgggtagtgtccccggggccaccccctgggggggttcaacccagggaatccgtttaaaagcccaaggagggccacggaagggttgggnccccgggatcctcaggttcggaggataaattcccgaaaggccttgaagccaaaggctagatggagttctcccctggggggaactctacgggcttaggaagaatttcctcttgcttgggaaaacgaatggttcgagggggtgttgtattcaggaaatacctgctctagaccgggctctcgatcttctcgaaagcccatggcaggaagtgatcgtcagcagatctacacgaagtccatccagagaatagcaaaggagctcccgatggtaatagatggtatccagggggctgctatgggtagggtggttctccggaaagcgctggtctagctggtttagcagttcctggcagtcactgtaggagaaggggtagcagaaggcgaagaaggtggtggccccacggccctccacgaaacgatgaacaaaggataacacaaactgcgtctctgtcatctcaaaggtgggccggtctcgaatgcgttcccagcgtggccgggtgggcagtgtgcgcacaaagggggccatgccctgggaatacagcttgctctgcttgttcatgttcataatgttgatcttgatgagttttcctggcattcctccccggacgctgaagtagaaccatgacctgttcccattctcaaattccgtttcagcacagtctggtcgggtccacacgttgaattcatagtcaggggaagaggcaatgccactggtcagggctgacgccccacctcctaccccttccccatcactggacaaagattccaccttctccacgtgggctagattccctgaatcaaagcgagaactgaacagcaatcccccacagcgcagctccatggtggggctgggaaagcatcctcctgccccgctctggccctgagagctctctccgggccggtgatcccgctccctctcccgctagcgaggccgcaccttgggccccggcacccgggccctccacccgggcccccaaaaacacccgagcgccgcggtgccgggaccccgctctccgctctcgacgaattcgagctcggccgatttggcctgat

SEQ ID NO: 351244 - DNA, 793 bp, Homo Sapiens
ccttaaccgtctcatttcgagccatgcagagtatcccccgagtccccgaagccatccgggattgcaaggcgctccgatggaatagaggtaaccaggggctgctatggctaggctgttctccggaagcgctgctctactggtttagcagttcctggcagtcactgtaggagaaggggtagcagaaggcgaagaaggtcgtggccccacggccctccacgaacgatgaacaaaggataacacaaactgcgtctctgtcatctcaaaggtgggccggtctcgaatgcgttcccagcgtggccgggtgggcagtgtgcgcacaaagggggccatgcctgggaatacagcttgctctgcttgttcatgttcataatgttgatcttgatgagttttcctggcattcctccccggacgctgaagtagaaccatgacctgttcccattctcaaattccgtttcagcacagtctggtcgggtccacacgttgaattcatagtcaggggaagaggcaatgccactggtcagggctgacgccccacctcctaccccttccccatcactggacaaagattccaccttctccacgtgggctagattccctgaatcaaagcgagaactgaacagcaatcccccacagcgcagctccatggtggggctgggaaagcatcctcctgccccgctctggccctgagagctctctccgggccggtgatcccgctccctctcccgctagcgaggccgcaccctcgtgccgattcaccacccggcccgacctagccatgttttccacttctccc

SEQ ID NO: 351245 - DNA, 626 bp, Homo Sapiens
tgcatgtacagggaagcactgtcgaacatcatatgtgacaggctgtcatagtcaccattcccatgaccatagtcatgggaatcttgctcgtgttacagggaagcactgtccaacatcatatgtgacaggttctcatcgtcaccatcatcatgggaatcttgtgcatgttacagggaagcattgtcctacatcgtatctgacaggctctcgtagtcaccatcatcaggggaatcttgcacacgttacagggaagcactgtccctacatcatatgtgacaggctctcacagtcaccatcatcaaaggaatcttgcacacgttacagagaagcactgtcctacatcgtatgtgacaggctctcatagaaaccaccaccatgggaagctgcattcagagcatttaactatatgggctctgaaatcagataacttaggtttagacttacttctacttcttactaagcagagaactctggggtgaaaactttacgagacccagttttatcacgtccaaattggaggcatggggaaattatagcattttgcatagaatattgttttaagtataaaatgaaatagtacatagtaagcttctgccatacactgactgcacaataaatattagtta

SEQ ID NO: 351246 - DNA, 1067 bp, Homo Sapiens
  misc_feature (324)..(336): n is a, c, g, or t
cttaggcatcttatattctaatgatccagatggcaaatttgaatgaatggaacacagatactcaaatctgcaaacatgagttcttttagcccaatgcctccttccctttttcctcttccctagtttactcaacaaaagctctctcttaattccattttgtttgagaacgttgattggtttctgataggagctgctaacatactaaccacatggacatatacacagcaagaaaaaatgacaatatattgggtgaagaaccttaaaaatcaggaaatactatttttagaattagttttctgactttaagcctgtgaacttcagggnnnnnnnnnnnnnaatttatctatgtagaggttgggttaaataatatgtgtggttccattcaaatttaaattctggggtaagcactataggaataaaaacaaaagttaaggggataaaaataaaagttaaggggatagtgagctccaaatatcttggctggaaaagtgggaattattgggggaatgtgggaattagttaagagtaaatatcagattatgaaaagtttcaaaagctcagcataagaaaactctaggcttatgacagagttagtttaggttcatgaagataaagtagagcaattaattgccacttaggatatttcttttggcaataatctgcaagatacaggtaggaggttgtctttgaagaaagagggacttgatatgacaagggatggactctgggtgtggtgtgtactcattgttcctgcatccaatcaaaacagaaaagggtggcttcaaattccatgacaaccagggccctgtttgtccacaggcttaatacagtttctagaaataataacaggtgccgaatgcatgagggttgattttctaaaaagtggcacagctccttttagatacattgggaatgaggggctgaagatggtgaagcgtcagtgaggtctgatttttttcttcttgagaagaaaggcggaagatggtggtatgttaacaaggcaagtgagaaggtagactgagtcgctgaaccagaagtaacaatgatttttcaatatgttgaagctg

SEQ ID NO: 351247 - DNA, 550 bp, Homo Sapiens
taggccaaataattttttttgtgggaggtctcttgtgcgttttagatgattagcaataatccctgacctgttatctactaaagactagtcgtttctcatcagttgtgacaacaaaaatggttccagatattgccaaatgccctttagaggacagtaatcgcccccagttgagaaccatttcagtaaaactttaattactattttttcttttggtttataaaataatgatcctgaattaaattgatggaaccttgaagtcgataaaatatatttcttgctttaaagtccccatacgtgtcctactaattttctcatgctttagtgttttcacttttctcctgttatccttgtacctaagaatgccatcccaatccccagatgtccacctgcccaaagtctaggcatagctgaaggccaagctaaaatgtatccctctttttctggtacatgcagcaaaagtaatatgaattatcagctttctgagagcaggcattgtatctgtcttgtttggtgttacattggcacccaataaatatttgttgagtgaatg

SEQ ID NO: 351248 - DNA, 1169 bp, Homo Sapiens
  misc_feature (32)..(32): n is a, c, g, or t
  misc_feature (44)..(44): n is a, c, g, or t
  misc_feature (55)..(55): n is a, c, g, or t
  misc_feature (68)..(68): n is a, c, g, or t
  misc_feature (113)..(182): n is a, c, g, or t
ggaacctgaagctcaatccctggggaattccnaaaaaaagggcnaagcccccaantgcgcaaaccaanccctggctcccaatgaacttaagctgcaacccctgacaacaaaannnnnnnnnnnnnnnnnnnnnnnnnnnnnnnnnnnnnnnnnnnnnnnnnnnnnnnnnnnnnnnnnnnnnncgcattttccccaggggacctctcctccttcctctgaggcaaagtggcctgcaggggcccctgcagagcatacagggaggtgcttccttccctctgcccagcgagcaaagggtggagccttggcacccccagcaaccccctccaagggtggagccttggcacccccagcccccaccccgcaagggaaaaggggaagctgcacgaggagcaagatttcatttccccagaggacacagcttgggcagattcccatcattcttaggctgtgccccacatctatttctgccaaacaagaagcagacggagggggctcaggggggcgggcctcacaggaacggaagcaccaccccacctctattccctgtggcctccaaaagagctgggcaacctctgccagccactaccccttatgccaaggggagtcctcattccagagccagcatcttcatcttgtcctgatgccctgcccaccccctgccgagcttcacactgggctgctatggaaaactgaaaggtcagagggtggaggtcctctccctcctggacaaggaaacctcccccctgcctggcacttcggctggtcaggaacagtggctgctcatggagctgccctcccaccttcagaccctcctcctcccccgcaggggtgggctggggccctccctccctctgtacttgatccatgacttgtgagttctgagtcctcagggccgagacttgagtcagaaccttctggagcagtacgcatttcccctctgcacctggtgaggacaccaggctcctcgcttcctccccagatctctgagtgctcacccgaccccccaaccctggcgggaccttccagggctggcaagcatcgagcctgaccacgttgcctcttgggtgccagcacgcccacatcaaaggtgtcccctcttcccagaggccctgagcaacatcgggcgacgctgtcagcagacattagcagcagagctgcaccacgcatca

SEQ ID NO: 351249 - DNA, 1594 bp, Homo Sapiens
  misc_feature (57)..(99): n is a, c, g, or t
  misc_feature (527)..(535): n is a, c, g, or t
  misc_feature (1149)..(1170): n is a, c, g, or t
tgaataagcaagcttttgcctctaaaagtcacaagtaatcctcgtgtgtgacagaannnnnnnnnnnnnnnnnnnnnnnnnnnnnnnnnnnnnnnnnnnaacgagctggcggagaggagcagaaggcaggaggggaaatctggcacaacggctgggagaggaaacttgatgcttctgggccaccatttgccagggcctcgctcgagccggcgcctcggttcctgcccagctggatttggggggcagcattgcctggcgcaggagagatcaaatgagactgcaaagaagcataaaatgaatagacaatccaaccaaccaaagaccgggggcagcagcaggccagcaagacggcatcttctccttcccagcctagaagccctgtgaaatcgaggatcttccccctaaaacacatacacacaagatatgtgcaatcaagctgccaccgcttggtaaaaagctcatggtgcctaaccaaaaaggatcaggaacagatccttgaatcagctgtcacttctatagaatgggannnnnnnnnccttcctccttaacctgcgctggaaattgccgttggctttatacatctctatagagagaggctaaagagtcttgcgtgagaaagaagcaatttacaatgcaaatagaggcctgtgaagggacggatgctgctgctcactcgtaacagcttgctgcaccttaatagctggttttattttctgatattaatagatgaattgttggctaacgctgccggagattacttgctgaaaggaaaaagaaaagttcggaataaactctgaaggcaacagatctcgtttggatgttttagccgcgcacacacacaaacagaaaccaggtcatatttacataaaaggaggaatcttaagcgcggcaagtatcctggacgaccactcttcggtactgccagaaaggatcaggacctggagtctggcaagaggaagacagaggcctgtgtgggaagcgagttgttatctttggttatctagctgtatgagtgtattggtcttcataaagctagataaccgaaagtaaaaactccttcaagatcgccggggagcgtgtgagaatgaaagactacagccgagagacagtaaaaaccagaaaggtcaggaatacttattgaatctaacnnnnnnnnnnnnnnnnnnnnnnccttatgattaaaggtgggatgagagaaaattaaatgacacacacatgctaaaatatcaaggttccagatatgtcttgagaggggttgttgcagctgcaaaggagaagtgtatagtgataatgagtaaagatgcatgtgcagtttgttctattttaaggcaaaagttatatcagggatttttttcttagaaaggtgttgcagagatgtctggtacctagtttaaaaatgattccataatatgtagacttgggcagttcctttgtgaggcacctccctctcaaaatttgaagattgtgcttggaaattactttacatgtatttgggctgtatgtcaatttgtacgaaattagactttcagaaaagtttatactggaaggttaataatttgtatctactgaggacttagagctagcaggcaaaatg

SEQ ID NO: 351250 - DNA, 831 bp, Homo Sapiens
ggtcgttcacggatactttccgcgctttagatcctccttttatgtgaatatgacctgggttttgtttgtggtgtgtgcgcgggtgtaacatcccacgagatctggttgccttcaggggttattccgaacttgtctgttttgcctttcagcaagtgatgtccggcagcgttagccgacaattcatctagtaatatcaggaagattaaaccagctattaagggtgcagcaaagctgttacgagtgatgcagcagcatccgtcccgttcacaggcctctaattgcattgtaaattgcttcatttctcacgcaagactctttagcctctctctatagagatgtattaaggccaacggcaatttccagcgcaggttaaggaggaagggaaaaaaaatcccattctatagaagtgacagctgattcaaggatctggtcctgatcctttttggttaggcaccatgagctttttaccaagcggtggcagcttgattgcacatatcttgtgtgtatgtgttttagggggaagatcctcgatttcacagggcttctaggctgggaaggagaagatgccgtcttgctggcctgctgctgcccccggtctttggttggttggattgtctattcattttatgcttctttgcagtctcatttgatctccctgcgccaggcaatgctgccccccacaatccagctgggcaggaaccgaggcgccggctgaaagacaagatccaaagtcacagcacggccgcagcacacaaacaggcttctttcggcgtcccccatgccaggcacttgtcctgagcctcggagtggagagtgaagtgggatccccgt

SEQ ID NO: 351251 - DNA, 1950 bp, Homo Sapiens
  misc_feature (1431)..(1440): n is a, c, g, or t
  misc_feature (1672)..(1672): n is a, c, g, or t
cgagttgtatcacctggaattgatctctcaggattaacactgcagagtaatgctccatcaagtatgatggtgaaggatgaatatgtgcatgactttgagggacagccatcgttgtccactgaaggacattcaattcaaaccatccagcatccaccaagtaatcgtgcatcgacagagacatacagcaccccagctctgttagccccatctgagtctaatgctaccagcactgccaactttcccaacattcctgtggcttccacaagtcagcctgccagtatactggggggcagccatagtgaaggactgttgcagatagcatcagggcctcagccaggacagcagcagaatggatttactggtcagccagctacttaccatcataacagcactaccacctggactggaagtaggactgcaccatacacacctaatttgcctcaccaccaaaacggccatcttcagcaccacccgcctatgccgccccatcccggacattactggcctgttcacaatgagcttgcattccagcctcccatttccaatcatcctgctcctgagtattggtgttccattgcttactttgaaatggatgttcaggtaggagagacatttaaggttccttcaagctgccctattgttactgttgatggatacgtggacccttctggaggagatcgcttttgtttgggtcaactctccaatgtccacaggacagaagccattgagagagcaaggttgcacataggcaaaggtgtgcagttggaatgtaaaggtgaaggtgatgtttgggtcaggtgccttagtgaccacgcggtctttgtacagagttactacttagacagagaagctgggcgtgcacctggagatgctgttcataagatctacccaagtgcatatataaaggtctttgatttgcgtcagtgtcatcgacagatgcagcagcaggcggctactgcacaagctgcagcagctgcccaggcagcagccgtggcaggaaacatccctggcccaggatcagtaggtggaatagctccagctatcagtctgtcagctgctgctggaattggtgttgatgaccttcgtcgcttatgcatactcaggatgagttttgtgaaaggctggggaccggattacccaagacagagcatcaaagaaacaccttgctggattgaaattcacttacaccgggccctccagctcctagacgaagtacttcataccatgccgattgcagacccacaacctttagactgaggtcttttaccgttggggcccttaaccttatcaggatggtggactacaaaatacaatcctgtttataatctgaagatatatttcacttttgttctgctttatcttttcattaaagggtttgaaaatgtgttttgctgccttgctcctagcagacagaaactggattaaaacaannnnnnnnnncctcttcagaacttgtcaggcatggctcagagcttgaagattaggagaaacacattcttattaattcttcacctgttatgtatgaaggaatcattccagtgctagaaaatttagccctttaaaacgtcttagagccttttatctgcagaacatcgatatgtatatcattctacagaataatccagtattgctgattttaaaggcagagaaggcctcaaaggtaaatcacccnatggtattttgtgtacaagttgttattgttgaacatacttcaaaaataatgtgccatgtgggtgagttaattttaccaagagtaactttactctgtgtttaaaaagtaagttaataatgtattgtaatctttcatccaaaatattttttgcaagttatattagtgaagatggtttcaattcagattgtcttgcaacttcagttttatttttgccaaggcaaaaaactcttaatctgtgtgtatattgagaatcccttaaaattaccagacaaaaaaaa

SEQ ID NO: 351252 - DNA, 1031 bp, Homo Sapiens
  misc_feature (925)..(961): n is a, c, g, or t
  misc_feature (1006)..(1006): n is a, c, g, or t
ggactccgcgggggccagtccgtagagtggggggggacacaagcccagcccacaggaagccggaagggcctgggacacaccattagctccccgggaaccatctctcggccagtaacacacgtggatccgcaggttcttgagaggcatctcaatgcccagggacggaggagctggttggtccaaggacctgctgtgatgaccaagctcttagcttggtagctcctggaggtggttttcaccgtgaccagtagccctgggtttatctccaccaccttctctccgtcacgcactatgcctcctagctgtcgaattgcatcctgcagggctctgagggccttatatgcatagataactcctccggaattgtccaagagccccacttctcccctgggcaaccgaatatttgggaaacgttgcttcagttcctcagatgaaagacactggtgttctaccctctgcctcgacagattggcctggattgtctttaattcttgattctctttcattcccagcagcagtaatccagtctgcctgtgcaattgggttccagcctcgtgctccagctgggcccatatctgatagcactcatgcatcatccgggtgtaaaagtcttccaggtacgcctttcggattatccggctttgtccatgggagcttcctcgggagtgtggtagaaagaactgctccagcaggaggatcctcttcctgtgtttggccaggtggtatgcagtgaagcagccctggatccccgccccaatcacaatggcgtcccagagatctttctgagccgccatgatgccactcagccccacagccacagagcctcaaaggcaaaggcaagcaaagacaggctcccggctaaaggacgaggaggaaggcaagccccgctctcgacgaattcgagctcggccgatttggcctgatnnnnnnnnnnnnnnnnnnnnnnnnnnnnnnnnnnnnncgccgccaccccgccgggtataaaactcccgggatttcgcccttnaattagtgagtcgtattacattccc

SEQ ID NO: 351253 - DNA, 653 bp, Homo Sapiens
atcagaaccgtacataaggaaagccagttgagcagcaaggtgctgaatagcaaagactactagatacgtacagtagaacacctaataccccaagctaaaacacttaaagggttgggatgtgaggctaatacagttatgcaggtaagtggtagtgggggctagaattaaggcagtgacgtttctgtcactcagcagacacagcatcagttatgatgaatacttaggattctgaataacactattttaaacttcttgaatgccatcatagaatacatgaaattcaaagaagttcagaagccagctgtgaggaattttccttgcctagtaagattacgtagacttacacaaattctctcaaaaggcagctgagctaatattttggtggtcaagcaaagcaggccctatttagctttatctttacccctatatcacagttacctaattttctttaaagtggaaacaagtggatggattattttctagagaataagaactcatccatgtccaaaactgagattacctctagtcactacacaaataaatgtcagtaatgataaccacattatagcataaagaatcactgcagatcagggagtaacttacagacaaggaaattattgtttcatgtatccctcatcagcaaacaaaaagaa

SEQ ID NO: 351254 - DNA, 977 bp, Homo Sapiens
gtattataggcagaaatgctaaaggttttaaaatatgtcaggattggaagaaggcatggataaagaacaaagttcagttaggaaagagaaacacagaaggaagagacacaataaaagtcattatgtattctgtgagaagtcagacagtaagatttgtgggaaatgggttggtttgttgtatggtatgtattttagcaataatctttatggcagagaaagctaaaatcctttagcttgcgtcgaatgatcacttgctgaattcctcaaggtaggcatgatgaaggagggtttagaggagacacagacacaatgaactgacctagatagaaagccttagtatactcagctaggaatagtgattctgagggcacactgtgacatgattatgtcattacatgtatggtagtgatggggatgatagaaggaagaacttatggcatattttcacccccacaaaagtcagttaaatattgggacactaaccatccaggtcaagaaaagtcacatgccatagccatggtattgcacatcattcatcttgcattctttgagaataagaagatcagtaaatagttcagaagtgggaagctttgtccaggcctgtgtgtgaacccaatgttttgtttagaaatagaacaagtaagttcattgctatagcataacacaaaatttgcataagtggtggtcagcaaatccttgaatgctgcttaatgtgagaggttggtaaaatcctttgtgcaacactctaactccctgaatgttttgctgtgctgggacctgtgcatgccagacaaggccaagctggctgaaagagcaaccagccacctctgcaatctgccacctcctgctggcaggatttgtttttgcatcctgtgaagagccaaggaggcaccagggcataagtctactcacttatatctgtttgtctggaacataacccatgtttgtttttacaacaaataaaattgatcttgaat

SEQ ID NO: 351255 - DNA, 1154 bp, Homo Sapiens
  misc_feature (6)..(6): n is a, c, g, or t
  misc_feature (8)..(9): n is a, c, g, or t
  misc_feature (54)..(54): n is a, c, g, or t
  misc_feature (57)..(57): n is a, c, g, or t
  misc_feature (64)..(64): n is a, c, g, or t
  misc_feature (85)..(85): n is a, c, g, or t
  misc_feature (93)..(93): n is a, c, g, or t
  misc_feature (102)..(102): n is a, c, g, or t
  misc_feature (650)..(670): n is a, c, g, or t
tttccncnntttaataattatttattggttgtggtttggtttttttgttgtttnttntagtgantccccatcctctggcccctanaaatgctnccttgtgtntggggtacctgggaaaggtggtggctgaggcagtcataatgcagtatcttcccctaactccagccacaaagctcatacccagccctaccaatcatgaattggaactccataaggaggggccaaattgggagaccttttggcaaacagtgtctattttacagagaggcaaaccaagcctccttagtgccctggggctgatggtcacccagagccatagagcacccttcctcctgggccagagctgggttatcatggttggcttaggtacctcaggtggcccaggaggtcccccctccataaggacgtcaaacttccatgagggccagtgttcctagtgtgggccaggaacaggacagggagaccttgtgatggcggggcagggagcctgttcgtagggaagatgaggaggcaagggctgcctctcacacctccaggttctgtaagttctggggagggagcgccccacctgctgaggtcggtcctctcagccctgcctgccctggcctgggctctcccagcctcccagccctctgccccctcagatggcnnnnnnnnnnnnnnnnnnnnngcatccatcagagactgcacctctgtgtggcaggcagggcatgggttttagtcctggccactgaccagctgtgtggccctggccgagtcgtagccccctggagcccagcttccatttctataaaatggttgtttcgggagagaggggcaggctttctgtgtgactcgggagttcttccatgagggctgccagggggtggtgtgccaggacctcaggctgggcctttgtgctggccttgcagtgggtgtgtggggaagtcactgtcccactatgggtctccactacccagtcactgaccctgggagaccccttctgtgtgggagggagcgggggctggctagcgggccccccagccagggatcccagaggctgagggttggggagaggaagccatcatctcattacctctgtcagtgcaggggtggctgctgcttcccttgtgcacttgggtcgctgtgattgtgaataaaagtgatttcgtacc

SEQ ID NO: 351256 - DNA, 1323 bp, Homo Sapiens
  misc_feature (124)..(209): n is a, c, g, or t
  misc_feature (867)..(934): n is a, c, g, or t
cacacacccactgcaaggccagcaccaaggcccagcctgaggtcctggcacaccaccccctggcagccctcacggaagaactcccgagtcacacagaaagcctgcccctctctcccgaaaccannnnnnnnnnnnnnnnnnnnnnnnnnnnnnnnnnnnnnnnnnnnnnnnnnnnnnnnnnnnnnnnnnnnnnnnnnnnnnnnnnnnnnatgccctgcctgccacacagaggtgcagtctctgatggatgccaataaaacctagaccaaaagccatctgagggggcagagggctgggaggctgggagagcccaggccagggcaggcagggctgagaggaccgacctcagcaggtggggcgctccctccccagaacttagagaacctggaggtgtgagaggcagcccttgcctcctcatcttccctacgaacaggctccctgccccgccatcacaaggtctccctgtcctgttcctggcccacactaggaacactggccctcctggaagtttgacgtccttatggaggggggacctcctgggccacctgaggtacctaagccaaccatgataacccagctctggcccaggaggaagggtgctctatggctctgggtgaccatcagccccagggcactaaggaggcttggtttgcctctctgtaaaatagacactgtttgccaaaaggcctcccaatttggcccctccttatggagttccaattcatgattggtagggctgggtatgagctttgtggctggagtcaggggaagatactgcattatgactgcctcagccacaccctttcccaggtaccccacacacaaaggcagcatttctaggggcccagaggatgggaactcacctannnnnnnnnnnnnnnnnnnnnnnnnnnnnnnnnnnnnnnnnnnnnnnnnnnnnnnnnnnnnnnnnnnnggctggtcttggcccagggaacccacacctccccacccagggccctggcccatcccaggtgtgccacaggctctgactatcagcctaggccctggacagaacaagatatggggaaaaggtcagagagggtagctgcaaacctgttcttagggaccctggcagaagaccaacccttctccccagcccataccgaagggctacccctgggcaatggcatccagcgagatgattggggcaggaaggctacagccaggacaggatcctccctttctcagccaggggcccagaacctggagccctctgcagcctgtccatgtgcccatcaggtagtgggagagagacatggcatgaggctgcagcctgcccaggacgggaggcaaccaccagcc

SEQ ID NO: 351257 - DNA, 888 bp, Homo Sapiens
  misc_feature (24)..(24): n is a, c, g, or t
aacccagggcccaagaacctgganccctctgcaaccctgtcccatgtgccccatcaggtagtgggaaagagacatggccatgaagctgcagcctgccccaggacgggaggcaaccaccagcctctcacccccagctgcccatgcccagtgggcagggaacgaagaaagagaaggtaggcataggtcagagagggagacagcagctcaggagcggcctgcccagggcggttgttgagcaggctgtacactgctcaagggcagttggctgagagggcaaatgagcctaaaatccactccatgctgcactagccaggccacatgtcctggctcagggctgcagctgcccagaggaaggtacatgttttctaattctcacaaaggtgccacatggactacagacacctcctagaaacctgcctcagatggggaaagattagggcaggctgagatcccaatttagccctcagcatgcagagaggagctgggtgcagagacgggagagacagggagagtgcggcctcctctcctcccctccctctgcccggtgatttgcctctgccccctccctgcctgatacccccctctccccaaaccttcaagggcttcagtttcccatgtttaatagaggaggaaaagtttccaaaatgaggaagagaaggggccccactggcttgttcctcagctgggactgggctgaagcccgagaagatgggtatgcgggatgggccaccgcaacgggctaggagctgcggtaggtcttgatgatgtccttgatggggcggcggcagatggggcagcaggcgtgcagagccttcttgaggcgcaggccacaggcgtagcagaggcacatgtggccacatgtgtagatgaccgtgatcccgggaattc

SEQ ID NO: 351258 - DNA, 629 bp, Homo Sapiens
  misc_feature (16)..(16): n is a, c, g, or t
  misc_feature (156)..(156): n is a, c, g, or t
  misc_feature (254)..(303): n is a, c, g, or t
tgaccatcaagccccnggggcactaaggaggcttggtttgcctctctgtaaaatagacactgtttgccaaaaggtctcccaatttggcccctccttatggagttccaattcatcattggtagggctgggtatgagctttgtggctggagtcagggnaagatactgcattatgactgcctcagccacaccctttcccaggtaccccacacacaaaggcagcatttctaggggcccagaggatgggaactcacctnnnnnnnnnnnnnnnnnnnnnnnnnnnnnnnnnnnnnnnnnnnnnnnnnntaattaaactgaggaaaaaggctggtcttggcccagggaacccacacctccccacccagggccctggcccattcccaggtgtgccacaggctctgactatcagcctaggccctggacagaacaagatatggggaaaaggttagagagggtagctgcaaacctgttcttagggaccctggcagaagaccaacccttctccccagcccataccgaagggctacccctgggcaatggcatccagcgagatgattggggcaggaaggctacagccaggacaggatcctccccttctcagccaggggcccagaacctggagccctctgcag

SEQ ID NO: 351259 - DNA, 909 bp, Homo Sapiens
ggaattcccgggatggcccattatagcaactctgagacctctctaccgcaggctcttaaaatggggctatgattaaaagtttcatggatgtctaccagcttgcaagcactagaatcatgacattagagaaggaaatgacatctcatcgaagtcacattgcagccttgaaatcagaacttcacacagcttgtttacgtgaaaatgcaagtttacaatcaataggatcacgagaccattcaaatctctccattccttcaagagctcctcttcctgctgacacaactggtattggggatttcttaccattgaaagctgaacttgatactacttacactttcttaaaggagacatttataaatactgtgccccatgctctgacatcatctcactcctctccagtgactatgtctgctaatgccaacagaccaactcagattggattatgacttcatgaaattaaaaaatggaggaagagttaacagtacaattaaaattgttttgaatgggaattttcttatcagttgacttttgtttcagcagaagtggcagtggatttaaaaaatttgtgcgctatcttgatgtattctggtagctctgtctccttgaataaggaaatagccaacttttttctctccaagttttatttgttatcacagttgctcatttttatgtaacatatttttaaatgttaaggaatgacacattttgggtaatttccctcagacttaaaaaaatcaataagccattttagtctctatctatcaaagttgtttcatacttgtctattttaaagcaggactgcaatgctttaataggattgagagagctatttgaaatgtatgccaatgattcctgtcatttcatgggcagcccggccatgggttcactggagccccctccttctctctt

SEQ ID NO: 351260 - DNA, 763 bp, Homo Sapiens
gggggaagaggtagctcacgcgatagaaacgtgttcgctgcccagaagaagggaaggcgcgagtgaggaaaggaggtactgtagatgccctccaaatccttggttatggaatatttggctcatcccagtacactcggcttggctgttggagttgcttgtggcatgtgcctgggctggagccttcgagtatgctttgggatgctccccaaaagcaagacgagcaagacacacacagatactgaaagtgaagcaagcatcttgggagacagcggggagtacaagatgattcttgtggttcgaaatgacttaaagatgggaaaagggaaagtggctgcccagtgctctcatgctgctgtttcagcctacaagcagattcaaagaagaaatcctgaaatgctcaaacaatgggaatactgtggccagcccaaggtggtggtcaaagctcctgatgaagaaaccctgattgcattattggcccatgcaaaaatgctgggactgactgtaagtttaattcaagatgctggacgtactcagattgcaccaggctctcaaactgtcctagggattgggccaggaccagcagacctaattgacaaagtcactggtcacctaaaactttactaggtggactttgatatgacaacaacccctccatcacaagtgtttgaagcctgtcagattctaacaacaaaagctgaatttcttcacccaacttaaatgttcttgagatgaaaataaaacctattcccatgttcaaaaaaaa

SEQ ID NO: 351261 - DNA, 1602 bp, Homo Sapiens
gtttcggaaaacaatatggccgctcccagctgggacgtgagtctctggattaggcaggcagaggcagttatgggcttctgcagtggcgagaaaggaagcgcctgaagggtcgtgaggctggggcgggacccggcaccgctggggcggccaggccgtgaggacgccaatggcgagcagcgtggacgaggaggcgctgcaccagctgtacctgtgggtagacaacatccctctgtcccggcccaagcgaaacctctcccgggactttagcgatggagtccttgttgcagaggtcatcaagttttacttccccaagatggtggagatgcacaattatgtccccgccaactctctccagcagaagctcagcaactggggtcatctgaacaggaaggtactgaagaggctgaacttttcagtaccggatgacgtgatgcgcaagatcgcgcagtgcgccccaggcgtggtggagctggtgctcatcccgctgaggcagcgcctggaggagaggcagaggcgcaggaagcagggcgccggctccttacaggagctggctccccaggatggcagtggctacatggatgtgggtgtatcccagaaggcccgaggtgaaggtgtcccggacccccagggagggggtcagctcagctgggaccggccgacggcgcctcggcctccagcgtataaccggggcgtttgcagggcgaccccagcttcgtcctccagatcgctgaaaaggagcaggagctgtgggctctcaagagaccgtgcaggtcctgcagatgaagggtaaggcgcctggagcacctgctccagctcaagaatgtgcggatcgaagacctctcccggcggctccagcaggcggagcgtaagcagcggtgagcggcggcccgggccgcgcaggggacgcccgggtacccgccagagccccgacgaccgcgccggacccacccaccgatggatagaccattgggagggcggagcccgctgctctcacgagcctgctggggcccgagtgccctccttccttgggatgggtgagcgtgggaggtagatgggacaggaactctaggagcgcaggcccgggactgagccgcctcctaccactccggagatccgggtcaggagaatggaccgctttccagagcccagaagccacgtgcagagacctagcctgtcccccaaagcagtgtccaacaccttgggcccggccttgcatctcccggcgctgggccttggggggcggtcccttggctctgtccacacccccagaatcaggtccccgcccagctccgaggacggcggcgtctccatccacgctagttccccatgccctcagccatgggggaatctgtcccgggccgctgaggggctcccctgcccctcctgggagcttacctgggacccacctcggcgacggagaccgcagcagctggagaggaaggggtgaggcgtgggatcgccaggagtagggaggacatcgacgatgtgcccgtagcagtcgcccctccctcctcgcgcacggggtactgaggcggaaggtttgaaggttacggctcagggctgccccattaaagtcagtgttgtgttcgaaacagacccccc

SEQ ID NO: 351262 - DNA, 508 bp, Homo Sapiens
atagttttagctccaagccaagcaagtttgtgtttggatagaggggaacttaactattaactacaagttgtatgtctgtggtatcttgattttccccattcctaaagatgaaatttcacaaagcccataaagcgtgaaatttagagctggacttaagactcattggccgaccatcctgtgtcctggcctggccctgcagtaagaagcgtgtctgggtctggagaagggtgcttccgagagtgtgcaggtggcccttccccttggaggcgagaagagagaatgtgctgtctatcttcctggttttcagtccacagagtcggtagaccaggggttacgtgactggggaaaatctcacatctccttgtctgaaaacatttcccctgctgttctctttctaacatgttgtggtaaatctgttcagatactgctcatctgactgttttgtacatgtgacaattgccttaaaacctagcacagtcctcagaaatgaataccgtgtttccactgg

SEQ ID NO: 351263 - DNA, 1887 bp, Homo Sapiens
  misc_feature (16)..(16): n is a, c, g, or t
  misc_feature (43)..(43): n is a, c, g, or t
  misc_feature (126)..(126): n is a, c, g, or t
  misc_feature (135)..(135): n is a, c, g, or t
  misc_feature (148)..(148): n is a, c, g, or t
  misc_feature (181)..(181): n is a, c, g, or t
  misc_feature (195)..(205): n is a, c, g, or t
  misc_feature (1113)..(1113): n is a, c, g, or t
  misc_feature (1760)..(1760): n is a, c, g, or t
  misc_feature (1864)..(1864): n is a, c, g, or t
ggacgccgacaggaanggctggagggaccttctaggggctggntctcccactgaagagcatgcatctcaccatatgtaaattttaccttaattaataaaaacagcactggacgcaaatacgccaanattgttgtnaaggttaatttgncgtggtgggaatatggtgctttatttggatttnttttttgagcctcnnnnnnnnnnngaaagggaaaggggtcttcccccaggcaagcggccacccccggcaggagggtcccccggcaggaacgtcccagccactccgcagtcactcctgacccagaaaagaacaaccacagctgggcccagcaccccgggccactccctgcagctgcccacacatctggcagctgggtccacttatgcaatgtggatcgggcttcttacatctgaaatctgcgtctctatccctcctctgagaccagtgtctcctgccagcttccatggccccgggatgacctcactctcccagggtctccctgcgtcctgggagctctggccgaggagcagcaggggctgatggcggagcgggggcaggtcagagctcagcagatggggtcctgaatacacgggggatgtgggaggggccagggggctggggatgcccaggatttggcacgggggtctctgtgttccacccactcctggcacaaaagccccagcctcaggaccccggtcacaggcacccgggggtgggggtgaccagcagcagttcagaggcaggtgtgggcaatgtgggcctgagtctcctccccactcacgtcactgcccgcggggacacagcggcatttctggggcactcggcatgccgggttcctaacctcaattattcattctgctctcaggcacctcctgacgagaccctggcccaggagagctcggctcggggacagaggaatgagactcagtgggacgcagagcccaaccccatccccacccctggctggatggggtctgggggcagcagaatgtggaccactcagcaggaggcttcctgactgtctcctcctgaaccgatgtcactcacaggcaggggacacgccatcctggccccgcccctctgggcccttggaatcatggaagggtggggcnagcctgtgccccatcccaaaggggaagtgtgccccctggggacactggggggctgccgggtgcgcccatcttttagggggtgcactgccgggctccagggtcatgcctggaaacatttcaggcctccctcacctctggataccgcctgcaggggtgaggctgtgctgagctctgcctgccctgccaggacggagggcatgggcctgtgtggaaaccccagggctccctgactcccatgaggcttctcagggacttcctgccccgagggtcccagcatctcccaggtggaggtcctcaaggatgcccccaccagctccccacagctactgtagcaggaagtccttcttcccgaacccagagcccagggcggatctccccggctgcgcgccaaggtggaaaccctcagggtcctgggggaaccagggcccaggtctggactccattcgggaccttcccagctccggggaatcacaacacagaagtaccccagggctgaagccactaggcccccgtggagccctggccacctgccagagccctggccctacgcctggaaggcagagtcctggtctccagactcgctggggctgggtgttcctgtcccccgcggagggcctgcgcaggggagagctggtcccgcgtgggcntcccgattctccccacgcggaaccagctccacaaaactctgttctccaaggctccttaggcacaagacttgagttctcactaacttacccaaaacacaaccaancagaatccctgcctggaccctct

SEQ ID NO: 351264 - DNA, 916 bp, Homo Sapiens
  misc_feature (14)..(14): n is a, c, g, or t
  misc_feature (48)..(48): n is a, c, g, or t
  misc_feature (182)..(204): n is a, c, g, or t
acccccaggaaaangggggaaccctgaaacatttggaaggggctaacngccttaaaggggggtgggaagggaaaggaaaccaaaaccatcccgtagaaacaatatgaaaattgccttcttaaaaagcttccctttaacaatgaaagaaaaagagacgagaagatgtgtgtgtcacagagaannnnnnnnnnnnnnnnnnnnnnnccagggagacacccccccgccggttgggcattgacaagaagtctcagtgcagcagagcgtctattttcggggtcccatgctagcattgcatatgcaaacggggtgagggcgtcctggcatctggcgacatagtctccccaaccccggcccctgtccgtggcctgtggctcggtcaacaccgggccttgtgggagccagaggttggggggaggcaggtcccagtccccctggattacagtcagtgcctttgagtaaaaagaggggtgcctggggtggggagaggggcggtggttctaaggccctggaggtggggggcccctgtcacccacctcagcagggtaggcgcatccaaggtccagctccttggtggccatgcgggagggacaggcgtgttgggggattggggggtgccggatggggatcggggtgctccggctggaaggcccatccctgagctagggaggaggaaggagagaccccgtggacagaagcgggcgctaagacctcttcacgtcagaaccaaaaaaggggacagaaagggggagcggggggaacacagcacgaacaccccacagtcctgccttcgaggctgacgtctgggggtgaagcacaaacacctcggggcgtctcccaggtcccctgcgatggcttcctcctgaaccccccttctcgctttttggggaacagaagtggattctacgtttgtggtggg

SEQ ID NO: 351265 - DNA, 423 bp, Homo Sapiens
aaggcgggtgggaaggaaggaaccaaaaccatccggtaaaaaacaatatgaaaattgcccttctttaaaaagcttccctttaacaatgaaagaaaaagagacgaagaacatgtgtgtgtcacagagaagggggtatgggggggtcgggggcagggagacacccccccgccggttgggcattgacaagaagtctcagtgcagcagagcgtctattttcggggtcccatgctagcattgcatatgcaaacggggtgagggcgtcctggcatctggcgacatagtctccccaaccccgcccctgtccgtggcctgtggctcggtcaacaccgggccttgtgggagccagaggttggggggaggcaggtcccagtccccctggattacagtcagtgcctttgagtaaaaagaggggtgcctggggtc

SEQ ID NO: 351266 - DNA, 660 bp, Homo Sapiens
ttgcatcatcatagcttggcatctactcataagtgagaacatatgatatttggtatccattcctgaattactttacttaggataatggcctccagctccgtccaagttgctgcaaaaggtattatttcgttcctttttgtggctgagtagtattccatggtgtatatataccacattttctttatccactcattgcttgatgggcagttaggttggttccacatctttgcaattgtgagttgtgctgctccagatatcatctttaactcctttgccttctccacatacatttccaagtcctgttcattctacctccaaaatgtatcttgtatccattcatctctctccatcttcaatctatttcaatgccccatcatctcttgcatggaggagtgtaataattggctaactggcctgttcttacattttaaaatcaaaagatgtgacaggtgaaatgcctatttcagtgtccattgatggttctccttacacaccacctggctgcctggtgtcgcagtggcagagttgagcagtgtgaaaaagactgcttggccctttacagggaaagcaggtccactgtggcctgtaaggacgagagctctgggcaggctcggacactggcagaccctggtcctggctggccaaggcagcagggtatgt

SEQ ID NO: 351267 - DNA, 534 bp, Homo Sapiens
cactattcgatccagcaatcccactacagggtatctacccaaaggaaaagaagtcattatctcaaaaaaagacacctgcacacacaggtttattgcagcacaattcacaattgcaaagatatggaaccaacctaagtgcccatcaaccaatgaatggataaagaaaacatggtatatatacaccatcgaaaactactcagccacaaaaaaatgaaataatgtcttttgcagcaacttggatggagctggaggccattattctaagtgaagtaactcaggaatggaacaaataccgtattttctcacttataaatgggagctaagctatgggtatgcaaaggcatacagagtggtagaatggacattggagactgacaagggggaggggtgaaatgaggataagggataaaaaactgcatattgggtacagtgtccactactcaggtgacaggtacattaaactctcagactttcaactatacaattaatccatgtaaccaaaaaccacttgtacccctaaaacaattgaaattt

SEQ ID NO: 351268 - DNA, 724 bp, Homo Sapiens
  misc_feature (91)..(91): n is a, c, g, or t
atcagtgacagagctggatggctgtgggtctacaccagcacaatctcttcattgagttgagggctcagggcttcagggctgtcccccacanatcctctcaatccttgtcaggagccgccaagaattggtgtcttcaggaaggagctggtcctgccgatcatacaggacgacatggtgcctgccagccaaggttcccatagcacctgctgattgtcctggacttctcactgggcttctgggaagtcaggcagagcctccgccctcccatgttagcgcagcatgcctcacgcctgccggctgcagagtggctaccatgtggttgcagtgggtgatggcagagattcccttttgcattgggacggcccccatgaaccttactccccagcagagctgggccttttaaggcaggtgtaggagaggagcttcctggaccaggctcctgatggcttctgtgggaaggagttgcactaaggagcccagagcagtcaagacatttgcagttcagtctaagcaaggttcaaagaggcttgggtacactgggcaatgagggtctaaccttccatcaaggggttttgttaacctgccttttctgggagtgtcaaaagtggctctcagtgtgttatgaagggactcatcggccataacctattagtgggctactaatggtaattctccagctcacaagttcaagatagaaaatcttccccacttttttctgcttttc

SEQ ID NO: 351269 - DNA, 1917 bp, Homo Sapiens
ccagatccttttgtcccagtgctgagcactgctgtgaaactgattgctccagagagaaaggaggagaagaatgtcttgggaagcgcgctgctgtgcatagcagaggtgacctccaccctggaggcgctggccatcccccagcttcccagcctgatgccatcgttgctgacaacaatgaagaacaccagcgagctggtctccagcgaggtctacctgctcagtgccttggctgctctgcagaaggttgtggagactctcccgcacttcatcagcccctatctggaaggcattctcttccaggtgattcatctggagaaaatcactagtgaaatgggttctgcgtcacaggctaatatccgtctcacatctcttaaaaagacactggctaccacacttgcaccccgagtcctgttgcccgccatcaaaaaaacttacaagcagattgagaagaactggaagaatcacatgggtccgtttatgagcatcttgcaagagcatattggggtgatgaagaaggaagagctcacctcccatcagtctcagctaaccgcctttttcctggaggccctggacttccgagcccagcactctgagaacgatctggaggaagttggaaaaacggaaaattgtatcattgactgtctagtagccatggttgtcaaactttccgaggtcacattcaggcccctgttcttcaagctgtttgattgggctaaaacagaagatgccccaaaggacaggttgttgacattttacaacttggcagattgcattgctgaaaagctgaaagggctttttactctgttggccggccacttagtgaagccttttgctgacaccttgaaccaggtgaacatctccaaaacagatgaagcattttttgactctgaaaatgaccctgaaaagtgctgcttgctgttgcagtttattttgaactgtttatacaaaatcttccttttggatacccagcattttataagtaaagagagagcaggagccttgatgatgcctctggtggatcagctggaaaacaggcttgggggagaagagaaattccaggaacgggtgacaaagcacctgataccatgcatcgcacagttttcagtggccatggcggatgactctctttggaaacactgaactaccagattctgctaaagacgagagactcctcgcctaaggttcgatttgctgctttgattactgtggtagcactggctcaaaaactaaaggagaattatattgtcttgctaccagaatccattccctttcttagcagagttgatggaagatgaatgtgaagaagtagaacatcagtgccaaaagactattcagcaactggaaactgtcctgggagagccactccagagctatttctaagactttctgtggtgtttcatactctactcagagttcacactcatatttcatatttttatttttgggtgttgggtgccatgttacttttggtgccttaatacacctacttggattacttacaaatgttttatcacttctttacaaaatccccacctggcttgtgctgccacataagcctctcctgcctatcgtatagagctgcagaaagagtaaatgatacacggtatttttatacagactgctgtgtttgtttaaacatttattattctcttcctgattgatggtaataatattagacttgttaattttagcacccaaagctgacgcctcatttgcactgtaagccttaactcttctgtacagcagtatcttacatacatggtatccatgttgcagatttcactcaaagttgctctatttcaagaaaatgaagttatttagcaatcaacagaagtacttttgactgtaaagcctacttttcattgtgggtaggcgaacttcagccttcgtatggcaagaatcacggaccggtccagc

SEQ ID NO: 351270 - DNA, 1390 bp, Homo Sapiens
  misc_feature (337)..(337): n is a, c, g, or t
  misc_feature (359)..(359): n is a, c, g, or t
  misc_feature (1045)..(1045): n is a, c, g, or t
  misc_feature (1117)..(1135): n is a, c, g, or t
  misc_feature (1338)..(1338): n is a, c, g, or t
tgatcctgttcaggttcgattgctgctttgattactgtgttagcactggctgaaaaagtgaaaggagaatatgatggtcttgctaccagaatccattcctttcttagcagagttgatggaaggtaagttccccaactattcccaccattaaacaattaaggaataattcagtaaaattctgtgaaaatgtgcccaatgataatgcagatttggatataacgtgactagcagttgatccagtcctcatacaggcagctccagtctcaaatacaggcaggctcgagctcctgttttgagttgggtgaagggagcaagttgcgaagtgaccacctcctgnatcatttgagagtccgtttacnagtgtaatctttcacgatcttttcttttgtggtggtttgtgatcatacaagcagattacagtagtgtttttaattaacctcatacatttatatgattgaagttttggtccccagattgtatggaaatgcctagtggcattaaggatgcagtaggatgtccacttttagtagcaaccgatgttcattcactactccatgttaggtgctttacttggattatctcacttaaaaaccacaacattttatctctgttttacaaaggaagaaactagaggcttaaaagatttcagttatttgacaaagatcacaagctagtgagtgtgacatggggagctgtgacagttctggaacatagagtcttaggcccaggaaataacagtaaatgttattattaagggaggggtggtggagcaagtagatcagtcctttactgattcattgcttatctaagctacaaaagtacattctcctttgtttcttagctcttggaggggggaggtgtgagctactaaaggggtggcatccctaggaagtttgagttttggggattcttattcagcttccagtgcaagcctgtgggcaaggaatgaaggcggaaggagcggtgtggagggaggcggtccgtggcgcctcctgctttgttaaatgtgcatcatttcactcttttgattgaatgattgccgganaagtgcaaggccattaagaattaaactaatgagaaccgaggcaggcggactgactcagattttaattttgannnnnnnnnnnnnnnnnnnagatgaatgtgaagaagtagaacatcagtgcccaaagactattcagcaactggaaactgtcctgggagagccactccagagctatttctaagactttctgtggtgtttcatactctactcagagttcacactcatatttcatatttttatttttgggtgttgggtgccatgttacttttggtgccttaatacacctacttggnttacttacaaatgttttatcacttctttacaaaatccccaccctggcttgtg

SEQ ID NO: 351271 - DNA, 461 bp, Homo Sapiens
  misc_feature (390)..(390): n is a, c, g, or t
  misc_feature (406)..(406): n is a, c, g, or t
tatgatcacaaaccaccacaaaagaaaagatcgtgaagattacactgtaaacggactctcaaatgatcaggaggtggtcacttcgcaacttgctccctccacccaactcaaaacaggagctcgagcctgcctgtatttgagactggagctgcctgtatgaggactggatcaactgctagtcacgttatatccaaatctgcattatcattgggcacattttcacagaattttactgaattattccttaattgtttaatggttggggaatagtttggggaattaccttccattcaacttctggctaaggaaagggaatgggattctgggtaggcaaggacaatattaattctccttttagttttttcaggccagtggcttaaccacagttantccaagggcaggcaantcggaacccggaagggggattaaagggggccaagggaattaaaagtgggtgttta

SEQ ID NO: 351272 - DNA, 1414 bp, Homo Sapiens
  misc_feature (1281)..(1281): n is a, c, g, or t
  misc_feature (1331)..(1331): n is a, c, g, or t
tgtgaccagccacacctccaagctgcaggtgaacttgctgtccaaatttttgctgattgcaaaatcttgctatgagcagagaaacttcgcgacagccatgcagatcctgagcgggctggagcacctggccgtgaggcagtcccctgcctggagaattctgcctgcaaagatagcagaggtcatggaggagctgaaagccgtggaggtcttcctgaagagcgacagccggtgtctgatggaagggcggcgcttccgggcgcagcccaccctgccctcggcccacctcctggccatgcacatccagcagctggagacaggcggcttcaccatgaccaacggggcccacaggtggagcaagctcaggaacatcgcaaaggtggtgagccaggtgcacgcgttccaggagaacccttacaccttcagccccgaccccaagcttccagtcgtacctcaagcagaggattgcccgcttcagcggtgccgacatttccacactcgccgcagatagcagggccaacttccaccaggtctccagcgagaagcactcacggaagattcaggacaagctacggaggatgaaggctacattccagtagccgagctcgggcctggtgtggaattccagatccgaatccgactgtggggggcgggctgggaggtgggagccgcgtctcaggcccggccgttatcaaggcccctccgcccccgaaccctggggagctggaccaggaggtggaggctcaggggaccccatggggacaggcagagctggtctcctcccagcagacggagccaggacgggcacaagagtcttggaggtttgcgtgtttctgctagaattaaaaagttaaatttaaaaatgaaaatgaaagacagcttcccaggagttttgtgcctgtctgcgcctctcacacacagataagtggctcttacccagctctcagtgactcccccacaaaacagcaacagcctccaccgccaactcaacaaacttcagagtagctcctccctgagcaggtttctgagccagcctcggttggctgagcaacgaagggccaaagctgacctctgagtggccaactgcagctcccagggactccgagacctccggtccgagaccctgcctgggttcaccccccacaacccagacccagaaccgctctccccttccctgcccagtgcccctcttccccagcccagacccccaggtgcccaaggccttgctgctggagcaggcaccttgggctggggcttgcttcccccaggggcccaggggccccncagctttaggaacagccttggtgaggtgggtcattgcccggggcaaaggncttgtttcttgggaaaaggacatttaagagcagtttcaagacagaggtttttttggccggggttctttagaatttccccaacc

SEQ ID NO: 351273 - DNA, 884 bp, Homo Sapiens
atcaggccaaatcggccgagctcgaattcgtcgagagcggggataaatggccttaggccgcgggcagcgagatgttgcgttccggtgtgggtgtgggtgtgcctccgacggcgtctcggtgccagtgtcgaggttctttctgcttagctacccggagccgactacggaggaggacacctgagtttacgtctcttccatctgctgctcgcctcagctgcctgggtccccgacgagagccaggtgacacttaactccgccatctgcgttttgagcactgttctcataatggagtttcctgatttggggaagcattgttcagaaaagacttgcaagcagctagattttcttccagtaaaatgtgatgcatgtaaacaagatttctgtaaagatcattttccatacgctgcacataagtgtccgtttgcattccagaaggatgttcacgtcccagtatgcccactctgtaatacccccatcccagtaaaaaagggccagataccagacgtggtggttggtgatcacattgacagagactgtgactctcaccctgggaagaagaaagagaagatttttacataccgttgctcaaaagagggctgcaagaagaaagagatgctgcagatggtatgtgcccaatgtcacggcaacttctgtatccagcacagacaccctttggaccacagctgcagacacgggagtcgccccaccatcaaagctgggtgagaagagactccgctgcgatggctcggagcacgcagtagcatgcgtggaagcagcttacactctagtgggaagtggagccccattgagcaccatcccacactggctgctgatcttgtttgttgagggagatgggactataataaaattgaatgctgaagttg

SEQ ID NO: 351274 - DNA, 1803 bp, Homo Sapiens
  misc_feature (1015)..(1322): n is a, c, g, or t
  misc_feature (1740)..(1748): n is a, c, g, or t
gggggaagcagcctgggccgctgcgcagaggcgcggcggctgtacaactcggccgttgtcaccatgccggtcgtccggaagattttccgtcgccgccggggcgactcggagtcagaggaagatgagcaggactcagaggaggttcgattaaaactggaagagaccagagaggtacagaacttgaggaagaggcccaacggggtgagtgctgtggccttgctggtgggagagaaggtacaagaggagaccactctagtggatgatccctttcagatgaagacaggtggtatggtggatatgaagaaactgaaggaaaggggcaaagataagatcagtgaggaggaggacctgcacctggggacatcgttttctgcagaaaccaaccgaagggatgaggatgcagacatgatgaagtacattgagacagagctaaagaagaggaaagggatcgtggaacatgaggaacagaaagttaagccaaagaatgcagaggactgtctttatgaacttccagaaaacatccgtgtttcctcagcaaagaagaccgaggagatgctttccaaccagatgctgagtggcattcctgaggtggacctgggcatcgatgctaaaataaaaaatatcatttccacggaggatgccaaggcccgtctgctggcagagcagcagaacaagaagaaagacagcgagacctccttcgtgcctaccaacatggctgtgaattatgtgcagcacaacagattttatcatgaggagctcaacgcgcccatacggagaaacaaagaagagcccaaggcccggcccttgagagtaggtgacacggagaagccagagcctgagcggtcccctcctaaccgcaagcgtcctgctaacgagaaggcaactgatgactatcattatgagaagttcaagaaaatgaataggcggtactgagttgtgcagagtgggatgtaaatatcgccttcctctccctatatccctcccatgaaaaatggcttcctggccgggcgtggtnnnnnnnnnnnnnnnnnnnnnnnnnnnnnnnnnnnnnnnnnnnnnnnnnnnnnnnnnnnnnnnnnnnnnnnnnnnnnnnnnnnnnnnnnnnnnnnnnnnnnnnnnnnnnnnnnnnnnnnnnnnnnnnnnnnnnnnnnnnnnnnnnnnnnnnnnnnnnnnnnnnnnnnnnnnnnnnnnnnnnnnnnnnnnnnnnnnnnnnnnnnnnnnnnnnnnnnnnnnnnnnnnnnnnnnnnnnnnnnnnnnnnnnnnnnnnnnnnnnnnnnnnnnnnnnnnnnnnnnnnnnnnnnnnnnnnnnnnnnnnnnnnnnntggcttccaggacagagcatgctcatttgctggcggacagttccagaaacagaccctgttagtccttctacttacctgctggatttttcaagcactaaatttataactttttgaaacaaaataatgtgtaattttccatttgggggcaaactctattcttgtgagcattattaaatcttgtttgtaaatatattgtctttctcttaatatttgctctgggtcaggaagaagctgttcacggtgtgataatactctttagattgtgctttcattattatagatgcatcatgtcttctgctttcacgtgtctgggatggggtcagaaatgcatcctccagctgacagaaaaatccaggatgagatcagaaggatactggtgttttctgacttttacaaaattacttgtttgttttcattnnnnnnnnngcataaactatgtttcttattactattagaattattaaatttcaaaatgaatcca

SEQ ID NO: 351275 - DNA, 2736 bp, Homo Sapiens
  misc_feature (2287)..(2348): n is a, c, g, or t
gggaaacggaagtggcgtacggcatgcgccggtggcgtgatggagcggcagcagcagcagcaacagcaactgcgaaacctgcgtgacttcctgttggtctacaatcggatgacagaactctgcttccagcgctgtgtgcccagcttgcaccaccgagctctggacgctgaggaggaggcctgtctgcacagctgtgctgggaagctgatccattccaaccaccgcctcatggccgcttacgtgcagctcatgcctgccctggtacagcgccgcatcgcagactacgaggctgcctcggctgtgccaggcgttgctgctgaacagcctggggtctctccatcaggcagctagccatacccaaccccaggaaggaaggccttggatggaccctcagattgaaggacccggtggaccttggggttggtgaatcctaaacagagagaattcgaggttgcctgaaagctgggtgtccttgctccttttcctggagccaatatacccagtttttactcagtttgatttatattctgggcaaggaagctttgcctactttattggcacaatccggtgttctgtcgtttagtgcatatctgctggcttcagccctggcagctgagaaattgttttctatatgtagaaggaaaacctgagcatttgcaggcatctggttaaagcagggtctgtgtgtacaattttaaaacgggtaatatgtcatgctcctagctcatctccacaacaaaactatgaataagcgctattaacctcacttaacagatgaggaagcaagattccagaaagtaccagaaggtcattttatacaacaggagattggttcctgcccagatgacagaaaatgggagctctgtctagttgtccttaagtctgactgacttcagtggctcataaccgtgagccaagtatttgttggttcataactgttgttttgtgaactatgtcttacatgtctagagttctgctggatctagggaaaggaggagctatcgaagtacaacggatcaaaaaaccacagggcttttgggcactgcctccttgggaagttagtggccacagaagagagatgaaacctgtaagaagtctggagtcttttggaacttcagccatttccccaggttgttactttcttagtatgtacagtcttctcaggatgagcagtaaaacctttgaacaaaggtctgtgtggttgtcttcacgggcaatcaggaagggagagagctggggaccatattctgcaatgcagccaaatccgaggaagagaaactgaagggagaagtagatggcaatggttatgataaaaagggataaaactaaatcttcgggacttctttaatgctacgttaatgtttcactgctcgtctagaaactcctaaatccagctttctatcatctgccccacattggtcccattgagtacattctgtgatttctaattccagcctctccattcttttctcattattgcctcccccgccccccaactttgtgtaatatacttctgtattcagcagcctggatagcatatcattccatcaccccattttcttgccaccattggccatctttttgtatcattccacttattctgtcttttccattccttcattcaaactgctagagaaaaacagttgtgtaatgaatgccactaaatattcaaggcctccaacctcagccaagtcctcacaccaacacgcagtcacaccaacacacacctttatgggttcctggtccatttccttctctaattaccatggcagttattttacacctctactgctgtccttaatcccataccccaccctcatcaggtgaccctgtttccttttttagagaaattgaagctcttagacattggtttccacagtaaataattttaaaacttcttacaactacctacaaagcagatgttctatcctatctacagagcagaaaactccgaaattctcaagtagcagacccggtattaaagtgcagatctgactttaaagtccatgttcatctttacacagcaggctgcctctctcagatcactcatctatcgcccccgctctctctgctgtcgcgtccttcgcatccggctccgccatgtctctcgcctccctcgtgccctcctttcccacgactccctcgctcccgcagcgtctccaaccctcccccctccccgcctgccagcgcacgcccggccctccccaccaactgctgcccacgactcgcgccaccactcgcgtcgccaacacttctccgccgcccaaaccactaaccagtcgcgacnnnnnnnnnnnnnnnnnnnnnnnnnnnnnnnnnnnnnnnnnnnnnnnnnnnnnnnnnnnnnngaggaaacacacacaagaggcggagaaccgcaccaagagaaacaacacaacaaagagccaccagcctgggcacaacaccatcaccggaaaaaaccaccagaggacaacaaaacaccacgaattcaacccccacggccaatcaacggccacccacctggagcaagaaaacgccaggtagcacaaacacaaggagcaacaactacctacccaacccaccaccagaccccacgcgaccataaaagcataagaaagaaaaaacgaaaacatcatacacaggtaagaaacaaccaccgaggagagccacagcaagaaaacaatgtgaacgcaggcgtggcacttcatgacgaaacaccacaagtgaccaccagcaaaagtcacacgcacccac

SEQ ID NO: 351276 - DNA, 1068 bp, Homo Sapiens
gagcgaggcctgggtggcgaattcggcacgaggatggagcggcagcagcagcagcaacagcaactgcgaaacctgcgtgacttcctgttggtctacaatcggatgacagaactctgcttccagcgctgtgtgcccagcttgcaccaccgagctctggacgctgaggaggaggcctgtctgcacagctgtgctgggaagctgatccattccaaccaccgcctcatggccgcttacgtgcagctcatgcctgccctggtacagcgccgcatcgcagactacgaggctgcctcggctgtgccaggcgttgctgctgaacagcctggggtctctccatcaggcagctagccatacccaaccccaggaaggaaggccttggatggaccctcagattgaaggacccggtggaccttggggttggtgaatcctaaacagagagaattcgaggttgcctgaaagctgggtgtccttgctccttttcctggagccaatatacccagtttttactcagtttgatttatattctgggcaaggaagctttgcctactttattggcacaatccgttgttctgtcgtttagtgcatatctgctggcttcagccctggcagctgagaaattgttttctatatgtagaaggaaaacctgagcatttgcaggcatctggttaaagcagggtctgtgtgtacaattttaaaacgggtaatatgtcatgctcttagttcatcttcacaacaaaactatgagtaagcggtattagcctcacttaacagatgaggaagcaagattccagaaagtaccagaaggtcattttatacaacaaggagattggttccctgcccagatgacagaaaatgggagctcctggcctagttgtcccttaagtctgactggacttcagtgggctcataaaccgggagcccaagatatttgttggggtcataaaccgggtgggtttgggggaactatggcttaacattggcctagaagttctgctgggattcctaggggaaaagggagggaacttatccaaaggtccaaccgggttcaaaaaaccccccaggggctttttg

SEQ ID NO: 351277 - DNA, 470 bp, Homo Sapiens
  misc_feature (109)..(109): n is a, c, g, or t
ctgcaggattcggcacgaggaaacttgcgagacttcctgttggtctacaatcggatgacagaactgtgtttccagcgctgtgtgcccagcctgcaccaccggagctctnggacgctgaggaggaggcctgcctgcacagctgtgctgggaaactcatccattctaaccaccgcctcatggccgcttacgtgcacctcatgcccgccctggtccaagcgccgcatcgcgaactacgaggctgcctcggccgcgccagctgtcaaaaagaattgctgtgaacctaggggaagaaggtaaaaccaaacaacaaaagcaggaagaaaactctacccccttaggctttagccactgcttcctaggaggtcagtgacaacagaacaaagacaagcctctaagaattcaggaatgttgaccatttccccaatttactctcttagtacttcctgcctttgtgaaattagcaataaaga

SEQ ID NO: 351278 - DNA, 1745 bp, Homo Sapiens
agaagaagcagccctgaataaatgctacagagtgatggatttgatttgtgagaaatgtatgaagcaaagagacatgaatgaagtattggctatgaagatgcattacataagctgtatctttcagaaatgcattaacttcttaaaagatggagagaataaactggacaccttgatcaaaagcttgttaaaaggccgagcttctgatggctttccagtgtatcaagaaaagatcattagagaaagtatcagaaaatttccttactgtgaagctacactcctccagcagctggttcgaagcattgctcctgttgaaattggttctgatcccactgcattctccgtccttacccaagccatcactggccaggtgggttttgtggatgtggaattttgcactacctgtggagaaaagggagcaagtaaaagatgttcagtttgcaaaatggtaatatattgtgatcaaacctgccagaaaacacactggatttactcataagaaaatctgtaagaatctgaaggacatttacgaaaagcaacagttaggaggctgccaaagaaaagagacaagaggaaaaccacggcaaacttgatgtcaattctaactgtgttaaatgaagagcaaccagaggctgaagtaggtatctctcaaaaggattccaatcctgaagattccggggaaggaaagaaagaatctcttgaaagcgaagtgagttggaaggcttacaggatgctcctgcagggccacaggtgtctgaggagtaaaagccagagcaagtgccagtgtggatggtcctcaccctgcaagaagctggaaaactcctaggaatgcattgtcctcaccttgttacacctgcgtggcaccatggcaggattccacatttcatagaatacaggttttcaagcaaacccctgttgaccatgccctaatttcctattgatttctgttctatgattgaatggatattcctatggaaaattttttgtttcaaaatacaggaaaaacattcctattacctttctgaggctggctttccagcaattgtttcaaaggaaaatagatccccttaaagaaaaaatacaggctttagggaacaaagggacaagcagaacaggtgtggaagagagattttcaggaagggaaaaatttatagctacagagggtagttagaaaaatcataacttatatgtgaataaaatacatataagcagcatttacggtagtggcattctacttattaagatgcaatgaaatgaagaaaggctttatgttcaaggacctttgccatagttcagctaattgtagttttatatagaaatgatcctgaacactctgaacttgacgtagtcctgcggtgatattctatctgcagtatttgtacctccagaatggcagatccctcagcaggaacaaaggcatattgacggttctctcagcgtatgcattaaaaaaggtacttcctgaaacttttgattcaataatgactaaacatactatgtacacaattactgtaaggctaattcacgtgccatactccacctgaaagcctgagttatcttgctataagcttttcatggagcacttcctttccagaaactgatttgtaactcatttagagaatgtcctggcgtcggtttttagcatatgtggtatttaaacagagctagaatgtgatgtctgaagataatgctgcatttctgggtttcttgtgtggattttaaaataaattgtgcctacaaatataaac

SEQ ID NO: 351279 - DNA, 976 bp, Homo Sapiens
aaaaagcgccggcaattggggtcgcagctggagatgctgcggccggcagggctctggcgcttatgtcggcgaccttgggcggcgagggtcccagcggagaatcttggccgtagggaagtcacctctggtgtctctccccgcggtagcacctcgcccagaaccctgaatattttcgaccgggatttgaaaaggaaacagaagaactgggcagcccggcagcccgagccgaccaaatttgactacctgaaggaggaggttggaagtcggatcgcagaccgtgtatatgacatacccagaaatttcccccttgctttggatcttggttgtggaagaggttacattgcacaatatttgaataagcttcagttattccattgcaggaaactattggaaagtttttccaagctgacattgcagaaaatgctttgaaaaattcctcagaaacagaaatacctactgtcagcgttttagctgatgaagaattccttcccttcaaagaaaatacatttgacctggtggttagcagtttaagtttgcattgggtgaatgaccttcctagagcacttgagcagattcattatattttaaaaccagatggagtgtttatcggtgcaatgtttggaggcgacacactctatgaaacttcggggttccttacagttagcggaaaacggaaagggaaaggaaggatttttctcccacacattttctcccttttcactggctgttaaagggaccgggggaacatcctggctttggggaagaagcttgggccttttaaattacctcctgggactgggggggaccaccctggagttggaaaatttcctcacgggtttaaacccttatttcccctggggaaaatggggcttttgagaaattttggcactgggggaaaaaaattttctaccccaggggaaaaaccctacaggttcccccacagaaaatggggctggaggccccctcaatttgtttt

SEQ ID NO: 351280 - DNA, 456 bp, Homo Sapiens
tcttcagggctcaaaaggagcccaccccttgcagtttctcagggaggctaatgctgggaacttgaaccattgtttgagtttgtacggagggccctgaagccagtagacagtggagaggctcggtggacgtacccggtgctgttggtggacgacctcagtgtgctcctgagcctgggcatgggggcggtggctgtgctagacttcattcactactgcagagccaccgtgtgctgggaactaaaggtactcatggaactgccttctctgcgcccacctgtgacctccaagaactcagacaggtccagacctcacttgcttgctgtgatctttttatttgcttggggttttggctttactctggcaggcccagaaagcttttgcagccaccctgttttcccttacctgccattgctgaaaagtaaagccccccaaaataaagggatgatcaacattgcc

SEQ ID NO: 351281 - DNA, 958 bp, Homo Sapiens
gcccaggacgcagagcagtccttgcctaaaggacacgctgtggtcccggtgtctatgactggaaagtgaagctcggatccccggtggcgcgggcctcaatggtctcctgcacagatgtcctcagcgtgcccgtgcacatccctgcagaagccatgcgcaggccctcagccccagtatcagatggctctgatgactgagccattcagcaggatgtcattctcctcatcctccgcatcttccactgtcgtgcacaaggaccaccatgtttccctttagttcccagcacacggtagctctgcagtagtggaatgaagttctatgcacatgccaccgtcccccaggcccaggctcaggagcacactgaggtcgtccaccaacagcaccgggtacgtccaccgagcctctccactgtctactggcttcagggcctcccgtacaaactcaaacaatggtttcaagttcccagcattagcctccctgagaaactgcagggggtgtggctccttttgagcctggaagacgacgtccactgcagacttgagtccctcaaggaacacaagctgcccacgctcccgcgccatggtcaggctgacacccagcttctgtcccacgatactgtagtggctgaaggactggatgagtgccacaaagcagactttacaattagctttgagatagaaggagagaaagtggtgtacaaggaaactcccatctgtcttggcatcacagagtagagtcagtttcccctgctccgccctgtcgggggtggtgttaagcaggttattaagttccacgaacattccgagctcctgggactagcgctctggaggagaacccggagtgctgcagagacgacggaggatggagagcaaaacacacccgacagcccggctcgcgcatcccgggaattccggaccggttccatcctgcttctaggcaccaaagatgtgatggtggg

SEQ ID NO: 351282 - DNA, 1253 bp, Homo Sapiens
atcgacccggggattggactggaggcttgggcccgccgaaagtgggcttctgggccatctcgcatattctcaacggctgggaaactgactctactctgtgatgccaagacagatgggagtttccttgtacaccactttctctccttctatctcaaagctaattgtaaagtctgctttgtggcactcatccagtccttcagccactacagtatcgtgggacagaagctgggtgtcagcctgaccatggcgcgggagcgtgggcagcttgtgttccttgagggactcaagtctgcagtggacgtcgtcttccaggctcaaaaggagccacaccccctgcagtttctcagggaggctaatgctgggaacttgaaaccattgtttgagtttgtacgggaggccctgaagccagtagacagtggagaggctcggtggacgtacccggtgctgttggtggacgacctcagtgtgctcctgagcctgggcatgggggcggtggctgtgctagacttcattcactactgcagagccaccgtgtgctgggaactaaagggaaacatggtggtccttgtgcacgacagtggagatgcggaggatgaggagaatgacatcctgctgaatggcctcagtcatcagagccatctgatactgcgggctgagggcctggccactggcttctgcagggatgtgcacgggcagctgaggatcctgtggaggagaccatcgcagcccgcagtccaccgggatcagagcttcacttaccagtataagatacaggacaaaagcgtgtccttttttgccaaaggaatgtctcctgctgttctgtgacctgatttcggagcagctgaagctacataggactgtttttggacgtggaagatagagcaacatagcaagaatgggtctttctcctctgtagtaatatttcaggctggaccggcgactccactgtgaccagagggttgagtgctgcagtgatggcatgccttggctgccctgggccctgttcagaaaacacaagggaccacaatcctgcctttgctgagagagaggctggatgctagacccaagtgaaaggggtcctttggagcctttgtttaaatatgccttagccccagctgcccatttttggttgacaagcctttcagagccagagtgggtatagatgtgccagccaggagatggcaccggatggcaggtgtgcaaggtgacaactaggataatcatggctggaataaagtaagtttccacactgg

SEQ ID NO: 351283 - DNA, 895 bp, Homo Sapiens
  misc_feature (753)..(753): n is a, c, g, or t
aacagacacgcgaggtcaggaagaagccgcttataaattaccgcttccttcgcgccgccgccaacgccgagccccgaggaccgcaagcccagaggacaagctgcgccaagagggagtgcggagcgttcacccagcgggtcagagagcgagcgggcaggcagcccccggccggcggaacccggcacagccgagcagagcgcgggcggcgccgcagccaccccagatccagaaccagaaccacagcccttctgaggagctcccaaacaaagcaaggagatggccaccaaggagaagctgcagtgtctgaaagatttccacaaggacatcctgaagccctcaccagggaagagcccaggcacgcggcctgaggacgaggctgagggaaaacctccgcagagggagaagtggtctagcaagatcgactttgtgctctctgtggctggcggcttcgtgggcttgggcaacgtctggcgcttcccgtacctctgctacaagaatggtggaggtgcgtttctcataccgtattttattttcctgtttgggagcggcctgcctgtgtttttcttggagatcatcataggccagtacacctctgaagggggcatcacctgctgggaaaagatctgccccttgttctctggtatcggctatgcctccgttgtaattgtgtccctcctgaatgtctactacatcgtcatcctggcctgggccacatactacctgttccagtccttccagaaagagctgccctgngcacactgccaacacagctgggacacacctcactgcatggaggacaccatgcgcaagaaccagagtgtctgggatcaccatcagctccacccaactttcaccttcccctggtcattcgagtttcttggggaagtaaagggct

SEQ ID NO: 351284 - DNA, 824 bp, Homo Sapiens
cgcgcgcggacctgcagccatggcagtcaccgcccaggcagcccgcaggaaggagcgcgtcctctgcctgtttgacgtggacgggaccctcacgccggctcgccagaaaattgaccctgaggtggccgccttcctgcagaagctacgaagtagagtgcagatcggtgtggtgggcggctctgactactgtaagatcgctgagcagctgggtgacggggatgaagtcattgagaagtttgattatgtgtttgccgagaacgggacggtgcagtataagcacggacgactgctctccaagcagaccatccagaaccacctgggggaggagctgctgcaggacttgatcaacttctgcctcagctacatggccctgctcaggctgcccaagaagcggtgaggtcccaccagcctggtctccagaacctggggcctgagggaggagaagtgtgggtccctcagagggaacctggagatacttgggcccctgattttttgcggggagtgtggattcttgtcccctttgaagtcctaggaggctggggtcccaggtggggctagatttgaattcagggccgttctggttctctctggctcccccgccctccctcaccaccagtggaaccttcatcgagttccgaaatggcatgctgaacatctcgcccatcggccggagctgcaccctggaggagaggatcgagttctccgaactggacaagaaagagaagatccgggagaagttcgtggaagccctgaaaaacagagtttgctggcaaagggctgagggttctctcgaggaggcattgatcagtttgacgtcttcccga

SEQ ID NO: 351285 - DNA, 1948 bp, Homo Sapiens
  misc_feature (49)..(85): n is a, c, g, or t
  misc_feature (1369)..(1371): n is a, c, g, or t
  misc_feature (1373)..(1443): n is a, c, g, or t
  misc_feature (1446)..(1449): n is a, c, g, or t
atgatagactcactatgggcgaatggagctctaccgcggtggcggccgnnnnnnnnnnnnnnnnnnnnnnnnnnnnnnnnnnnnnatcaggccaaatcggccgagctcgaattcgtcgagagcggttcttcgggactccgccccgcgcgcggacctgcagccatggcagtcaccgcccaggcagcccgcaggaaggagcgcgtcctctgcctgtttgacgtggacgggaccctcacgccggctcgccagaaaattgaccctgaggtggccgccttcctgcagaagctacgaagtagagtgcagatcggtgtggtgggcggctctgactactgtaagatcgctgagcagctgggtgacggggatgaagtcattgagaagtttgattatgtgtttgccgagaacgggacggtgcagtataagcacggacgactgctctccaagcagaccatccagaaccacctgggggaggagctgctgcaggacttgatcaacttctgcctcagctacatggccctgctcaggctgcccaagaagcgtggaaccttcatcgagttccggaatggcatgctgaacatctcgcccatcggccggagctgcaccctggaggagaggatcgagttctccgaactggacaagaaagagaagatccgggagaagttcgtggaagccctgaaaacagagtttgctggcaaagggctgaggttctctcgaggaggcatgatcagctttgacgtcttccccgagggctgggacaagcgctactgcctggatagcctggaccaggacagcttcgacaccatccacttctttgggaacgagactagccctggtgggaacgactttgagatctttgccgacccccggactgttggccacagcgtggtgtctcctcaggacacggtgcagcgatgccgggagattttcttcccagagacagctcatgaggcgtgaccggggcccacatctgtgtgtcgtgacttctgaagagtttggcctaggcctaaagagaggtcctggtgttggatagatgccagggcccctcctctggcccaggacgcctgctgcaagcccacccagatggggccagagtctgtgtggacaaccgtccccagccagtctgctcctagtggcactggcttcgtcctcccagggcccagagtgttccccatgctccacctggtggcccaggccacagctgctgcttgtatttcggtacagaagaggtttctttctgcaccaggaggaggcgtgctcaagtatcggtacgagatctagcctgccctgcctgcctgccctgggcgatgaggtacggtggggaaggtgcctattttagagaactttgtcacagtattaaagttcccagaacaannnannnnnnnnnnnnnnnnnnnnnnnnnnnnnnnnnnnnnnnnnnnnnnnnnnnnnnnnnnnnnnnnnnnnnnnttnnnnccttgccggccgccctcggcaccctcaaaaagcttctctaaaccatttctttgggcccggcgggccccagtaggataggggaaactgtggccttacccgtgttccctagagaaacccgtggaaaggaactgagggctgtggatctcccaccattaaaaaaccgccccgggaggaaccgcaagcggttcttgaaacaatccccaaagtgagagttcctgagggcgctttactgtgaatcctttccaacgagaaagccccacgcgaagcctcgatatatcaaatttaccccccccggcctctgccaatttcattggaaggaacgtgtgggggaatttcctttaggggccttcccctggcccaaatttgggaacggcccctccccaagacgggccttggtagaaacccccgaattcgcccaacggggaattccggcccccttgggcgcccctttgcgttttataatttgttggccccttggggtggaaaacccggggggggc

SEQ ID NO: 351286 - DNA, 1234 bp, Homo Sapiens
  misc_feature (895)..(895): n is a, c, g, or t
  misc_feature (911)..(911): n is a, c, g, or t
  misc_feature (927)..(927): n is a, c, g, or t
  misc_feature (973)..(973): n is a, c, g, or t
  misc_feature (1094)..(1094): n is a, c, g, or t
  misc_feature (1152)..(1153): n is a, c, g, or t
ggacagaaaaaaatgcatgagctccagtccaaagtggaagatcttcagcgccagctggaagagaaaagacaacaagtttataagttagaccttgaaggacagcgactacaaggaatcatgcaggaattccagaagcaagaactagaacgagaagaaaaacgagaaagtagaagaattctgtatcagaaccttaatgagccaaccacgtggagcttaaccagtgatagaactagaaattgggttcttcaacagaaaatagaaggagaaacaaaagaatcaaactacgctaaattgattgaaatgaatggaggaggaaccggctgtaatcatgaattagaaatgatcagacaaaagcttcaatgtgtagcttcaaaactacaggttctaccccagaaagcctctgagagactacagtttgaaacagcagatgatgaagatttcatttgggttcaggaaaatattgatgaaattattttacaactacagaaattaactggccagcaaggtgaagagcccagcttggtgtccccaagtacttcttgtggctcattgactgaaagactactgagacaaaatgctgagctgacagggcatatcagtcaactgactgaagagaagaatgacttaaggaacatggttatgaagctggaagagcagatcaggtggtatcgacagacaggagctggtagagataattcttccaggttttcattgaatggtggtgccaacattgaagccatcattgcctctgaaaaagaagtatggaacagagaaaaattgactctccagaaatctttgaaaagggcagaggctgaagtatacaaactgaaagctgaactaagaaatgactctttacttcaaactctgagccctgattctgaacatgtcactttanagagaatttatggtanatacttgagggcaganagttttcgaaaggctctcatttaccagaagaaatacctgctgctgntactggggtgggtccaggaaatgtgagatgccaccttggccctgcttgccgggatgggggggcagccagctttcacggatctagaaggtgatcaccaatcgcccaagggcttcaccaaggnttccggtcgggcgtcagagtattccattgccatttccagatggaaatttttgggttcnnacgggggatccaagtccacgggttctggtttccttccatatttaccaaaaatggggttttggactgaaactaagggggccg

SEQ ID NO: 351287 - DNA, 1216 bp, Homo Sapiens
  misc_feature (1114)..(1114): n is a, c, g, or t
ctgtgcctaggggggcacgagctatgcccagactactttgggtatcgtatggagtggaggtctcactatattgccaatgccagtcttgaactcctggcctcaagctatcctcgctatctcagcctcccaaagtgctgggatgataggcatgagccactgtgcccggcctggatctgtatttcttagcacgcagtgaggaatctttgtacttaaggccaggcaacaaagtcaagaggtcaaggtgtagggccatgaggcctggacctatgctgcaggcaagggtttccatccccgctgccctaggcactctcttcccaaggccaggttgggcacctggggaggtcagttcagaaatatctagcagagacctcttaaacccccatcccagcaccccatcctgttgttcccagagctggtctcccatgagtgtgctagagccagatagccgtggccccccacccatctcactcacacacacaggcatccatacaccccagaagacttcccaaatgaggccagactcagggtcacggggaatgtgcttctgcccctgtaagggctttggggaagggggcaacatagtagaggctggaaagagcccccaaacctgtgcccatgcccctccagccctgcgtttccattctgccttctcagagtgcccttgctgcacccagaccaccggccaggagagaccttctctcccactccagcccctctcactgcccttcaactagagctttcacctttttacatttcccttctgaaggacacaaatctgcttttctgcccatacactggcccaagggctcacctaacttgggagggaaggggctgttggtacaaggatgattttctgttagactgccattttgcacggtctcccccttcccatctgatgtgtcctgcccctcagctctttgccttatctgtgtcactgtcactttagcaaaaatacagcggccatttgtatcagcctctggtggttgcttgtgaggtgggactcttgcgggaacaggtggactttgggaggagtgggcagggagggagtggtagtggcagttcttcgagctatctgattaaagccattccgttagttcagttgtgcccgggaggnagggagacagggtcagtatctctggggctgcaggcttctttgccttggccctcctgggcatggggtaaccaccagctcagctcttcctccttccagcttttc

SEQ ID NO: 351288 - DNA, 777 bp, Homo Sapiens
  misc_feature (349)..(349): n is a, c, g, or t
  misc_feature (517)..(547): n is a, c, g, or t
cacgcagtgaggaatctttgtacttaaggccagggcaacaaagtcaagaggtcaaggtgtagggccatgaggcctggacctatgctgcaggcaagggtttccatccccgctgccctaggcactctcttcccaaggccaggttgggcacctggggaggtcagttcagaaatatctagcagagacctcttaaacccccatcccagcaccccatcctgatgctcccagagctggtctcccatgagtgtgctagagccagatagccgtggccccccacccatctcactcacacacacaggcatccatacaccccagaagacttcccaaatgaggccagactcagggtcacggngaaatgtgcttctgccccctgtaggggctttggggaaaggggcaacatagtagaggctgggaaagagcccccaaaacctgtggcccatgccccctccagcccctgcggttcccatttctgccctttctccagaatgccctttggctgcaccccaggacccaccgggcnnnnnnnnnnnnnnnnnnnnnnnnnnnnnnncaggccccttctttcaatggccctttcaactaagaggtttttcaccctctttttacaattttccccctccctggaaggaacaccaaaaccttggcttttttctggcgcaaaaacacctgggcccacaaggggcttcaccctaaaatttgggagaaagggaaaaaggggcccttttttcgctcacacaggggagggaccttttctgggtgaaaaaaacggccccccttttt

SEQ ID NO: 351289 - DNA, 548 bp, Homo Sapiens
  misc_feature (24)..(24): n is a, c, g, or t
  misc_feature (107)..(107): n is a, c, g, or t
actgactctgtcccccttctcccnggcaacaactgaactaacggaatggccttaatcagatagctccaaaaaactgccaactaccaactcccctccctgccccatcntccccaaatccaacctgttccccgctaaaatccccacctccacaagcaacccacccagaggctgaataacaaatggcccgctgtaatttttgcctaaagtgaacagtgaacacagataaggccaaagagctgaggggcaggacacatcagatgggaagggggagaccgtgcaaaatggcagtctaacagaaaatcatccttgtaccaacagccccttccctcccaagttaggtgaacccttgggccagtgtatgggcagaaaagcagatttgtgtccttcagaagggaaatgtaaaaaggtgaaagctctagttgaagggcagtgagaggggctggagtgggagagaaggtctctcctggccggtggtctgggtgcagcaagggcactctgagaaggcagaatggaaaacgcagggctggaggggcatgggtacaggtttg

SEQ ID NO: 351290 - DNA, 676 bp, Homo Sapiens
  misc_feature (111)..(111): n is a, c, g, or t
gactcacggtctgaaatataacaaagaaggtatgcacaggtcaaaaagagcaatccaagggttagaagtccccagtgccccacactggctcattgccgaaggtgacagggntgcaggctgtgtgagccaggcacacttacccctcaactgggcttctgtagctttacaatttggataactagttagcggacagtagttgggacatgtcacatacagatttgagtcctccaataatgtacactttgccaggttttatccctttgttaaagcaaatagaacagagagggaatatagctgccagtaaaaatcatttcccccctcttaatctcccatccttcatctccatgaaaccgactattaagataacctttctctctctgtgcactagtggaaaaagtaaagttctatagaaactcacagttaagagggactttgaatacagcaagttaaggcttttagtgcaaatagaatgaattcccactaaggtcaaaaggtttcaattgggtaccatgctgacttcttggtatcttttaaggcctaattttcccttccttgagattactgtagtgtgttccagctaatttctatttggaaacgagttggaacagctgaaaactaggtattattgaaggcaaagcagcctcacgtcagttttttatcagctcatttgggaagg

SEQ ID NO: 351291 - DNA, 1778 bp, Homo Sapiens
  misc_feature (184)..(196): n is a, c, g, or t
  misc_feature (248)..(248): n is a, c, g, or t
  misc_feature (251)..(251): n is a, c, g, or t
  misc_feature (284)..(300): n is a, c, g, or t
  misc_feature (308)..(308): n is a, c, g, or t
  misc_feature (310)..(310): n is a, c, g, or t
  misc_feature (1068)..(1078): n is a, c, g, or t
attttggctaccaggagtttagtttattttatttaaaatttttttgccaatggtgccaagtaatgtgaatgctaatactgcttaagaaaattaagttacttttgcaaaacagataatcataagatgaatcagtatgtagcttaacaccatccactcactccaacaaagaacacttagaatgatnnnnnnnnnnnnncctgacaaaagaaatagtatgaaaagtagaaaaatgtcacgtttccatatcnccngctggaaatcagaaaatataataaaattgcacnnnnnnnnnnnnnnnnngatgcggncnggtcttttagagacggcatggtatattactatttccacataatgaggagccaaagaaatctgatgtttttaacaattaaactgctaatgttaaattgagagaataaagttcgtatttgctgatgccagtttaaaattcccaggttacgtctgaggatcagttggtgtaaagctgagatgttttttcttggttctggctgccaactgtgagttaaaactcaaggcttgttgtgaagcctaaaaatattcacaaataagcttttaaactggtgtctttggaaggaaggtagatacaaaaagattgtggtaaaaactggggtcagtgctcttggtgccttttctataattgtacttgttttttaattacttcctttcactgccaacctcgaattactgtacagtatatgtctttctgcttgtgatcagctttgacaacagtgacagccccacaactagtagccacctgtacatttgtaaactgacctgactccattttgtttttaaatgtgtgggttatgttgcagctgttgcagtcccccagatacctattattttacacaatttgacctataggaggacactgagtaatttacaaacacaactgcattcataaatgggaatagaacgtgaaagccagctctttcagaatatcctctattaatactgaatttagatatctttattccatttattatggtacaaataactgatgttttaaccagagtaatgacctcagtggatttgctttaaccctcacannnnnnnnnnnaatgtttcacatgttacattattagctgaatacgttagaaaatgacagatggtagagacttccatagaattaagagggttctcatggaggggataggaagtaggtttaaagcctaccagtgtaacctaccagtacaactgtgaatcctaggcgaggcaaaaatgcacttccactgaaacgaagcatttctgaccgctttttcttggttatgaatcttaatttcgaatataagatgataggtaagcgcagcttcttggataatctgaattcccaagtgccaggagtaggatttcattataaaattaatagctaatcttatcctatcccctgaagatttaattgctattgttaccccattcgaaatcagctgtactgtgtgaacgaaataaagacaataatacgaacccctctctggctgcacggtcgcttatggcagttccacacagtagttggcgcccaatggggggtccctgagacttgcatgtaaaactagtctagatgtcttctttttttgtaagttttatttttgtaattgtgcatgtaaagcatcattgaatcaatggatctgttgaagaactcagctgctggaaaccatgcaaaatgttttgaattgcccttaaaatatggaaaatgttttctgaatgctttatattctttctgctgtaaattaaaaatgaagaaaatttccccataaaaaaaa

SEQ ID NO: 351292 - DNA, 1311 bp, Homo Sapiens
ctgaagtgggagcggccctatgtgcgtcccttataccaggacttgccttcaacgctgaaggtgaaccctgggtcatcctcgctgtattcaggcggcgctgcaaaggcttctgggcagccaataggcccttgagcgcctcagccccatcttgcttcagtaggcaaacggacgggtgtcttcatccacctcctaggccgtggtctacccttcgttcaaatgtttcttcctgctagctgactgtccaggtccttagctgtatcacattgttcaaatgtgtgtgcgcaggtgtttctttttcaactaatcatgcaggaagtggcgggatgccttactgccattatttgctgagtatttccagatggaactgtagttgatagccaataaatttggtacgtttttatcgggatgcgcatgccatagatcgtccctgagataatgctttgcaatgtggaacctgaaacacctatgtataagcccaagcctttcattaatattaactgtgagacccctggaagctactactttgtgtgagcctgttttctccgccctcaaacagtggatataatacccccttgcaaggctgtgagattaaatggataactgtgcataatgctaagcatggtgtctgggacgtaagaggttccttatatcccattagttcactaggtgggatcaccaagttgaaattcattttttaatattttgcttggtggagtactcacaactcaacttctctggctaatttgatgtttaatttgaaaggtaatgacactattttgtaacatttttagatgcttaagggaaatttgaaatgcaaagtggaacaacattaaaaggaaactcatttgtaaaataaagaaaaacaaaatctatgcaagccaaagaagtcatgaatgctgaggaagcaaaaattgtgattttcccctctccaatcccactgttcatttatctttatttgcatcagttagactggttgtttacaaagctaataccgccataccactagtcaaaagagagttccatacctttgctgacctagtggtagaccattcttctcaggcaaggttggctttttcaaaggaaagtttactataaactgagagagaagtagtaacattatagaatttgatgattcatctataagaaatctgaagactgtacagatgaacctagctggcatagatgactgccatcggtttctcccctaattttaaccctatctcttgatttctcttgttcggcaagtgtcccccacggtacttgttaagactgattagctctccccaggagtagacttttatctgttgtacc

SEQ ID NO: 351293 - DNA, 2268 bp, Homo Sapiens
  misc_feature (54)..(174): n is a, c, g, or t
  misc_feature (242)..(314): n is a, c, g, or t
  misc_feature (316)..(333): n is a, c, g, or t
  misc_feature (402)..(414): n is a, c, g, or t
gggattggggataaagaccaccttctagccctggggcagggtgctttctgccgnnnnnnnnnnnnnnnnnnnnnnnnnnnnnnnnnnnnnnnnnnnnnnnnnnnnnnnnnnnnnnnnnnnnnnnnnnnnnnnnnnnnnnnnnnnnnnnnnnnnnnnnnnnnnnnnnnnnnnnnntgtgatggtacacacctatagtcccagctacttcgggggctgaggtgggaggatcgcttgagccccannnnnnnnnnnnnnnnnnnnnnnnnnnnnnnnnnnnnnnnnnnnnnnnnnnnnnnnnnnnnnnnnnnnnnnnncnnnnnnnnnnnnnnnnnnctcttttcctagttctgacctgaggtttttaggtgcacaggcaggaaggtagctaagccagggattcannnnnnnnnnnnnctcccccagggatctgaagtccagagaacaggagcctggaaccaatatttccaggtgccccaatgtgcttgtgtgctggagaaaaggggcatgcctccaggggggtgttagtaaggccagagatagccagctagaccctactctctgccccttgtcctccccctcccatctccatatctcttatcttccctgaggctttggtcttcctcacagcacaagggcccacttatttgggagatggggcgaagataagctcctggagagcgggagacagtgaaggctggggtcacctgagcctctgtccagctgaactgagggtgcgatggagtcattacctgccctcacccccaaagtgcatctgtgtcccctggggctgagctggagcaacaccacctttgttatgcttaggagggagggccggccccccaagtcctagaaagcaaaagggccactagctcccagcctcggttttttggggatccaggcgcccttttttggtataaaattaggtactattaaaataaaagctaagtgttttacccttcccggtggaatgcggggagacccgcagaaactcaagtaggagttggagtatagctccctgctaggaagcggctgtgcagtgagtcctccatctttctcccacattggctcagcctcttggaataagccaggcctgggagggggaaggctgcatcctgtgtgcctccagagcctcctctctgccccctgggattcacatgaaggagcagcagctggagcgcttcttctgggactctacatagtctcggatctggaagctgggctcatccgcctgatgcccggcccggtatttcagttccttggcgatggccagaaaggctaactccacattcatgccagtcttggcgctggtctccaggaagggaacaccgtactccctggccaaggtctctccgtcttcggaacggatcactctttcgctgctcatatccgccttgttgcctagcagcatgatcaccacgtccctctgggcaatactcatgaatctcagtgagccagcccctgatgttggtcgaaagaagatttgttggtgatgtcaaacagcagaagcaaggcctgagcatctctgtaataagcatgggtgacgccttcggaaccgttcctgcccagcggtgtcccaagatctgcagcttcactctcacgcccatccacagtcaccaccttgttcctgaatccgatgcccacaggtgccgagaaggagccggggatgaacttgccctgatcgaactgaaccagcagagacgtctttcccacaccactgtcacccaccaggatggtcttatgcaggacgtggtcgttgaagtcagggccagctcctccctggtaggaatcgggtctctgcaggtccatgccaggcttggagctcgccgctccggctctccctgcgctctgcgtcagcgcttccaggagctcggttcgagctccgctgggtgcggcaggcttgggtctgagctctgcgggccgggccgcatccgttttcagcactggacagttccccgcagcggccgcggcgcggtaccaggcgggcaggcggccacgttcttccaggactgagagtttcagcaccaggaacagcgactccgccgtttgtgcgcccgggaccagagttctgagatcctgtccgctccaatccctgcctcttaggactccaggatgctggcagggacgcaagatttgggtccggctggtgatccctgcgtatttcattcagctaccggactccggaggctcagcacccggctgcgttctcagggcattgcggtcccaggagctcaccgttcctgatcccgagcgaacgggcatccccccgct

SEQ ID NO: 351294 - DNA, 1162 bp, Homo Sapiens
  misc_feature (590)..(766): n is a, c, g, or t
  misc_feature (775)..(775): n is a, c, g, or t
  misc_feature (803)..(896): n is a, c, g, or t
  misc_feature (957)..(957): n is a, c, g, or t
  misc_feature (973)..(973): n is a, c, g, or t
  misc_feature (984)..(984): n is a, c, g, or t
  misc_feature (1015)..(1015): n is a, c, g, or t
  misc_feature (1025)..(1025): n is a, c, g, or t
  misc_feature (1073)..(1073): n is a, c, g, or t
  misc_feature (1075)..(1075): n is a, c, g, or t
  misc_feature (1080)..(1080): n is a, c, g, or t
ggcctgggtggcgtactcggcacgaggccgggtttgggcctggctctgtgactgaggcggcggcggtggcggccaagcgggatacgggcggcgggagctggggaacaggcatggacgtttccgggcaagagaccgactggcggagcaccgccttccggcagaagctggtcagtcaaatcgaggatgccatgaggaaagctggtgtggcacacagtaaatccagcaaggatatggagagccatgttttcctgaaggccaagacccgggacgaatacctttctctcgtggccaggctcattatccattttcgagacattcataacaagaaatctcaagcttccgtcagtgatcctatgaatgcactccagagcctgactggcggacctgctgcgggagccgctggaattggcatgcctcctcggggcccgggacagtctctgggcgggatgggtagccttggtgccatgggacagccaatgtctctctcagggcagccgcctcctgggacctcggggatggcccctcacagcatggctgtcgtgtctacggcaactccacagacccagctgcagctccagcaggtggcgctnnnnnnnnnnnnnnnnnnnnnnnnnnnnnnnnnnnnnnnnnnnnnnnnnnnnnnnnnnnnnnnnnnnnnnnnnnnnnnnnnnnnnnnnnnnnnnnnnnnnnnnnnnnnnnnnnnnnnnnnnnnnnnnnnnnnnnnnnnnnnnnnnnnnnnnnnnnnnnnnnnnnnnnnnnnnnnnnntctaattanattgcatcatcaaaatcagcaacagatnnnnnnnnnnnnnnnnnnnnnnnnnnnnnnnnnnnnnnnnnnnnnnnnnnnnnnnnnnnnnnnnnnnnnnnnnnnnnnnnnnnnnnnnnnnnnngccaggctttgcagggcccagccacaatttcagcagcccaccgatgcagcagccacagccntccgcccctcccaggntctgcccaaancaggctggcagcaaatggcatcacacacagncaccaccagnccggcaccacagccccccagcagagccttcgagttgggttagaaaccnanccatnccaaccttccccgcccaagggggcgaaaaaaccccggccccttttggggggtcccaaggggggccagatttctttccccctg

SEQ ID NO: 351295 - DNA, 920 bp, Homo Sapiens
tttccctcacagccgacgaggcaacaattaggctttggggataaaacgaggtgcggagagcgggctggggcatttctccccgagatggcgggtctgacggcggcggccccgcggcccggagtcctcctgctcctgctgtccatcctccacccctctcggcctggaggggtccctggggccattcctggtggagttcctggaggagtcttttatccaggggctggtctcggagcccttggaggaggagcgctggggcctggaggcaaacctcttaagccagttcccggagggcttgcgggtgctggccttggggcagggctcggcgccttccccgcagttacctttccgggggctctggtgcctggtggagtggctgacgctgctgcagcctataaagctgctaaggctggcgctgggcttggtggtgtcccaggagttggtggcttaggagtgtctgcaggtgcggtggttcctcagcctggagccggagtgaagcctgggaaagtgccgggtgtggggctgccaggtgtatacccaggtggcgtgctcccaggagctcggttccccggtgtgggggtgctccctggagttcccactggagcaggagttaagcccaaggctccaggtgtaggtggagcttttgctggaatcccaggagttggaccctttgggggaccgcaactggagtcccactggggtatcccatcaaggccccaagctgcctggtggctatggactgccctacaccacagggaaactgccctatggctatgggcccggaggagtggctggtgcagcggggcaaggctggttgacccaacagggacaggggtaggacccagggaagcagcaaccagcggacgctaacgcagcaacaaagacgggctagagcacgccgagcccccctgaagatggaaggg

SEQ ID NO: 351296 - DNA, 1038 bp, Homo Sapiens
  misc_feature (61)..(83): n is a, c, g, or t
cggtccggaattcctgcggataggcaagctcccagcagcgcaagctgacgacagcaggtgnnnnnnnnnnnnnnnnnnnnnnnctgcagcactctttcagtcagcatcgttcctggatttttttctcactgctgagcagcataaaagggtggggccgcttccctgcagcagaggcagaggcggcggcggcagcggctgcagcatcattcgcgggcagcggcggagaccgagagctgcagaaaagggtggggtcgcttcccaggagaagaggcggtggcggcggcggctgcggcatcctcgcgggcagcggcggaggcagcaatgctcggtctccgctggaggtgatggcctcccagccctgctaggtggccggctgcactaggacgccggcaggaaggagactcgagcccggtccgcggaccctgcggccacaccgcccggcccctcctctgcgccatggcttaagcctgtagccacctctcctcacgtcgcctcgctcgaccgaggtctgtgcgccgccgcagccgcagggaggggcgcgtcccagacaccctcgccggggactcgggaacgccgtgcgtctcacccttcggcgctcgcagcagactgcgctcccaaaggcgtttgcgaccggtaatcgagggactctacagactctcctaggacagctctccccgggtgctcgcctgagggaggagggcgaactagctccggctgatcgggggtagaaaaccgtgggaaccacattggccggtcaggatcggaggctgaaggaagattatagagacttgctttagaaccacaagaagaaagaggaggccggccttttcagctagccacctggccgtggcccgtgcattactaaggccctgctgcattcgccccctttctggaaccagttgggaaccaaagcggaaactcccttgtgcccgcctggattctcctcacaatacctctgaaaggcccacggaaccaaccggggggggcccccgaccggaaaaccaaccggccggccctaaaataaaaaggggcgccaaa

SEQ ID NO: 351297 - DNA, 449 bp, Homo Sapiens
tattcaaatttcagtgtccataaataaagttttgaaaacatgaatacaaacaaaaaacacctatttatgtttgacctgtggctgtctttgcactaccccagcagagttgagtagttgtagcagacaccacatgcccttgagcctaagatctagcactttacaaagtaagtttttctgttacttagagctgaaaataaaagcaatgtagagttacgcttttataagtatttcatgtttcagaaatgatgcatacagcaatttgtaggtgggtggttttttgcagtatatttattttgtgcattatatttatatgttaagagcctgagcttagaagtatttttttcaaagaaatgtgttttttacttgctaaattgtcataacatcaaaacaagaaatttcttgatggaatgtagcagtaaacatatgaaataaacattgtctaaattaaa

SEQ ID NO: 351298 - DNA, 423 bp, Homo Sapiens
  misc_feature (395)..(395): n is a, c, g, or t
  misc_feature (411)..(411): n is a, c, g, or t
aaaagaaccttcgccgagaaggctgctaatgaattcagactgcatagttctcaaaatctgatgttttgcaatgatgacattagcgtggcgcccgagggtccgagcccagaaagtctgcgcagtgctcggcgctttgagccggggacaatgggccagtgttcggcctcggctctccaggccatttgcataccccgttctgcctgagtgaccggcggactgcggcagggagcagcattgtccacgggtcacttcaagatgagcgagatgacaagagccagaaacaccattttgaaaagttgcaactgaggccccttggcggccaaatctgagctgcagaagcgcctgaattccggacgttaaacctccaatcaccagccagggcagctccggctggngacagcgcgggctggntccccttccacc

SEQ ID NO: 351299 - DNA, 1117 bp, Homo Sapiens
  misc_feature (2)..(2): n is a, c, g, or t
  misc_feature (69)..(69): n is a, c, g, or t
  misc_feature (73)..(73): n is a, c, g, or t
ancggccaggacctcacggacctcacgggctggcggcccggggacctgggactggcgctgtcagctgtnaggnggggcggggcgggggacgggccttactctggaggaaggagcacaggtccttgagtgttcagggcagggaggcaggaaggggtctccagcccctccctaggctggggcagctggaagcagggggcgtcccagccccgcacgtgctgctcctgccagcagggtcccccagctcccggatgctctcatacacgttttccagggggccgctgtccacatccagggccctgagcgggagggtctggtaggccaggtcacccgccaggcccagaatcgctccctggcccttggggtccagcgggtctgtggtgggtcctgggtccctccttttaggcttgcagaccctggagtacaggacgtccacctgagcggccggggtcacctcagtcttcccctgctgtggctcttggggactgcgatgggtccctttgcgcttctggacgcgggcatactcggccaccacagggctggccgccaggctgaccccgggaagggccgccagccccacgttggaataggtggcctcgaggccagcgcaccctgcggtggctgcagctgccggcagagcccggggcagctcctggtgtgggaaggcagagggggctgcctgcggtccggtgatgtccctggacacctccagccagtgtgggcgcaggagatccatgctggcaggccgcagggccctgctgctgcgcgggccccggtgcagctcgtgcagtctggtgtccgacttgctgagggagcagaggtgggtccgcctcagtagggactgggggcgaggaaggctggtcggtcccctgcggaccccacctggtccccgggacagcctggcactcaccgcttccgccgccgtcgcactgccctgcagcctcgcccgctgcctccgcgccctcttcctgggggctacagcgtcctcgggcctgcggcaggctgtgcacagcgcccacagcgagaggagcagggcgcagcaccctagaacccagagggcaggaggggcccagacactgcagccccatcctgtgaagccgaggcccaagcccacgccagg

SEQ ID NO: 351300 - DNA, 671 bp, Homo Sapiens
gggagtgcgaatcatgggaggcggctggtggtgggctcgggccgctcgccttgcccgtcttcgcttccggaggtcgctactgccgcctcagcggccccggagcgggggcgcccgggggtccttcgcccccggccacggtccccgcgccggggcttcgccgcccccagtgtccgagctggatcgtgcggacgcctggctcctccgaaaagcgcacgagacagccttcctctcctggttccgcaatggcctcctggcatcgggcatcggggtcatctccttcatgcagagtgacatgggtcgggaagcagcatatggcttcttcctgctgggcggcctgtgcgtggtgtggggcagcgcctcgtacgccgtgggcctggcggcgctgcgaggacccatgcagctgacgctggggggcgcggccgtgggcgcgggcgccgtgctggccgccagcctgctctgggcgtgcgccgtgggcctctacatggggcagctggagctggacgtggagctggtgcccgaggacgacgggacggcctccgcggaaggccctgatgaggcgggtcggccgccacccgagtgagcgacacggccgtggggcctggcaggcgctggacagcgcccgaggactgggacattaaacctgacctcccctcctccaaaaaagaaagccg

SEQ ID NO: 351301 - DNA, 1345 bp, Homo Sapiens
agtaaaggattgtctgagtggagtaaatggcgaaaggcctggcactcgcgttacgaggcgccctccgtataaacacacacccgggctctcgggaatgtggcggacggcggggggcgtatggggctcggtcggtgaggaccacgcgcgagccccggtgggctcgggtcgcggggggcgacgtgttgttcaacccggagtctggggccgggatctcacgaaagactgcggccgcccgatccaatttttggaaagtccggggaggggcctttaacgggacctttcgccagttcccggtttccatataaatccgggaggcaccgtgccttttataatccccgggaaggaatccggggaggggggctcttcttagggaaaggaagttattacaccagggggaaaaatcatgcttccttattcccagccatagaatggaggggttcttcaagccggccccttttttcctgcttcttgggcaatggctgctctgtttcagaagggttactgaagcctgtttaaaaaaatctttaagggtgcctccaacccccccaaggatgttttcatcttcctcgtaacatattttaaaaacctctttcaccaagagattctttgataacctccactggaactcctgctgcaactgcttgctctgcaattgttttttcaaagtcttctctttccaaagatttcctgctttcttttattttgtgctttgccaatgttctctgaagtgcaacattcagccgttcaaactctgggaaaatcagtttgcaaatactctctgccaaagtgtgaagatagactcggctccgactggtttttctttgaggaagactttcttgtatgttcttctcaggaatgtcttgacagatgggcacggttgctttgcagctctctgagcttcctgctgcctcctctgaagactcgttaggaacttgacctggtgccagtaaggagaaaggacactctcctgtgatcttgagatccttgagcttcgtgcagaacatggtgttggtgtctcttaccctgctgcgatctcctcctgatgagctgtagttcttatatgagactgacaaacagaagccactatcaattcaaggacactggtaactgggatgtttggtggcttcgcacacctcggggctgtgcttccggatctctagcagctccagggcgcgcctcgcaaatccgcacatggtgagatcacgcccggctggggtctctaagctcctccaggcgctccctcccccacaggtgtcctccgcctgggtctgttccaggctgctcgctgctctagcgcaggaaaagtgtaggaaaactctgcactgaaacctgcttttggaaaact

SEQ ID NO: 351302 - DNA, 722 bp, Homo Sapiens
agcggaggtgggggtgggcgccgagcagcgccgcgccggctgctgagctcgcggggccgggccgtgagaacgcgcggggcgcgccggggccgctggtctcccacggccagggcgcctgggccccagaacccatcagccgcgtgcagcgctgcggcctccggcgcgccggaaggcaagcgagcgggcgcagctgggggatgcctggaccccggaggcagcagggctggaggcggtggcgggcttcagggcaacttcacccggccggctgcggcgtggacatcccagttaccagtgtccttgaattgatagtggcttctgtttgtcagtctcatataagaactacagctcatcaggaggagatcgcagcagggtaagagacacccacaccatgttctgcacgaagctcaaggatctcaagatcacaggagagtgtcctttctccttactggcaccaggtcaagttcctaacgagtcttcagaggaggcagcaggaagctcagagagctgcaaagcaaccatgcccatctgtcaagacattcctgagaagaacatacaagaaagtcttcctcaaagaaaaaccagtcggagccgagtctatcttcacactttggcagagagtatttgcaaactgattttcccagaagttgaacggctgaatgttgcacttcagagaacattggcaaagcacaaaatacaagaaagcaggaaatcttggaagagaa

SEQ ID NO: 351303 - DNA, 574 bp, Homo Sapiens
gggaggtgacgatgcccaccagcttgctgcccatggtgcccgtctcagtgatggggatgccagagaagccatgccgcatcttggcctccagcacatcgcccacagtgtgcgaggggctcagcaccacagggtcccgtgatgaagacctggtcaaacttcgtgaccttccgcacctcgttggcctggaactctggggtgcagttgtggtgaatgaaaccaatacctcccatcagagccatggcaatggccatgtcagcctctgtcacagtgtccatgggggaggagatcagtggcgtcttcagcgtgatcttccgggtcagggctgaggtcaggtccacctcatcagctatgaagtctatgaatcctgggagaatcaggaagtcgttgtaggtgaggccgtcggcgctggcgaagagctgctgcgcggtgagcccatcctcgggcacgtagccggtgccgccgctgatcaggtagtccgccatgctgccgcgagaccccgcgacccgacataaacacccgcgcggccgcccgccgctgccgccgctgctgctcctcgtgccgaattcgccaccca

SEQ ID NO: 351304 - DNA, 2497 bp, Homo Sapiens
  misc_feature (32)..(32): n is a, c, g, or t
  misc_feature (40)..(40): n is a, c, g, or t
  misc_feature (88)..(88): n is a, c, g, or t
  misc_feature (187)..(187): n is a, c, g, or t
cgaacgggctgcgctcactgcccagccggggncccgggancctccaggctcccgcaccgccctgtagctgaggcctccgcatggaggnggccactcactccaccaccgctgcagggaggcggagcgcgcgctgttccggagcccggagcccggcaacacccgggaaacgagacggcggcgcagggtnacagcgcccgactgctgcaggccggctacgagcccgagagcatggcggactacctgatcagcggcggcaccggctacgtgcccgaggatgggctcaccgcgcagcagctcttcgccagcgccgacggcctcacctacaacgacttcctgattctcccaggattcatagacttcatagctgatgaggtggacctgacctcagccctgacccggaagatcacgctgaagacgccactgatctcctcccccatggacactgtgacagaggctgacatggccattgccatggctctgatgggaggtattggtttcattcaccacaactgcaccccagagttccaggccaacgaggtgcggaaggtcaagaagtttgaacagggcttcatcacggaccctgtggtgctgagcccctcgcacactgtgggcgatgtgctggaggccaagatgcggcatggcttctctggcatccccatcactgagacgggcaccatgggcagcaagctggtgggcatcgtcacctcccgagacatcgactttcttgctgagaaggaccacaccaccctcctcagtgaggtgatgacgccaaggattgaactggtggtggctccagcaggtgtgacgttgaaagaggcaaatgagatcctgcagcgtagcaagaaaagggaagctgcctatcgtcaatgattgcgatgagctggtggccatcatcgcccgcaccgacctgaagaagaaccgagactaccctctggcctccaaggattcccagaagcagctcctctgtggggcagctgtgggcacccgtgaggatgacaaataccgtctggacctgctcacccaggcgggcgtcgacgtcatagtcttggactcgtcccaagggaattcggtgtatcagatcgccatggtgcattacatcaaacagaagtacccccacctccaggtgattggggggaacgtggtgacagcagcccaggccaagaacctgattgatgctggtgtggacgggctgcgcgtgggcatgggctgcggctccatctgcatcacccaggaagtgatggcctgtggtcggccccagggcactgctgtgtacaaggtggctgagtatgcccggcgctttggtgtgcccatcatagccgatggcggcatccagaccgtgggacacgtggtcaaggccctggcccttggagcctccacagtgatgatgggctccctgctggccgccactacggaggcccccggcgagtacttcttctcagacggggtgcggctcaagaaataccggggcatgggctcactggatgccatggagaagagcagcagcagccagaaacgatacttcagcgagggggataaagtgaagatcgcacagggtgtctcgcgctccatccaggacaaaggatccattcagaagttcgtgccctacctcatagcaggcatccaacacggctgccaggatatcggggcccgcagcctgtctgtccttcggtccatgatgtactcaggagagctcaagttcgagaagcggaccatgtcggcccagattgagggtggtgtccatggcctgcactcttacgaaaagcggctgtactgaggacagcggtggaggccgaggtggtggaggggatgcaccccagtgtccacttttgggcacagcctccctccataactgagtggtccacagatttgcactacgggttctccagctcctttccaggcagagaggaggggaggtcctgaggggactgctgcccctcactcggcatcccctgaagagtcaggactgctcccgggaccaggctgccctgggagcccccctccgagcccagccagacaggttctcaggccctgcgcctgcctcaggtctttcttgctgcagcctgctccagcctggcccccaccccaggggcaggcggcccctcctggcttctcctgtagggcacctccctgcccctagcctcccaggaaatggtgctctcctggccctgcctctggcccttcccgggccgctgcccctcagccatgtggcacttctgagctcctgacctaggccaaggggaggtctctgcccccttccccggccctgggctacccttgggtcctgctcctcaggccgctcccctgtccctggccatgggtaggagactgccctggtcatggccgcctgcctgtcattcctgactcaccaccgtccccaggtgaaccattcctcccttctcctcagctgcagtcgaaggctttaactttgcacacttgggatcacagttgcgtcattgtgtattaaatacttggaataaatcaagcaggtctcaacgcc

SEQ ID NO: 351305 - DNA, 876 bp, Homo Sapiens
  misc_feature (55)..(55): n is a, c, g, or t
  misc_feature (98)..(98): n is a, c, g, or t
  misc_feature (718)..(718): n is a, c, g, or t
  misc_feature (729)..(729): n is a, c, g, or t
  misc_feature (732)..(732): n is a, c, g, or t
  misc_feature (737)..(737): n is a, c, g, or t
  misc_feature (740)..(740): n is a, c, g, or t
  misc_feature (756)..(756): n is a, c, g, or t
  misc_feature (777)..(777): n is a, c, g, or t
  misc_feature (858)..(858): n is a, c, g, or t
tatccatctccccggggccctacctgccgatcccatcgtatgggggattggattncagcctgtgaatttgggggaagcgggaccaaccattcggtttngtagcaaaaggagtagagtaatatctgccaataactggaggaaagaattgttcttttaaaactattaaattgtttaatgggatttaaatgatttcaggaatgaaatggaaatcctggtaatgggtagaaacataggtaaattctccttttccacttaccaccacctgtgtgaacaacaatcatttctcattaatagtcaagaatttgaagagatcatgagtaaaaagtcttgatcagaaattgtgtatagctgtttccagcataaaaccttatataaaatgcatattcatagaagatgctcaagtatgtcatgaaaaatatgaagtttatttaaatatttatacaaattaaagatttactgtattctctaacagcgcgtattttcttttttgtaataactatataaaataaatacaaagtaacacgtttttaccaagcccccttcccatccttctcatcaccctcaaactccctccaaatagagtcagagaaacagccagagggatgtctccactgagacacagggaggtcttgcacccaggcagttcagcagttcctgggcgggtggccttcccatctgagtacccctcaatgtgcctgctcctcctgggatcctttcngctcccttggnccnctgtnttnggtctgcaatggttgngttatgtagagggatcagtantggggttgtcccaagccaggctacaggttgagcaggtagccacataggccacatagcaggacgggcccagctggggactcngatgtcctgcaaataggg

SEQ ID NO: 351306 - DNA, 1013 bp, Homo Sapiens
  misc_feature (928)..(928): n is a, c, g, or t
  misc_feature (930)..(931): n is a, c, g, or t
  misc_feature (934)..(934): n is a, c, g, or t
  misc_feature (936)..(936): n is a, c, g, or t
  misc_feature (944)..(944): n is a, c, g, or t
  misc_feature (947)..(947): n is a, c, g, or t
  misc_feature (960)..(960): n is a, c, g, or t
  misc_feature (966)..(966): n is a, c, g, or t
  misc_feature (978)..(979): n is a, c, g, or t
  misc_feature (987)..(988): n is a, c, g, or t
  misc_feature (992)..(992): n is a, c, g, or t
  misc_feature (996)..(996): n is a, c, g, or t
  misc_feature (1003)..(1003): n is a, c, g, or t
  misc_feature (1007)..(1008): n is a, c, g, or t
cgtcgccccgcccactccggctcggcggctctgggcctgcggcgggcgctgcgggttggagctcgggacgtggtcgtgggcgcgcagccagcggctccctgcccttcccctccgggccctgagtaccggccccccaccaaggaggagcccgaggtctccgtcccggcggcgatgctgccccgtcggcctctggcgtggcccgcgtggctgttggggggtgctccgggagccgcgggttcttggggtcggccggttggccccctggcccgcagaggctgctgctccgccccggggacccccgaggtgccgctgacccgggagcgctaccccgtgcggcgcttgccgttctccacggtgtctaagcaggacctggccgcctttgagcgcatcgtgcccggcggggtcgtcacggacccggaagcgctgcaggctcccaacgtggactggttgcggacgctgcgaggctgtagcaaggtgctgctgaggccacggacgtcggaggaggtgtcccacatcctcaggcactgccacgagaggaacctggccgtgaacccacaggggggcaacacaggcatggtgggtggcagcgtccccgtctttgacgagatcatcctctccactgcccgcatgaaccgggtcctcagcttccacagcgtgtctggaattctggtttgccaggcgggctgcgtcctggaggagctgagccggtatgtggaggaacgggacttcatcatgccgctggacttaggagccaagggcagctgccacatcgggggaaacgtggcaaccaacgctggaggcctgcggtttcttcgatatggctcactgcatgggactgtcctgggcctggaagtggtgctggccgacggcactgtcctgggactgcctgacctccctgaggaaggacaacacgggctatgacctgaanannctntnatcgggtnggngggactttggggnttatancaccgtgttccnnttttgtcnnccanccanggctgtnaacnnggttt

SEQ ID NO: 351307 - DNA, 692 bp, Homo Sapiens
aataaaaatggatatcagcaaattaaatgctcatgaaactttcaggtgcaacttctaaaaaaagatttttaaacacttaatgggaaactggaattgttaataattgctcctaaagattataattttaaaagtcacaggaggagacaaattgctcacggtcatgccagttgctggttgtacactcgaacgaagactgacaagtatcctcatcatgatgtgactcacatagctgctgactttttcagagaaaaatgtgtcttactactgtttgagactagtgtcgttgtagcactttactgtaatatataacttatttagatcagcatagaatgtagatcctctgaagagcactgattacactttacaggtacctgttatccctacgcttcccagagagaacaatgctgtgagagagtttagcattgtgtcactacaagggtacagtaatccctgcactggacatgtgaggaaaaaaataatctggcaagtatattctaaggttgccaaacacttcaacagttggtggttgaatagacaagaacagctagatgaataaatgattcgtgtttcactctttcaagaggtgaacagatacaaccttaatcttaaaagattattgctttttaaagtgtgtagttttatgcatctgtgtttatggtgtgcttatttttgctagatggatactaattcca

SEQ ID NO: 351308 - DNA, 810 bp, Homo Sapiens
gttctgcagcacagtggagacacccctcccctccgaaagatgcagcagccactgggcagctcacaaggattccagggagggaccactgcccactgtcagcagggtgaccacagaggcctcctgggcttccctccctttcttcaccaaaaggtcttccagctcctcagcgacagctcgtgctgctcccccagctcccagcacctccaccctcacagactcctccccacagctcccatgcgatacccccaaagtcaagcagactgatggagacatgccaccacccccagggtcggctggccccggggataacgacatggaggaattctacatctgaatgccctctgctcttgttctcgaaacacacaaactcagagacacagactcaggccccactgcccctctggccactgagcacaccacattcttcatgatccatttcccaggagcccgtagcacatttgcctaccacccactcttagctggggggtggtatatctctagagacacagcagaaaaatactggcatttttatgcaaataaattctcaacaaacttgtcataaaatatattttttgaatattcagcatttgaggtatggtttagtgggtttatacaatttaaatggcttatataattatttgaaatgaaaagaaaacctagtcagccagaaccaatttggcaatttttccatggtatgaaggcaaatcaattaaggccaaaacgttgaatgtgggagagatagtaagtgacttgtatgagggattactgcataacaacgtaacgcacaccttactggattctccatatata

SEQ ID NO: 351309 - DNA, 1084 bp, Homo Sapiens
  misc_feature (81)..(110): n is a, c, g, or t
ggtaactgtttgtattgtaaaagttgtgtgtcctcagtgaaaaatactgccttcagcttccaaagcaggcacctgaatgcnnnnnnnnnnnnnnnnnnnnnnnnnnnnnnaaatacatgccttcactagattgctgtgacctactaaacctcattttatttgcttggaacatttttggcttctctgtccacaccatagaaaaggacaaaggccttccagctctccttttctcttatttgttcccttctaaatacttgactctctgggggtgtgaaaagattcagctcataatttatactactattaattttgtggtccttctaagccaatttaaaattatacttttgtgtatatattttcaaaatctttgctactgactaccttagctttaaagttgctaatttggagatgactgatagaatccctgaaacttggtggaggggagtggaaaggagcagaatgtgtttgtgtatatgtatgtgaaacatggatcttctatatataaatattctttagaaaaagcgttcagtctttttacaattctaagtaaaacgtataggtcaacagaaattaaaggaatatttcttaaaattcatttatttttcttttttgaaagcagacagaagcaaggctagtatagtatgaatggtcaggtagtttaaatgcgttgtcccacgtggaacaggagatattaactgtttttaaagcttacattatttttttacaagaatttgttttcctgtaattttcttcacagttaaaatatcctaatttatattttaacaaaagagatgtaagatacatcaaatatagatgattcaaggtaatgttttttagacctgaaactattgattcaatttatcatcagtgtttatttctattgtatctagttatctatccaaataattgtattggcttagcggagactgtatgttaagtgtattagttttagattgtgaaattgtgcagtttaggtaaacatcaaatccctttatttttgtacagcagatttccagcattagaaccatgtagaacaaatatactagatgttaaagattacacaataaaggaacttggcaaacca

SEQ ID NO: 351310 - DNA, 1370 bp, Homo Sapiens
  misc_feature (755)..(755): n is a, c, g, or t
  misc_feature (887)..(887): n is a, c, g, or t
  misc_feature (971)..(971): n is a, c, g, or t
  misc_feature (990)..(990): n is a, c, g, or t
  misc_feature (1113)..(1113): n is a, c, g, or t
  misc_feature (1117)..(1117): n is a, c, g, or t
  misc_feature (1147)..(1147): n is a, c, g, or t
ctgaccatctgccagctgtgccgcccctgtgacccagtgatgggcctcgaggagattgccccctgcacaagcaaacggaagacccagtgccgctgccagccgggaatgttctgtgctgcctgggccctcgagtgtacacactgcgagctactttctgactgcccgcctggcactgaagccgagctcaaagatgaagttgggaagggtaacaaccactgcgtcccctgcaaggcagggcacttccagaatacctcctcccccagcgcccgctgccagccccacaccaggtgtgagaaccaaggtctggtggaggcagctccaggcactgcccagtccgacacaacctgcaaaaatccattagagccactgcccccagagatgtcagaacctgccctgagcaagggggtggagaacttgcaagccctgctctaccaggcggccacaggcagttccgaagcaagtttccctactctctcacccctgtaaacacccccacaggaaccatgctgatgctggccgttctgctgccactggccttctttctgctccttgccaccgtcttctcctgcatctggaagagccacccttctctctgcaggaaactgggatcgctgctcaagaggcgtccggcaggggagagggacccaatcctgtagctggaagctgggagcctccgaaggcccatccatacttccctgacttggtacagccactgctaccatttttctggagatgtttccccagtatccactggngctcccgcagcaccagttttgggaggcaggggtgcccgcaacagcagagtcctctggacctgaccagggagccgcagttgggaacccgggggagcagaaccaggtggcccacggtaccaatggcattcatgntcaccggcgggtctatgactatcactggcaacatatacatctacaatggaccagtactggggggaccaccgggtcctggagacnttccagctacccccgaacnctcataccccattcccgaagagggggaccctggccctcccgggctctttacaccccaccaggaagatggcaaggcttggcacctagcggagacagagcactgtggtgccacaccctttaaagnattngtggtgctcatccccaagcttcagagaccntttggggttccacacttcacgtggactgaggtagaccctgcatgaagatgaaattatagggaggacgctccttccctcccctcctagaggagaggaaagggagtcattaacaactagggggttgggtaggattcctaggtatggggaagagttttggaaggggaggaaaatggcaagtgtatttatattgtaaccacatgcaaataaaaagaatgggccctag

SEQ ID NO: 351311 - DNA, 2143 bp, Homo Sapiens
gtggaccggtccggaattcccgggatgccgtgggagccctggaggcccggcctggccgctcccggccctggggtgcacatcggccctgagtcccgtcccaggctctgggctcgggcagccgccgccaccgctgcccaggacgtcgggcctcctgccttcctcccaggcccccacgttgctggccgcctggccgagtggccgccatgctcctgccttgggccacctctgcccccggcctggcctgggggcctctggtgctgggcctcttcgggctcctggcagcatcgcagccccaggcggtgcctccatatgcgtcggagaaccagacctgcagggaccaggaaaaggaatactatgagccccagcaccgcatctgctgctcccgctgcccgccaggcacctatgtctcagctaaatgtagccgcatccgggacacagtttgtgccacatgtgccgagaattcctacaacgagcactggaactacctgaccatctgccagctgtgccgcccctgtgacccagtgatgggcctcgaggagattgccccctgcacaagcaaacggaagacccagtgccgctgccagccgggaatgttctgtgctgcctgggccctcgagtgtacacactgcgagctactttctgactgcccgcctggcactgaagccgagctcaaagatgaagttgggaagggtaacaaccactgcgtcccctgcaaggcagggcacttccagaatacctcctcccccagcgcccgctgccagccccacaccaggtgtgagaaccaaggtctggtggaggcagctccaggcactgcccagtccgacacaacctgcaaaaatccattagagccactgcccccagagatgtcaggaaccatgctgatgctggccgttctgctgccactggccttctttctgctccttgccaccgtcttctcctgcatctggaagagccacccttctctctgcaggaaactgggatcgctgctcaagaggcgtccgcagggagagggacccaatcctgtagctggaagctgggagcctccgaaggcccatccatacttccctgacttggtacagccactgctacccatttctggagatgtttccccagtatccactgggctccccgcagccccagttttggaggcaggggtgccgcaacagcagagtcctctggacctgaccagggagccgcagttggaacccggggagcagagccaggtggcccacggtaccaatggcattcatgtcaccggcgggtctatgactatcactggcaacatctacatctacaatggaccagtactggggggaccaccgggtcctggagacctcccagctacccccgaacctccataccccattcccgaagagggggaccctggccctcccgggctctctacaccccaccaggaagatggcaaggcttggcacctagcggagacagagcactgtggtgccacaccctctaacaggggcccaaggaaccaatttatcacccatgactgacggagtctgagaaaaggcagaagaaggggggcacaagggcaccttctcccttgaggctgccctgcccacgtgggattcacaggggcctgagtagggcccggggaagcagagccctaagggattaaggctcagacacctctgagagcaggtgggcactggctgggtacggtgccctccacaggactctccctactgcctgagcaaacctgaggcctcccggcagacccacccaccccctggggctgctcagcctcaggcacggacagggcacatgataccaactgctgcccactacggcacgccgcaccggagcacggcaccgagggagccgccacacggtcacctgcaaggacgtcacgggcccctctaaaggattcgtggtgctcatccccaagcttcagagaccctttggggttccacacttcacgtggactgaggtagaccctgcatgaagatgaaattatagggaggacgctccttccctcccctcctagaggagaggaaagggagtcattaacaactagggggttgggtaggattcctaggtatggggaagagttttggaaagggaggaaaatggcaagtgtatttatattgtaaccacatgcaaataaaaagaatgggacctagat

SEQ ID NO: 351312 - DNA, 577 bp, Homo Sapiens
aggtagtggagggagaggagaagggaggctgcttttccccagggctgcacgctggagggctggacgcaagtaagcacgtgaaggggaagcagggagggagagagggggaaggatgaaccaatctacctggagcagcttaggagctaatgagccgggggcaagaggggaggagaggcctggtgatgtggtgggttgatcgcctgcatccagttgtaaagcttggggctgctggggagggagtgggccgagtaagggactttcccatctgagtgggctcaggagacccacccctctcccctcagagcagcaggggaccagagaaaagccatcacttctttgggtctttgtggcggctcagcatgtgggatgggaaggagggcagaaagggcagagaagggcccttagcaggaagcgccacctcagcagagtaggcctggctgggagctctggcagaaaggtcacagtgaggctgaggagcgcccaagaggagaatggccgtagtgcagaagtgctggcatggatgggtggggtaaggtgcagtgccccaccctctgccagggcccttgggaaaggcaga

SEQ ID NO: 351313 - DNA, 1619 bp, Homo Sapiens
tgtacggcaaaggcaagagtaacagcagcgccgtcccgtccgacagccaggcccgggagaagttagcactctacgtatatgaatatctgctccatgtaggagctcagaaatcagctcaaacatttttatcagagataagatgggaaaaaaacatcacattgggggaaccaccaggattcttacattcttggtggtgagtgctgcagcagctcccagtccagtgctaggaaacattcccccaggagatggcatgccagtaggtcctgtaccaccagggttctttcagccttttatgtcacctcggtaccctggaggtccaaggcccccattgaggatacctaatcaggcacttggaggtgtcccaggaagtcagccattactccccagtggaatggatccaactcgacaacaaggacatccaaatatgggtgggccaatgcagagaatgactcctccaagaggaatggtgcccttaggaccacagaactatggaggtgcaatgagacccccactgaatgctttaggtggccctggaatgcctggaatgaacatgggtccaggtggtggtagaccttggccaaacccaacaaatgccaattcaataccatactcctcagcatctcctgggaattatgtaggtcctccaggaggtggagggccaccaggaacacccatcatgcctagtccagcagattcaaccaactctggtgataacatgtatactttaatgaatgcagtacctcctggacctaacagacctaattttccaatgggtcctgggtcagatggtcccatgggtggattaggaggaatggagtcacatcacatgaatggctctttaggctcaggagatatggacagtatttccaagaattctcccaataatatgagcctgagtaatcaaccgggcactccaagggatgatggcgaaatggggggaaatttcttaaatccttttcagagtgagagttactcccctagcatgacaatgagcgtgtgatccattaccaagtctcctcatgaaaaccacagtgagtcagcccttcacagaactactacggaagaaaattattcatcacagtgtacagttaaacaaaggaatctcagtcacaccaaaccaacctttttatttcctgctctctcccctcttttgtgaagaaagcgggtccaaatgtgattcaaacaactgtacggagtggcatattagaattgccctaaactgaactgcaaataattatgtgtgtatgtatatgtgtgggaaagagaatgtactgtatatgtgtatgttatacagacatatacacatacatacattgacccacaggacattgtaaaatattatcacatgacatcttaagtagaaataagtagggacttttattccatcctttttttcacgtttacattttaattattacaagttgctcctgccccctccctgaactattttgtgctgtgtatatcactgctttatataagttattttttaaggtgaactcagatgttatggttttgtaaatgtctgcaatcatggataggaataaaatcgcttatttgagagctttcattaaattgcgtctgatgcaagttatcctgtgaatcacaaagtgtactgtctc

SEQ ID NO: 351314 - DNA, 993 bp, Homo Sapiens
  misc_feature (6)..(6): n is a, c, g, or t
  misc_feature (13)..(13): n is a, c, g, or t
  misc_feature (796)..(796): n is a, c, g, or t
cctganctaaagnccattcatgtgatgtactccattcctcctaatccacccatggaccatctgacccaggacccattggaaaattaggtctgttaggtccaggaggtactgcattcattaaagtatacatgttatcaccagagttggttgaatctgctggactaggcatgatgggtgttcctggtggccctccacctcctggaggacctacataattcccaggagatgctgaggagtatggtattgaattggcatttgttgggtttggccaaggtctaccaccacctggacccatgttcattccaggcattccagggccacctaaagcattcagtgggggtctcattgcacctccatagttctgtaatgataaccaagggtcagactgtggtcctaagggcaccattcctcttggaggagtcattctctgcattggcccacccatatttggatgtccttgttgtcgagttggatccattccactggggagtaatggctgacttcctgggacacctccaagtgcctgattaggtatcctcaatgggggccttggacctccagggtaccgaggtgacataaaaggctgaaagaaccctggtggtacaggacctactggcatgccatctcctgggggaatgtttcctagcactggactgggagctgctgcagcactgtaatcatggaaggcttttgcttcacttgagtgttcacatgtttcacgtctctctggagctgcacagtagagatcccacaatacacaccaccaagaatgtaagaatcctggtggttcccccantgtgatgtttttttcccatcttatctctgataaaaatgtttgagctgatttctgagctcctacatggagcagatattcatatacgtagagtgctaacttctcccgggcctggctgctcggacgggacggcgctgctgttactcttgcctttgccgtacatgcttgtgccgagagcagctcccactgtcacgcacctg

SEQ ID NO: 351315 - DNA, 1128 bp, Homo Sapiens
  misc_feature (736)..(736): n is a, c, g, or t
  misc_feature (809)..(809): n is a, c, g, or t
  misc_feature (946)..(946): n is a, c, g, or t
tggaccggtccggaatcccgtgatggggaggctgtgatgggttgacaggtgcgtgacagtgggagctgctctcggcacaagcatgtacggcaaaggcaagagtaacagcagcgccgtcccgtccgacagccaggcccgggagaagttagcactctacgtatatgaatatctgctccatgtaggagctcagaaatcagctcaaacatttttatcagagataagatgggaaaaaaacatcacattgggggaaccaccaggattcttacattcttggtggtgtgtattttgggatctctactgtgcagctccagagagacgtgaaacatgtgaacactcaagtgaagcaaaagccttccatgattacagtgctgcagcagctcccagtccagtgctaggaaacattcccccaggagatggcatgccagtaggtcctgtaccaccagggttctttcagccttttatgtcacctcggtaccctggaggtccaaggcccccattgaggatacctaatcaggcacttggaggtgtcccaggaagtcagccattactccccagtggaatggatccaactcgacaacaaggacatccaaatatgggtgggccaatgcagagaatgactcctccaagaggaatggtgcccttaggaccacagaactatggaggtgcaatgagacccccactgaatgctttaggtggccctggaatgcctggaatgaacatgggtccaggtggtggntagaccttgggccaaacccaacaaatgccaattcaataccatactcctcagcatctcctggggaattatgtanggtcctcccaggagggtggagggccaccagggaacacccatcatgccctagtcccagcagatttcaaccaactctgggggataacatgtgatacctttaatgaatgcaggaacctcctgggaccctaacagacctgntttttccaatgggtccctggggtcagatggttcccatgggctggatttaggagggaatggaaatcccatccccattaaatgggctcttttaagcctccaggagaatatgggacaggtaatttcccaaggaattcctccccaataattaaggagccccggagttaattccaccggggcacctc

SEQ ID NO: 351316 - DNA, 847 bp, Homo Sapiens
gcgagtcgctgtcggtcgctcagccagaaggtcgagggaaccgcgcgggtgtccctcgccagccggccctctgggaacagggcgggggcgacaccccagggagtagggctgaggaccgcaaaaatcaatcgttagcactctacgtatatgaatatctgctccatgtaggagctcagaaatcagctcaaacatttttatcagagataagatgggaaaaaaacatcacattgggggaaccaccaggattcttacattcttggtggtgtgtattttgggatctctactgtgcagctccagagagacgtgaaacatgtgaacactcaagtgaagcaaaagccttccatgagtacagtgctgcagcagctcccagtccagtgctaggaaacattcccccaggagatggcatgccagtaggtcctgtaccaccagggttctttcagccttttatgtcacctcggtaccctggaggtccaaggcccccattgaggatacctaatcaggcacttggaggtgtcccaggaagtcagccattactccccagtggaatggatccaactcgacaacaaggacatccaaatatgggtgggccaatgcagagaatgactcctccaagaggaatggtgcccttaggaccacagaactatggaggtgcaatgagacccccactgaatgctttaggtggccctggaatgcctggaatgaacatgggtccaggtggtggtagaccttggccaaaccccaacaatgccaattcaataccatactcctcagcatctcctgggaattatgtaggtccctccaggaggtggaaggccaccaggaacacccatcatggcctagtccaaca

SEQ ID NO: 351317 - DNA, 925 bp, Homo Sapiens
  misc_feature (47)..(83): n is a, c, g, or t
tggataactcactatagggcgaccggacgtgcacgcggtggcggcgnnnnnnnnnnnnnnnnnnnnnnnnnnnnnnnnnnnnnatcaggccaaatcggccgagctcgaattcgtcgagagcggacgagcatgtacggcaaaggcaagagtaacagcagcgccgtcccgtccgacagccaggcccgggagaagttagcactctacgtatatgaatatctgctccatgtaggagctcagaaatcagctcaaacatttttatcagagataagatgggaaaaaaacatcacattgggggaaccaccaggattcttacattcttggtggtgtgtattttgggatctctactgtgcagctccagagagacgtgaaacatgtgaacactcaagtgaagcaaaagccttccatgattacccttttatgtcacctcggtaccctggaggtccaaggcccccattgaggatacctaatcaggcacttggaggtgtcccaggaagtcagccattactccccagtggaatggatccaactcgacaacaaggacatccaaatatgggtgggccaatgcagagaatgactcctccaagaggaatggtgcccttaggaccacagaactatggaggtgcaatgagacccccactgaatgctttaggtggccctggaatgcctggaatgaacatgggtccaggtggtggtagaccttggccaaacccaacaaatgccaattcaataccatactccttcagcatctcctgggaattatgtaggtcctccaggagcgtggaggggccaccaggaacacccatcatgcctagttcagcagattcaaccaactctggtgataacatgtatactttaattgaatgcagtacctcctgtgacctaaaagaacctaatttccaatgggtcctgcgtcagatggtcccct

SEQ ID NO: 351318 - DNA, 2451 bp, Homo Sapiens
  misc_feature (1660)..(1674): n is a, c, g, or t
  misc_feature (1763)..(1772): n is a, c, g, or t
  misc_feature (1846)..(1846): n is a, c, g, or t
  misc_feature (1876)..(1876): n is a, c, g, or t
cagagacagaggggccggaagttctcttcacggagccgcgcggctgcgggggcgcaaatagggtcactgggccgcttggcggtgtcgttgcggtaccaggtccgcgtgaggggttcgggggttctgggcaggcacaatggcgtctcgagcaggcccgcgagcggccggcaccgacggcagcgactttcagcaccgggagcgcgtcgccatgcactaccagatgagtgtgaccctcaagtatgaaatcaagaagctgatctacgtacatctggtcatatggctgctgctggttgctaagatgagcgtgggacacctgaggctcttgtcacatgatcaggtggccatgccctatcagtgggaatacccgtatttgctgagcattttgccctctctcttgggccttctctcctttccccgcaacaacattagctacctggtgctctccatgatcagcatgggactcttttccatcgctccactcatttatggcagcatggagatgttccctgctgcacagcagctctaccgccatggcaaggcctaccgtttcctctttggtttttctgccgtttccatcatgtacctggtgttggtgttggcagtgcaagtgcatgcctggcagttgtactacagcaagaagctcctagactcttggttcaccagcacacaggagaagaagcataaatgaagcctctttggggtgaagcctggacatcccatcgaatgaaaggacactagtacagcggttccaaaatcccttctggtgattttagcagctgtgatgttggtacctggtgcagaccaggccaaagttctggaaagctccttttgccatctgctgaggtggcaaaactataatttattcctggttggctagaactgggtgaccaacagctatgaaacaaatttcagctgtttgaagttgaactttgaggtttttctttaagaatgagcttcgtccttgcctctactcggtcattctccccatttccatccattaccccttagccattgagactaaaggaaatagggaataaatcaaattacttcatctctaggtcacgggtcaggaaacatttgggcagctgctcccttggcaggctgtggtctcctctgcaaagcattttaattaaaaacctcaataaagatggccctgcccacactgtgccttgtgtttggggcttgatagagtgtgaaaggtgtgttgcttgaaaggtgtggccttagacactaggagatgatgggtagaagctccttgagaaacctagcagtggccatagagaagtagactgggtatggggaacctaagtcatagttgtaacctacagctgattggtaagaactatgggccagacatttaatctctccatctatgaaatagtccattctcatttatctagcttacgttatgggctcttcttttagttggatattcacatttatctttcaccgttaactgggcatcagttatgagtctactactgtataatggcatccaaaagaattttaaagtaccctcggcttataggcatttacaattcacgtagaaacttgttattcatgtgaaacagtgaacataatatctaatgatgtggagcaaggtaccttcaacaacaggaaggaacgagatccggtgatttaaactaaaaggcccgctttnnnnnnnnnnnnnnngccgaatgcgccaccccacgacatgacaccctttgtttcggcccgcccctccggcccctccgaaaaaaacgtttgtcctaaaacccaannnnnnnnnngcaaccccgtcgggccccccacccccaggcttcacggggcccaaccgtcgggcccccacatagcgctgtggttntccccctccgccgacaaataatcccgtggngcccacatctggagccttaaaggccggcctgttgcgggacacctcctctctcccccacttgaagcttcgcccgacatttcccccctctctctttcccggcggcgcggggtatatggacatctctcggtaagaccccgggttccccgcttggagtcagcccgagatctcttccccgcgaaacgcgagcccgcactttcccccgtgagacacgggcgcctctttatacgagtcggggaggtacttgtcctacgtatcgcaaacctacgcgggggcggtggccccacaatcgggggggagaacgcgctcacggaacatagcgtcggagaacttttaagagccccgccgcccccaccccccgcttgggcccacatctccaatcccacccccctatagaccacgggctgcacggtcaaataattatgtcttacccggcctcttcctccttggccggccacctatggtagaaaagccctccttcgcccctggagattcgctgctcattggccaacacccacccccccttttagttgtgtacgcggtgagcggtgacacacagcccgcttcgcttgggctgg

SEQ ID NO: 351319 - DNA, 349 bp, Homo Sapiens
caaagaggaaacggtaggccttgccatggcggtagagctgctgtgcagcagggaacatctccatgctgccataaatgagtggagcgatggaaaagagtcccatgctgatcatggagagcaccaggtagctaatgttgttgcggggaaaggagagaaggcccaagagagagggcaaaatgctcagcaaatacgggtattcccactgatagggcatggccacctgatcatgtgacaagagcctcaggtgtcccacgctcatcttagcaaccagcagcagccatatgaccatgtacgagaaaaccatgtacgagaaaaccatgtacgagaaaaccattacagaagtccagac

SEQ ID NO: 351320 - DNA, 2389 bp, Homo Sapiens
  misc_feature (415)..(464): n is a, c, g, or t
  misc_feature (2336)..(2345): n is a, c, g, or t
  misc_feature (2370)..(2370): n is a, c, g, or t
catcgacagatcagagctgattgaggtcgacagaccgcgctatgagagtagatcgcatgcaaggtgcgcgacatttgccgtagatccgctgcccgcgactaacatcccagaggataagtccgagatctcgcgcaacggcgtgcatgtggacaactggcacgcaggctaaatcagtatccgccgaggaacgcatgggcccagcgagctctgagcagacacgggatgtcgtcgggacaacacttgggacgcgagagaataagggcccaaacgcctccataggaaaatgggggggtcacgaaaaggagtccttggggatatctggggaaagggggccctcaaagggttcccccattaggggtcttcgggggtttccccaggaatccaagtcccggcgtggaccacgggaagacagccnnnnnnnnnnnnnnnnnnnnnnnnnnnnnnnnnnnnnnnnnnnnnnnnnnagggagaagcttctgtacaaaggtcatcttccggtgagggtccccggctgcggccccaaaacgcccgatgggccccgcgggacggaaagcggagagcggaatgtccgcatgggctcacctcggatgccacggccccagcccaggcagcctgggggcgtctccctgacactggccccgacccaccggagcgaacggcccgcccagctggtctgcgctgcagacctggcgcaggctcgggcctcctcctgctgcggctgtgctcaccaagcgatgccccgccggcccagcggctacttcttgtcttctggaggcgcacggcagtggctccggtagagccttggggcgagggctcgggctcccagagcaggaattcgtggagcagcgtgttgaccgtctcagggcattccagcatcaccatgtggctgccctcgtcgatgagcttcaggaatgccaggagcaggatctcggccatgcgctggtcttcctccaccggcacaaacttatcgtgcatgccgtggacaagcaggacgggcacggtgagctcggcgtggtagacctcgtcgccctcgggccagtactggccgctcatcatggcccggagtacgaaggatgacacgttgaaagcgttgccctcctttaacagctgcttctccttggctccttggcgggcgaagccggccttgaggaagctccaggccaggcagggcgacaagcagtgcaggacgcaggtgggcatgttgaagattgagcagaagctgggctccagcgccgtagggcccccgccattgatcatgatcaccttgtgcactaggtctgggtactcatgtgccaggaatgtgcagaaagagacaccgtaggaatggccaatgagcacatttcgcttcttggcatagcgcttgaagattgctcgcatgtcctcagccagcgcatagaaggtgtaggctgcggccacctggggcgcagagctggccccgtggccggccaggtcaggagccaccacctcatagcctaggcgcacaaagaagtccagctgctccttccagatggccagggaaccgccgacaccatggatgaaaaagagcaccacgtcggcctgggcgcctttgcagctagtgatgcgcttctcacagtcaatatggatggtcctcttggggcgcctggctcgccgcccgccgcccaccactgccactgccgctgccgctgcctgcgctgccgggggccaagcggccatcgctgcccgccggatctgccagctccacctccagggcggccggcggctccccagagccattctgcccgtgtaggaggtcggctcgaggggctcggcccaggttttccaccagcaaccgcccattgcggtacacggtgatccggcgctgacagcggaccaagccggagaggtccccctgggctgcatccgaggatgcggatgatggtggaggtggggcagcggctggggcgggtcctgcatgcttcacccgcagcacgcggccgggcttgacctctacaaaggtgtagccatcgctggactcgacgctctccagtggccccacggcgttggggggcgtgcccagcaggcaacagaagataccgtcggtcaccccggtcagcatggtgtgtcctcatcgagggccgcggggcccgggtcggggcggaggggtcccaggcggagaagccagcgtccgcctgctggcgccgtttacatggtggcgcggggtcaggccgggtgcgtctacgcgggcgggcacctgcccctggcggtcagcgcaggggcatcccgcgcccgatccgtataattccggaccggtgccagctgggtgttggcccatcatatttgtgggtttgtgggtttagtggtgccgccttggcgtnnnnnnnnnntgcatcttcctctttctcaccctcntcctgggcgggggcggggg

SEQ ID NO: 351321 - DNA, 476 bp, Homo Sapiens
agtgtcgtgaaaatttgtctcaaaggaaaatcccacatagggatttgaaataggctttctgcttgccaaaagcctgtggcaatctgaaccctggctgagggcccgggcaagcctcccctgaacctttggaagccgagttcactctctgcctgcccaggggagcaccggcttggttctgggggctcctctaacatctcaggtttttatcttgtcttaaatttctttctaggaaaaaacccttccctgccaaaggtgactgtgttttctgccgccgaaggagggcccggtccctccaggctcagtgtggcttctccctgacccctgccctagaacttttgccagtgccttttctgaaactcctgtgtcccgggccccccaggcggagaaggatatgccggattctgcctggggctgggctctaggagaccccaaatttgacaccacagaaagcaaataaaacacttgaaatacgcaaa

SEQ ID NO: 351322 - DNA, 511 bp, Homo Sapiens
  misc_feature (13)..(13): n is a, c, g, or t
  misc_feature (48)..(48): n is a, c, g, or t
  misc_feature (54)..(54): n is a, c, g, or t
ttaaggatgcttnaggaatgggtggctgcaatgggggcaaaccttggnaaaaanacctgccctcccttgaacccatgaatcaagcaaccccaatgctggccgtcaacgcaagctccccaaaagccctcaggatagaggctggggctgcggagaatagggctttgtccagctgtctccaaaaagggacgtcctaggttcaagacgccacaagaggcagagaggtcaaaggccaacagtctagacagtggcagccaaaagggggccagctgtgcgggacagatttccatgagccatccccctccacctggtcacctccccagggcactggagtgcaggtgtaaacataccagctggtcttgcttcctggaagaaacttccaagactaaaaggcatcttgaatctacttttccagctctcccatctgccccagagtggatactttctgttctagatgtttctatgccagcaacgagcagaaaagcagagcagggaattccctcgtgccaagctt

SEQ ID NO: 351323 - DNA, 920 bp, Homo Sapiens
  misc_feature (253)..(253): n is a, c, g, or t
  misc_feature (260)..(269): n is a, c, g, or t
agggcccccagacccccaacctttgaaatgggttggggcccagaccgttggtttggaatcgtccagaaagccacggcccactacccaagtgacccaatttcctgtccctttttgtgtgttctgtgagcgctggagagggcaggcacttctgtgggtaactgggggaggcacagcggggagaaagagcaggaggagaaaggggaatttggggaggggggagcagtttggggtgggactgggtccctcaagtctngggagtnnnnnnnnnnactcagttgtgacaactgtcctggaaaccaggggacagagtctctcagcaggtatgttcagcgtccacccgggaattagctttccagacgtgggcaactgggcaacgcctgcccctcaaacagccattctgcccaagggtctaagtggaacccccagccctcggccggcctcctcactgcaaaaacggggatgctttccctcccaaccagcagccccgggccctcatgaagcacttgtgcccagggaagggaaatttaatccggattataaaaacaaagccctctcctgccccctcaagttaggatgctgaggatgggtggctgcatggggcaacctggcaaagacctgcctccttgaccatgatcagcaccccatgctggccgtcacgcagctcccagaggcctcagaatagaggctggggctgcggagaatagggctttgtccagctgtctccaaaagggacgtctaggttcagacgccacaagaggcagagaggtcaaaggccaacagtctagacagtggcagccaaaagggggccagctgtgcgggacagatttccatgagccatccccctccacctggtcacctccccagggcactggagtgcaggtgtaaacataccagctggtcttgcttcctggaagaaactt

SEQ ID NO: 351324 - DNA, 504 bp, Homo Sapiens
  misc_feature (73)..(73): n is a, c, g, or t
  misc_feature (95)..(95): n is a, c, g, or t
  misc_feature (178)..(178): n is a, c, g, or t
gggtgtcccattaagtcctgctatttaagaaaatacttacataacccttaggaactcctcagggctttaaaanggcaaggagcaaataaatttanggagacccgataatgtcaccctaaatttggaaatacctaagaagaggttaagtgttcctcaacctatgtgaaatctgtttccnccctactttcctcaaatctaatcctaggaatcttgcttataaacaaagcatttctgggacaggagtacttcctctattatagcaatgcttcacatcatattgtgctgcagtttccatcatttttaaaggacagagacataaatgataaataatggtatacaaatattacaatctaccacctcaaaaaaacaaatattgtttatggaattcagagtttggagattcaagtattgattgcagttttattttgaaaagaatgctacaatttatgtggtttttatttctcatgtttatattaaaagctaataaactctattttaattaaa

SEQ ID NO: 351325 - DNA, 498 bp, Homo Sapiens
ttgaaagccagtgcctcacctaaccgtgcccaaaaaccccggggccccttaagaattatgcctaaatcctactttgccctgctcctcctacaaatggaataacaaaacctacatggacagcatatcctgctttcagcatggtttactgaatattttaagccgacttttgagacctactgctcagaaaaaaagattcctttcaaaatattcccaagttttatctcatgataaaacttgagtggataaggagttgcttcttatgaataaacaaagagagtggtttcttaacatggaatctactccatcttgagatggagtctgctgtgaacattgttgacattgacaacaaaggttttagaataatatataaattttgttaacaaagcagcaacaggatttgagaggattgagtccaattttgaaagacatcgtactgtagggaaaatgttgtcaaacagcacacatgctacaaagaaatctttccctcgtgccaagctt

SEQ ID NO: 351326 - DNA, 389 bp, Homo Sapiens
  misc_feature (13)..(13): n is a, c, g, or t
  misc_feature (83)..(83): n is a, c, g, or t
ggaccagccatancccgcttccagccagggtttaactgaaatattttaaagcccgacttttgaagacccctacctgcctcagnaaaaaaagattcccttccaaaaatattcccccaagttttatcctcatgataaaacttgagtggataaggagttgccttccttatgaataaacaaagagagtggtttccttaacatggaatctactccatcttgagatggagtctgctgtgaacattgttgacattgacaacaaaggttttagaataatatataaattttgttaacaaagcagcaacaggatttgagaggattgagtccaattttgaaagacatcgtactgtagggaaaatgttgtcaaacagcacacatgctacaaagaaatcttt

SEQ ID NO: 351327 - DNA, 193 bp, Homo Sapiens
ccagttaatgctaagaaaagatttggggaaggttataataaaagtattttgtggtgaccataagaatgtccctccccaaacaagtaaacttgtgaaagtttaatttggaattagtggaagctgttcctttgaaagccaagatattatttaagttgtaaagccagctaataaaatgccttagtttgagcataaa

SEQ ID NO: 351328 - DNA, 440 bp, Homo Sapiens
  misc_feature (17)..(17): n is a, c, g, or t
  misc_feature (38)..(38): n is a, c, g, or t
  misc_feature (41)..(53): n is a, c, g, or t
cttgtaactctgggaanttgcctgtggggggacagggnggnnnnnnnnnnnnnccctcttcccccagtctgggtcaaaacaccccatcacacatcaatcaaagtgatggagacactggcctggccccaggataaggatgctggaaccccgggatcccggtgtgcaaatcacctgatgaaataactaggagaaaacatttctatccttaaaaaaattatagctgaatgcgaggtggctatagctttccaaattcaaaagatgtgaaatgagccagcctggtttttctacctcaatgactcctaatcccacgtttaggactcctcactaataattccatcactctgcattatgctatacactaggggcagtcatcccaaaacgaaggaatcactcgtcgtctttacttcaggaaatttcttggtaaaactgacttcaagaaa

SEQ ID NO: 351329 - DNA, 468 bp, Homo Sapiens
  misc_feature (19)..(19): n is a, c, g, or t
  misc_feature (66)..(66): n is a, c, g, or t
gtgccaccagccacaaaanggactttaatttggccacaacaccctcccccttgaataggaccacantttcctcaggccctgagttaacatgatgggggtggtggcttttgaggaacatggagggtctttttgtggcagctaagtccagggagtttccaggataaggatgcctgggacatatttctgttaagcaggggattctggtggaaatacccaggactttcttttactgcttacataaacactctggatcctctgtgcccactcagaaagtttagggagaaaagctgaaaaggccttgaattaatatctcagatgaaggacagtgccactaacagtctattaaaatacacattaaaaatatgtaactttaaatccctttggtttggtttaaaaaaattaaagttttataatgatgcctttattcttttatttaaggtacttaaaaaatgtcctcgtgccaagctt

SEQ ID NO: 351330 - DNA, 405 bp, Homo Sapiens
  misc_feature (60)..(60): n is a, c, g, or t
  misc_feature (209)..(209): n is a, c, g, or t
  misc_feature (221)..(221): n is a, c, g, or t
aagcttggcacgaggtgtgaaccaaacaggttgttctcattcatccctccaactacatgntatgtttgctttttaaatttgtctttgattttaatgccaccctaacattttcagtaaattggttgaatgcacaacttaaatccgcaggcttcaatttgattaagaatttgttaacaacaatttagtgggaaatggtagtgtatatcagncaatcaaatggncatctttttctccttctccattaaaaagtatatatttttcgaaatagaagacactaaaaaaatgactcaggcagtaatttgttcataggattttgctgacatttataaactatttgagctttactgctgccttgttgctggcaagaagcgtcagcaagtggaagtgttccctggagttaaatgc

SEQ ID NO: 351331 - DNA, 417 bp, Homo Sapiens
  misc_feature (27)..(27): n is a, c, g, or t
  misc_feature (30)..(30): n is a, c, g, or t
  misc_feature (42)..(42): n is a, c, g, or t
ctagttacctgggtatgggacctaccntcncccagctccctncccccaaagacttaatataatccaacctttcttactcacctccccttccccaccacggtgatctgtttaggaatggacacatgacccatctgtgaccaatgagagtgaatttcaggatttattctctctttctctataaggatgtgaggtctggaacagctgcagccattttgccaccatgggaaacctgggacatctgaactgactccatgaagcctgaagagaaagctaataagaaggcagagagaagaggaagagtcttggtctttggaaatatcttttggagctgctggatcaagtatcacttgaaggtagaactaaatctgcactttaaatttacatatccaataaaaagttctttatgttgtaaaaaaa

SEQ ID NO: 351332 - DNA, 442 bp, Homo Sapiens
gaataataaaataaacaagcaacctatgtgatgttatattaagataggtattgtagaggaatataaagtagagaaggggatagagtgatggggtgggtatgggtgcaatccttaaggccttgaggaaaacattagaggtaagtcaagacctaaagaagatgtaagattaagctgtgttaacagtcaggttaggctgtattatgctaagataacaagcaactcccagacaataacggcttaaatgacagaggtatatttctcactgaaaccacatgttcattgcaggtcagctggaacattgctccacatgcattcatttagtaaccacctgaagaaacatagctagttatcatggcagacagaaaaaaagaattctagaaggtctcactttatcaagtaaaagttcagccctaaagttatacatattcctcgtgccaagctt

SEQ ID NO: 351333 - DNA, 1291 bp, Homo Sapiens
gggtcgggtataaagcctggtgacctcgatgccaaaatttcctccaagcacctaacaactctcaagtctacctacttaaagcttcgttttctcattgacattggagtcaagtttgtgggtcatggcctgcagaaggacttccgggtcatcaacctgatggtttggcagggctcttttaagagtcttcttgtgagagtgggcccctcagggtatacattgtgcctttagagaatggggaattataggtcccctaccttaagtctccccctcttttatccttgccaggtgcccaaggaccaagtccttgacactgtctacctgttccatatgccccgaaaacgaatgatttccctgcgattccttgcttggtactttctggacctgaagattcaaggggaaacccatgacagtattgaggatgcccgcacagcccttcagctgtaccgaaagtatctggagctaagcaaaaatggcactgagcctgagtctttccacaaggtgctcaagggtctttatgagaagggcagaaagatggactggaaggtgcctgagcctgagggccaaacaagtcccaagaatgcagctgtcttctcctcagtgctggcgctctgactacccttcccaaagaaccacggccctctccctttactgttctatagccccagaactgggagatggcttcctaagttggctataccttgtccacttccagtactggacgtgctcagggtctagggtcacagatggtgctattaattgaactggaacacagcagaattgttgcaaaggttctaggagccagattcattccttcttcattctttgcaaaacagtggtacagacatggagtctagaattgacccagatggaaagtaattggtattcttaatatcctgggtgactaatatccaggcagagaagctcctggaaccataactgtaagttcctagctggctagggattgaagtcctggacagtgacagaggataccacagtagttcaagacttagcacaagtcaccaactgcttcagggatacctggaggggccagcaagtagagtgttggtggcccaagcaaaccagtgttgccaataccattgccaaaagggcctttggatcctggacaaagcttggctgccggcttcatttattcctgctgatggctgagaagcatctgtcttccatcccacttgcctgtcccaagttttgttccattttttaaaaatttgttgtaaactgcatgttttataaaataaaaataaaatatcgtttgttatttatctcattagag

SEQ ID NO: 351334 - DNA, 488 bp, Homo Sapiens
gatacccctcattgggtccctgcccccgaacacaggtaatcctggctactgacatctggcttggttttaagggtagacttgggtacccatcactgcgtaactctgcttcctcctcattaagggtgacaaactcagcatccagacccacccaggtccccaatctgtggcatctcattcagcatcagtggaataaaggtagtatgtgttttccgctgcttccgtgccagcgaggcttcagccagcaagacacttgcctcaatagggttcttgatgttcaggttgtatctggaattgagattccgtttgacataataaaggattgcaggtactttccaattcatgtcaaactgcacagcttcatgcttatcaataggttcaataagaaagtcattgaacagataccactgctggtgagtaacgccctccttgcgctggtggtaggtctctccaactttgatgtgagccaccaggctgccgccctgtgcgtg

SEQ ID NO: 351335 - DNA, 462 bp, Homo Sapiens
ggcacctgccaattatgccaaagtcttggagtggcagctggcaccatcaccaaggcacaaatgccagcagagacctggcactcacctgggttgtgattccatagggcccctgtctcctgttggtctcccaggctcaaaggctgacctgataattcaagtgaaggatgcctagttccaaggcctcccagttcctcatcccaggccacctggtcaggtggtcccaagggacaagctaggtcctcctgaactgcagaggctgccaataaactggcaacacaggtgttgcaggaagatatagctgggtcctcatcctgggtctgtaatttattagacgtgtggctttggacaaatgacataatttcccagagcctccttagataaaaaactagggctttgcttaccttggcgtattgttaggaaaattaaatgagttgctcatataaatgttacttcctcctgaaa

SEQ ID NO: 351336 - DNA, 591 bp, Homo Sapiens
  misc_feature (212)..(212): n is a, c, g, or t
  misc_feature (392)..(392): n is a, c, g, or t
ctgggacagagccacctgctgccaaggcagtgcaagttttccaggttacctgtccccctccctagctctgcccctcctcagagtgtgaagatggtgggtacctaggtgtcatgctcacaggctcaggaggcatcaggctcgtccctggctctgggatggaatctcgatgggggctcaggaagaggccagcaagaaccctgaagccaagggtntgagcagagggagttggcaggccctagctcctgtgcccccactccgaccctccctgctcatgcggcagtgggtgggtgaggtgggctggggcccctggaggagtgcctttgaggaggtcagtcctggcaggtggacagaggacgcctggcatgggctgcttactgggaccccaggcggcncctgccatggccacagtcttccttcttttggcgtgtgggctggtaccagatctggggattttctaaagggactggggggaggggagggcattgtcaatggtggtatctttagcctgagacagaagatttttaaaggcaaaattatatttctggtttgttgtttcagaagaccaataaagactgtattttcctatgtaaa

SEQ ID NO: 351337 - DNA, 825 bp, Homo Sapiens
gtgcaaaaggaaaatagaagcaactggagtgatacaatcttgtgccaaagaggctaaaaggattcttgaagatcatggctcacctgctggagagattgatgatgaagacaaagacaaggatgaaactgaaacagttaagcagactcaaacatctgaggtgtatgatggtcccaaaaatgtaagatctgatatttctgatcaagaggaagatgaagaaagtgaaggatgtccagtgtctattaatttgtctaaagctgaaactcaggctttaactaattatggaagtggagaagatgaaaatgaggatgaagaaatggaagaatttgaagaaggccctgtggatgtccagacttccctccaggctaacactgaagctactgaagaaaatgaacatgatgaacaggtcctacaacgtgactttaaaaagacagcagaaagcaaaaatgtcccattggaacgagaagccactagtaaaaatgaccaaaataactgtcctgtgaaaccctgttacctcaatatcttggaagatgagcaacctttaaatagtgctgcccataaggagtcacctcctactgttgattcaactcaacagcctaacccttttgccgttacgtttacctgaaatggaacccttagtgcctagagtcaaagaagttaaatctgctcaggaaactcctgaaagctctctggctggaagtcctgatactgaatctccagtgttagtgaatgactatgaagcagaatctggtaatataagtcaaaagtctgatgaagaagattttgtaaaagttgaagatttaccactgaaactgacaatatattcag

SEQ ID NO: 351338 - DNA, 498 bp, Homo Sapiens
tcaatagaaaatccatgtgtacaactgttaattcctcatcctccactagcactaaatttgtcactttaaattttgaaaccagggaaacaccacctgtcaatctgtccccattctccatagctcttcaatctttacatgccgcaagacttttttgatagcccgtactcatcccagtgtctcctgaaaccccatcatgtaatgtactgggcacccttcttttaaacaaatgtttactctgtgggtttggttcatttcaatttctgcgttctgacacatatttttttaataaagatgagaaagagaaaatgactgttgcagtacctttctagacctactttaactttacctcagatgacagtttgttaacatatatggacacattatttttaactttatgtacaatgcattcaacagaacagcaaaatttttagaaattttccattaatttctgtaacacaccatgtaaaactgttacaaataaacatgtttgagaacaac

SEQ ID NO: 351339 - DNA, 909 bp, Homo Sapiens
  misc_feature (17)..(17): n is a, c, g, or t
  misc_feature (30)..(30): n is a, c, g, or t
  misc_feature (43)..(43): n is a, c, g, or t
  misc_feature (171)..(171): n is a, c, g, or t
  misc_feature (352)..(360): n is a, c, g, or t
atggcaccactgtttanaatccaaaccatnggcaacaagccanttaagccaattccccagggaaactgcccaaccttacccaaaccccccagaaaaacaaaactggtcctcaaggcccaactccttaagggtccattcccacctttccccatccttccccgttccatgtgnaaagggttaccctaatcataaaatgtttgctcatttctcaagaaactctgtggaccaacaggtgatagctacagagggaggtaaacggcccttctcacttttctggttcttcggaccttccacattaggatgatattgacatatattcttgaatagacgtttggtcagtttatctaactgnnnnnnnnnttagactcctgtgacctgatagtgtaaaatgtgggctttaaatgataaccattaccttcatgtatcacttttcgctttgtgaacaagtatacaatcatttttcaaatgaatctcccaaatcattttagtttctattgatatgaagaatcaaatgcaggcctattcaaatcaattgtctcaatggaaattctacttttcaaatctaaaaaccaaataataataattatcctcaaatccaattaatcacatgaatctttaaagttttcttcttagtgttaaaacactttcaacatactgtaactgcataggaacatcaggaaaacacacttgacctgtataacaattctctgtagggcaaaaatatatagattctttatgaaaatcatgtgctaaacatacgaaccaaacactgcactttttgtctcataagtgtaaaaaaaggaagcttagcctcttctgtttcacgtacaaacagtccagtgatttatatcgggggtaggtgggagtggggaggtgggagagtttcagaatctgaattcttcagaatcc

SEQ ID NO: 351340 - DNA, 1226 bp, Homo Sapiens
  misc_feature (901)..(919): n is a, c, g, or t
  misc_feature (983)..(1014): n is a, c, g, or t
ggagtgatgacgcgactctcacgtgaccaggagtcgacgtgtgcagaagtccttatagtccagggcctgtttccctgtagcagctccttattgctggagaaggagaaaagtgcccaagatcctttcaggatatttggttttttgggcgcgacacaaatcgaggtgagggaagagagaggaaaatcccctgaatccctgcaggattaatttattcaaaaaggaaataaaaaatactcaatatgcaaaagtcttgtgaagaaaatgagggaaaaccacagaacatgccaaaggccgaggaagatcgccctttggaggatgtaccacaggaggcagaaggaaatcctcaaccttccgaagaaggcgtaagccaggaagcagaaggaaaccccagaggagggccgaatcagcctggccagggatttaaagaggacacacccgttaggcatttggaccctgaagaaatgataagaggagtagatgagcttgaaaggcttagggaagagataagaagagtaagaaacaagtttgtgatgatgcattggaagcaaagacattcacgcagccgtccttatcctgtgtgctttaggccttgaattcatttttgcctaatattaaaatctggccccagctttctttctgttagcattttctgatgtatctttgacctccattttacttttaatcatctgatgaaattttgttttaggtaatttccttggtaccagcatctcattggattttggattttgacccattttccaggtctatttttcaattggaaactttcacacatttgcatgggaatatgttcattccatgttgtaaagtaaaacataacaggttatggcaaagcagcatatttaatatcagctcacatatgtaggataaaattccaaacttnnnnnnnnnnnnnnnnnnnatacatacatccatataacatatatcacaaacttaaccaagcttatttctgtgtggtgtgaaannnnnnnnnnnnnnnnnnnnnnnnnnnnnnnncttatatgtactttttaatgaacacgtgtctcacacacaaaaagaattaaggattttttttacaagtaagagtcaaataatttgcaaccagcttatgagggcaatgggggcacctaaactcttgatgaaagaactttaaaaagaaatgtaaacctcaaattacctctggatctcttagccagaggaataaactggcaattattacagataaa

SEQ ID NO: 351341 - DNA, 1104 bp, Homo Sapiens
ggaaggacagctctccagcttacaatagacaagtgttggagttcttacatctgcaccctgggcgatggatccagtcatagcacctcctgcacagcttcaggcatcctttagcaggaggataacagagtaagcaaggtaaaaataaagacatggctcccatacacaggtatctagagcagcagtgtgattgtgaacaggagcaaggattatctgaataggaatccccttcgtcgtcattggagcagtggtagaagatgcccttgactaagcacatgcaggttccatattccaccatgctctcagcagagcaaaggcactgccggttacaggccaaacaggatggtagggtcctgggagcagtgcattctccacacttgcacttcccacactgttcacaaatgaacttgtgctgtgtcaggtcctctttcaaggaacccttcaagtcatccacaatcagttgcttgggctgggtccggattgccctttcagacctatgaccagggactggtctggttggtggtgaccttcctaacagtccctgttcagaagaggcactgctgttgctcccagagctggctgcacttccagtgctggttgatctgctcaaaatggggcccctggcattacttgggagtactgcatgtcccaggtggcttgtgtgtcttgtgctcgtagttattattcacagtaattggtatgatgttcatgagtccggtcaggctgttcttgtcttggtgctgtccgaggagcaggtcttttcaccaccgaaggcccttctgtgtattcattgctgcctcttatggccttgactctggtctaaggaccagatagcagtaggctgaatctctctctcatagtctaatgctctgacggctatccaatagataggctgctggatcaccactaacgaactgccacctgccatgttgattttggggatccatgctgtatgtgatcgtcgagttctggcaatcacgctggaaagcctaggtcactgcatcctcgataatccgtaaggccgaaccggctgaccgggcggacacaatcacgatgcgaccacacgacaccagttccggactcccaaaatctccgggccgtacagcc

SEQ ID NO: 351342 - DNA, 485 bp, Homo Sapiens
ttcttcaccccatgcttctcaccaaatttttgttgtcattgagggcacttggataactcaagttgatatttatagctgatcaatctatatgtgtcacagaactatgctgcctaaagtgatcttggctccttaatggtccttttggccccttggatagttaacagctgagtaattctaatctcttctgtgttttccttgccttaaccacaaattgtggtgctttttgtatattttatgtataaatcacaaagttgaattctgactatttttaagacaaaagtctgttaaacttttttattgtaaagaatatttattatgcgaatctctattattttatggtatttattgcaaaagactgttgaaatgtactcatgtttgaatataacaaaatatcaatacttaacggaaaataaggtgacacgaagaaagtacatatgttaactataatgcagaaaatatattaattaatgaaactgtcaaaaaaa

SEQ ID NO: 351343 - DNA, 921 bp, Homo Sapiens
  misc_feature (411)..(432): n is a, c, g, or t
agaaccctcagaagtcccaagcgccaaaaaaccaatttgatgcgcgggcccctgggttttgaaatggccccattttcccagttggttaaactgggggccctggccttttttaagataaccgtggtggtttgccccttggcaaggaaattcagaaccaacccccccaaagatgggcatttgccatcaggaaccattggcaaacaagaatgctgcaggcccatgggctggccgggaagcttctggctttggtcgaaaagtgtcaagggcatacgggctcccattgaggctcaaagttcggctaaagggagctggcctaggagccaaaggcagcgcatatggtttgtcgggcgccgattcctacaaagatgctgtccggaaagccatgtttgcccggttcactgagatggagtnnnnnnnnnnnnnnnnnnnnnntgacaaggagcacaagaagtggtccatctcccgaattcgctgttaccgcctgtctctttaagggcatgccttgtgctgttaatagatcttagggtgaaccacttcattctgcagggttctccctcccaccttaaagaagttccccttatgtgggttgcctggtgaatggccttccttcccgccagagggcttgtgaacagaccggagaggacagtggattgtttatactccagtgtacatagtgtaatgtagcgtgtttacatgtgtagcctatgttgtggtccatcagcccctcacattcctaggggtttgagatgctgtaggtggtatgtgacaccaaagccacctctgtcatttgttgtgatgtcttttcttggcaaaagccttgtgtatatttgtatattacacatttgtacagaattttggaagattttcagtctagttgccaaatctggctcctttacaaaagaaataccttgagaaaaaaaa

SEQ ID NO: 351344 - DNA, 2701 bp, Homo Sapiens
  misc_feature (2423)..(2423): n is a, c, g, or t
gagcgaggcctgggtggcgaattcggcacgaggggccgtcggcggaggcgccattttgtgtagccgccgaaccttgttggaggttctggggcgcagaaccgctactgctgcttcggtctctccttgggaaaaaataaaatttgaaccttttggagctgtgtgctaaatcttcagtgggacaatgggttcagacaaaagagtgagtagaacagagcgtagtggaagatacggttccatcatagacagggatgaccgtgatgagcgtgaatcccgaagcaggcggagggactcagattacaaaagatctagtgatgatcggaggggtgatagatatgatgactaccgagactatgacagtccagagagagagcgtgaaagaaggaacagtgaccgatccgaagatggctaccattcagatggtgactatggtgagcacgactataggcatgacatcagtgacgagagggagagcaagaccatcatgctgcgcggccttcccatcaccatcacagagagcgatattcgagaaatgatggagtccttcgaaggccctcagcctgcggatgtgaggctgatgaagaggaaaacaggtgtaagccgtggtttcgccttcgtggagttttatcacttgcaagatgctaccagctggatggaagccaatcagaaaaagttggtgattcaaggaaagcacattgcaatgcattatagcaatcccagacctaagtttgaagattggctttgtaacaagtgctgccttaacaatttcaggaaaagactaaaatgcttccgatgtggagcagacaagtttgactctgaacaggaagtgcctcctggaaccacagagtcggttcagtctgtggattactactgtgatacgatcattcttcggaacatagctccgcacactgtggtggattccatcatgacagcactgtctccttacgcgtctttagctgtcaataacatccgcctcataaaagacaaacagacccagcagaacagaggcttcgcatttgtgcagctgtcctctgcaatggatgcttctcagctgcttcagatattacagagtctccatcctcctttgaaaattgatggcaaaactattggggttgattttgcaaaaagtgccagaaaagacttggtcctctcagatggtaaccgcgtcagcgccttctctgtagctagtacggctattgctgctgctcagtggtcatccacccagtctcaaagtggtgaaggaggcagtgttgactacagttatctgcaaccaggtcaagatggctatgcccaatatgctcagtattcacaggattatcagcagttttatcaacaacaagctggaggattggaatctgatgcatcatctgcatcaggcacagcagtgaccaccacctcagcggctgtagtgtcccagagtcctcagctgtataatcaaacctccaatccacctggctctccgactgaggaagcacagcctagcactagcacaagtacacaggccccagccgcttcccctactggtgtagttcctggtaccaaatatgcagtacctgacacgtccacttaccagtatgatgaatcttcaggatattactatgatccgacaacagggctctattatgaccccaactcgcaatactactataattccttgacccagcagtacctttactgggatggggaaaaagagacctacgtgccagctgcagagtctagctcccaccagcagtcgggcctgcctcctgcaaaagaggggaaagagaagaaggagaaacccaagagcaaaacagcccagcagattgccaaagacatggaacgctgggctaagagtttgaataagcagaaagaaaactttaaaaatagctttcagcctgtcaattccttgagggaagaagaaaggagagaatctgctgcagcagacgctggctttgctctctttgagaagaagggagccttagctgaaaggcagcagctcatcccagaattggtgcgaaatggagatgaggagaatcccctcaaaaggggtctggttgctgcttacagtggtgacagtgacaatgaggaggagctggtggagagacttgagagtgaggaagagaagctagctgactggaagaagatggcctgtctgctctgccggcgccagttcccgaacaaagatgccctagtcaggcaccagcaactctcagaccttcacaagcaaaacatggacatctatcgacgatccaggctgagcgagcaggagctggaagccttggagctaagggagagagagatgaaataccgagaccgagctgcagaaagacgggagaaagtacggcattccagaacctccagagcccaagcgcaagaagcagtttgatgccggcactgtgtatggtgatgtgcactttttcaagttcgtaagctggggccctgctgtnttaagaactgggggggttggcactggcaggaattacgagcaaccccccaagatggcattgaccacagtaacattggcaacaagatgctgcaagccatgggctggcgggaaaggctctgcttggaccaaaagtgtaaggcatttacggtccattgagggttaaggtccgctaaagggaactggcctatgagccaaagcacgatattgggttgtcgggcgcccattcttacaaaattgctgtccgaaaaacactgttttcccggtacttgtatggatggg

SEQ ID NO: 351345 - DNA, 1122 bp, Homo Sapiens
  misc_feature (482)..(482): n is a, c, g, or t
gtgacaagtgggagtgtgtgagcgggtgtctgtcagtcgtttatagcacgaggtggagtggcggtcgtccctgcggtcggcgacggcgggcggctcaaaatgtcgggggctccgtctcttggccgcgggtctcgggtggtgcttcgaaagaggggcggaagtttgtgtccagtaggaaggcgggtgtagggaggccacgggggttgccgaaggcgaataccgcccccagggtgggagagttgttttcataagaaaaatcggatccccgggggtatttccccgcgcttagccctgctcgtgtgtttccagaaggcctttcccgttgagaagtcaaacttttttggttccccatcggaagccatgttagtcttttccctgaaatgtttaaggcagccctggtttccaaagccaattttcaaaactaggttctgggattgctataatgcattgcaatgtgctttcctggaatcaccaactttttntgattggcttccatccagctggtagcatcttgcaagtgataaaactccacgaaggcgaaaccacggcttacacctgttttcctcttcatcagcctcacatccgcaggctgagggccttcgaaggactccatcatttctcgaatatcgctctctgtgatggtgatgggaaggccgcgcagcatgatggtcttgctctccctctcgtcactgatgtcatgcctatagtcgtgctcaccatagtcaccatctgaatggtagccatcttcggatcggtcactgttccttctttcacgctctctctctggactgtcatagtctcggtagtcatcatatctatcacccctccgatcatcactagatcttttgtaatctgagtccctccgcctgcttcgggattcacgctcatcacggtcatccctgtctatgatggaaccgtatcttccactacgctctgttctactcactcttttgtctgaacccattgtcccactgaagatttagcacacagctccaaaaggttcaaattttattttttcccaaggagagaccgaagcagcagtagcggttctgcgccccagaacctccaacaaggttcggcggctacacaaaatggcgcctccgccgacggcccctcgtccga

SEQ ID NO: 351346 - DNA, 461 bp, Homo Sapiens
cttcacccctctccctccaccacactgtgttggtccaaatgatactattctatgaaaccctgagctatagttgtcaaaagtaactatggattgtgattagtcctctgtgggtgcttccttccctcttttttctccctcactctctttctcagtctccactctggtaaatggaaaaggtgatgtcgaagaattgatgcttgcttggactcatgttgtatctgtgactatgctattagctgtctcctttttccttcctatatgggtagaattcttatgacttatgaagttcccttcttgataagtaggttaaatgcacaatgtggtactgttttatagtttctagatggttgtataaagcaaaaagttaatgtggttatgtgtttttaaagaaaataagtgattggtcactaaactctgtccttttttcattattacaatttctctctgttttccaaaaaaaa

SEQ ID NO: 351347 - DNA, 471 bp, Homo Sapiens
  misc_feature (18)..(18): n is a, c, g, or t
  misc_feature (36)..(36): n is a, c, g, or t
  misc_feature (41)..(41): n is a, c, g, or t
  misc_feature (79)..(79): n is a, c, g, or t
  misc_feature (96)..(96): n is a, c, g, or t
cctcccacccaaacgtgntggtcaaaaaggaaaccnaaccnatgaaaaccccggagccaaaagtgtccaaaagtaaacnatggaatgtgaataagnccctctgtgggtgcctcccttccccccctttttcctcccctcactcctctttcctcagtctcccactctggtaaatggaaaaggtgatgtccgaagaattgatgccttgccttggacctcatgttgtatctgtgactatgctattagctgtctcctttttccttccctatatgggtagaattccttatgacttatgaagttcccttcttgataagtaggttaaatgcacaatgtggtactgttttatagtttctagatggttgtataaagcaaaaagttaatgtggttatgtgtttttaaagaaaataagtgattggtcactaaactctgtccttttttccattattacaagttctctctgttttccaaaaaaaa

SEQ ID NO: 351348 - DNA, 823 bp, Homo Sapiens
  misc_feature (19)..(19): n is a, c, g, or t
gtatgggacctacccttanggcctccttcccaaaccctaaatgagatggtttttaacctttttccaaatttgggagaagtatgccgggttagatccattggtttgtaacaccaaccagtgcaaatttcctcatgctatcatataatcaactctgtccccacattaccatgtgctctaacattgtatagacttaaaatacaatgcagaaagttgagagtttgtaggatttactatcaagactgacttctgaaatgcagaaacgtatgtgtttgcatttagaaaacctttaacactccttgtcttagctaatgatcacaagcaagaaaaatttagatcactcagaaaaagaatatgaacaaagctgataaattggatttattcttctttacctaacttttgcagaagttctaccaaagcttcaattgtcttcacctggtcactagagaccgtatctgtaatgacactgaattcctattagatttgagaaaagtgtggtgattttgtagttgagagagctacaaattcaactttctttttttctctcagaagctatctcaattttaaaaactcaaatgttatacagtaagaggtacttgttttttgagaggaaaatttcatgtaaaccattaaaagaaaacaataatgacctgaaatctgcttaccagatttgtatcccacattttaaaacaatgccacagatagggttattttcttaattattttccttagaataagaaatttttgtggtcactgcttagaaaactgcatttgggaataaataattatttcctgaataatgcaaagtaatggggaaaagatgata

SEQ ID NO: 351349 - DNA, 704 bp, Homo Sapiens
  misc_feature (23)..(23): n is a, c, g, or t
aattggaatggccccccccttanggttggatgggcaccccaattacaaaaaaaactgaagggtggctttggatttggacggataaaaataaccccaaaggtttggcctacaaggaaacatacttccagttgcaaaagttgtataaatgattctccctcactttaagggaaactctcatcttgttctcacttcctcttcccacccataaataagcaaacatattctggaaggctgttttctaggggcaactcagtatcagttttgataattcatacaagaaaggcatcatgagccatgccaatcaacaggctcctctctgttctcaggcaaacttcctgtatggactaccttaggctcttccaaacctaatgagatgtttttactttttcatatttggagagtatgctggttagatcattggtttgtaacaccaaccagtgcaaatttctcatgctatcatataatcaactctgtccccacattaccatgtgctctaacattgtatagacttaaaatacaatgcagaaagttgagagtttgtaggatttactatcaagactgacttctgaaatgcagaaacgtatgtgtttgcatttagaaaacctttaacactccttgtcttagctaatgatcacaagcaagaaaaatttagatcactcagaaaaagaatatgaacaaagctgataaattggatttattcttct

SEQ ID NO: 351350 - DNA, 537 bp, Homo Sapiens
  misc_feature (38)..(38): n is a, c, g, or t
  misc_feature (162)..(162): n is a, c, g, or t
gcattaaaatccctatatttaaggtattcagattaacncttaaaatatgcttttctacttttagctcatgtagtcagtgattttctttaaaaaaagtcttaaagcccgtaagacttaaaaactcttcataccttaatgtagaaaacttaataagccttctcnctgacttatgccccaatcccttgagtacttttaatgttaaagtcaagaataaaatgccctttgaaaaaataaaattgaactattctttagttagacaactcattagtacatttactcttatctcccccaccattatatttaggtgttgcattatccctgggatcttttctgcataattgtcttagtagatgctattcttaagtataaggatgcataaataatattggtacaatggaatgaatttaagtgatttaaattctaaatgtacattattttcacaactaagcaaaatatataacgtatccttaaacttgtatttgacaactttttcaactcaagtggatattttacaataaaaatgtgttacctggaaaa

SEQ ID NO: 351351 - DNA, 444 bp, Homo Sapiens
  misc_feature (20)..(20): n is a, c, g, or t
  misc_feature (42)..(42): n is a, c, g, or t
  misc_feature (51)..(51): n is a, c, g, or t
  misc_feature (71)..(71): n is a, c, g, or t
  misc_feature (77)..(77): n is a, c, g, or t
  misc_feature (87)..(87): n is a, c, g, or t
  misc_feature (97)..(97): n is a, c, g, or t
  misc_feature (122)..(122): n is a, c, g, or t
  misc_feature (134)..(134): n is a, c, g, or t
  misc_feature (155)..(155): n is a, c, g, or t
  misc_feature (166)..(166): n is a, c, g, or t
  misc_feature (194)..(194): n is a, c, g, or t
aaaaaaaacttgaattcccnggaaaattggcccaagttgggnaggaaatantaaagaaaagaggaggttgncacctncctggccccnaggtaagggnatccagtgacaagaggttccttccnagttgcccaagnctctagactacttgccttgtncccctcatagnctctgcaccttcccccgggctgttgtancctgcacgttgtggatggtcaataaatgttgaagtgtaattgggttcacccaggataggacacaagcgctttatcccagaaataaagttttgcacttggccagtgtccctcatgcctctggagcttgtggatagggtctattaggaatcaagagcccaagagcaggtaaagtgacagcagtgaaaatgaaacagacaggtatgtatctgaatagaagaacaggatattacttatcaagtgtctcctggct

SEQ ID NO: 351352 - DNA, 452 bp, Homo Sapiens
catccccaggaaacaggcccctataaggctctcttgcagcccgggcactgggaaattcgtttctccttaatggctttcagcaggatcagaccattccctctgccacatctgtgcctgagtgcccatcctggctgtgcatgcatgccgtgtgaacatgccgtgtaacacatgcctgcgcgtgggtgtgttggaggtgtgaagtgtgtccactgtgggcacacgtactgggtctgaggtggtcgcacttgcaggcctgtgttcacctactctgtgctgctgcttttcagacccttctgataaaaggggactcggctggttctattacacattagaacaatatcaaaatctgtaaggaaacaggggcatgggtgtggggtggggggcaaggacagggagggcaacaagaggcaggatgacaactggggaggccttggcacaattcataccaagtt

SEQ ID NO: 351353 - DNA, 421 bp, Homo Sapiens
  misc_feature (344)..(352): n is a, c, g, or t
tagtgaggggcaggtgggtgtgccccaggtccccacacccacagggaggcttcacacactgcccagtaccggggatgccaggaggcaggcccctctgctgctgccactgctgctcttctgacccctgctgtgaggaatgggattcttggtcgaaaaaattggttttccttttttgtataaatgaaaagaatccaggagaagctgccaccctcccctcccagcgtgatgcgctaccttgcttcggcgtcttgtcgccctttccgcctttggtccagggacagcccagcagatcctcctggttctgacctggggggtgtttgcatcacccccttttacttgtattnnnnnnnnntgatgggttgaaaatgtactgaggattaaaaatgtacttttttataaataaagtgtttaaaacaaaaaa

SEQ ID NO: 351354 - DNA, 533 bp, Homo Sapiens
  misc_feature (462)..(470): n is a, c, g, or t
ccaggcctcaggagtccagacagagacccccaaagcctgactgccaacagaaaccctctcctagtgaggggcaggtgggtgtgccccaggtccccacacccacagggaggcttcacacactgcccagtaccggggatgccaggaggcaggcccctctgctgctgccactgctgccaacactgcccagcttgtgaggccaggaggagcccctgtcccactcggtgctgctgctcttctgacccctgctgtgaggaatgggattcttggtcgaaaaaattggttttccttttttgtataaatgaaaagaatccaggagaagctgccaccctcccctcccagcgtgatgcgctaccttgcttcggcgtcttgtcgccctttccgcctttggtccagggacagcccagcagatcctcctggttctgacctggggggtgtttgcatcacccccttttacttgtattnnnnnnnnntgatgggttgaaaatgtactgaggattaaaaatgtacttttttataaataaagtgtttaaaac

SEQ ID NO: 351355 - DNA, 483 bp, Homo Sapiens
caagggtgtacttggcctctgttaaaatgatggttttaggaaaggagctaggtttggacagaatagctatataaagccagcagttctcgtagtattattgctgacatgaccagggaggacaagcagcttagcttctcagatcaaaaacaagtaccagtagttcctgcttaaggctggtaaataatatcttgaaattctcaagttggaaaccagtctcaaacccatttctttgcaagaagttgtatatttagggtcatggttagggctttccagtctaggagtccttccagtggtctgtttcttgatagcatgcttttacagtctgcatggatgtaataacgcttttggtatagtgattgtcttgagtactgcttgactctggtcttgatgcccacaaatggctagcgtgcttgtcttcccctgcagtgggaagggaagacagtttaaatgaaatagttagtatttaggatattttatggaaaa

SEQ ID NO: 351356 - DNA, 423 bp, Homo Sapiens
  misc_feature (363)..(363): n is a, c, g, or t
  misc_feature (395)..(395): n is a, c, g, or t
agctgcctgtccccaaagaggcggaaagcacagccagtcgcctggtctgcgatgccaggtcgccccactccagcacgggggtcaaggtcctggcaattcttgtcgctggctgaggtgggtcaggtggctgggccaggcccccagcgggagctgaaggcggtgctcctggaagctttggggtcacccagtgaggatgtgagggctgcagcctcgtatgcactgggccgtgtgggtgctggcagcctgcccgacttcctgcccttcctgctggagcagatcgaggctgagccccgacgacagtacctgctgctgcactcactcaaggaggccctggggcgcccaagccttgacagcctgaagccntacgccgaggacatctgggcctttgttgtttncagcgttgcaagggtgttgaggagggca

SEQ ID NO: 351357 - DNA, 766 bp, Homo Sapiens
ctacaagaaatgagatcaaataagggaaggatgagtgcatcttcccacccagctctctgaccacccagttccaagctgcgaagattggctccagaaagatagatatagtccaacagcaaaactgacagcaaacatcagccaagcagatgacagctagcctgttaataagcactggtgggtaagtacactgcagagcaggcaatgacactctatgtcctttgatatcagagatagaagaacatacataagtgcaattcatagaatagttatgcctcaaaataaacacatacccaattccatgtcaatctcagctcagaagtcaatggctacgtccaattagagtatgtgtttcccttgtcccttttctaatcaactagacactggagagaagttcgtttcttattagccaccaaaaactgtgcccaggaggttactttgaaaagtttgatccttttttcccccccaatttaaaaacagtggcattttcccaatgatatttgctgttagtatttctggtgccatcatcctgaccaaagaagcaggtcaagatatgatctgatcacagaagaaatagcctgggtttgacatggaacagagctaccggtgaagatgcgtgaatgagataagacagtgggaggacctaagcctttgtattcatgtcctgcctcacagctttgctccaacatggaattactgatagttgaacatgggcatgacattcagaaggaatagaggtggcctactaaagtagcctcgtgccaagctt

SEQ ID NO: 351358 - DNA, 455 bp, Homo Sapiens
  misc_feature (387)..(387): n is a, c, g, or t
  misc_feature (421)..(421): n is a, c, g, or t
  misc_feature (431)..(431): n is a, c, g, or t
aagcttggcacgagggtcttgtcagcagcccggccattggagcatatctttctgccagttacggagacagcctcgttgtgctggtggccacagtggtcgctcttctggacatctgcttcatcttagtggctgttccagaatctctgcctgagaaaatgagaccggtttcctggggagctcagatttcttggaaacaagcagacccttttgcgtcgttgaagaaagttggaaaagattctactgtcttactaatctgcatcaccgcgtttctttcataccttcctgaagctgggacagaattcaagtttttttctctatctcagggcaggtcatagggtttgggatctgttaaaatttgcaggcatttcatagctatgggtaggggantctgtcttattgtggggctcagacggccttttcnttaggcatcnttgatggaggatccattaggggga

SEQ ID NO: 351359 - DNA, 548 bp, Homo Sapiens
  misc_feature (47)..(47): n is a, c, g, or t
  misc_feature (87)..(87): n is a, c, g, or t
tgaatgatgactcttgaggggaaaaagtttactcaggtttgcaggtncaaaatccaaaatccagggctttgggttttgtgcatgggnagacagctgaatgggcagagaaaccagaaggatgctacacccaccatctcatcccatggggatcaggggaccaggattccctgatgcgaagctgctcctctgcccagggacgtcttgatcattacacaaaggcagcccctggagttccattcatggagcctgccgtggagtggagaggggtgggaggactcaggtgtgtgaaatgtatatgttttcaaaggaagcagtgggaggccagttggttttgagttggtctccgcaggcaacatcacttctgggatttggtttactggagccttttttcccatggtgaaggcaggggacatagacaaggagggaggaagctggcagatcccatcaaaggccagagcagacagacctactgcttgaagtaaacattgcaaggaagccaatttgtgcgttcatctcttattaaaacatgtcagtgatggacattgaaa

SEQ ID NO: 351360 - DNA, 988 bp, Homo Sapiens
  misc_feature (124)..(124): n is a, c, g, or t
  misc_feature (128)..(128): n is a, c, g, or t
  misc_feature (860)..(860): n is a, c, g, or t
ttctcttactacgggttagttctactcaccacagaactcttccaggcaggagatgtctgcggcatctccagtcggaagaaggctgtagaggcaaaatgcagcctggcctgcgagtacctgagtnaggnggattacatggacttgctgtggaccaccctctctgagtttccaggtgtccttgtgactctgtggattaatgaccgcctggggcgcaagaagaccatggccctgtgctttgtcatcttctccttctagcagcctcctgctgtttatctgtgttggaagaaatgtgctcactctgttactcttcattgcaacagcgtttatttctggaggctttcaagcggcatatgtttacaaaactgaggtctaccccacggcaacacgggccctcggcctgggcacctgcagcggcatggcaagagtgggtgctctcatcactccgttcatcgcccaggtgatgctggaatcctctgtgtacctgactctggcagtttacagtggctgctgcctcctggctgccctggcctcctgctttttgcccattgagaccaaaggccgaggactgcaggagtccagccaccgggagtggggccaggagatggtcggccgaggaatgcacggtgcaggtgttaccaggtcgaactctggctctcaggaatagtgaccgatgggggactgagctggtctttgaggctgcagagcttgagggggctggcaggccccaactggggcactgattgtcactgccgacatcaagaactcacccaagagtatgacctggaccaacagggttttgtgtcttgactcagtttgctcatcttcattgaggtccacccagggatggggagatgtttgcnctagggggttctctgtatatgtggtgaaagctttgttcataacctgtggatctacatgggaagactacccatattaggagggtctggtaatgccagcaaccaatcaggcaccacccagagtcacccgg

SEQ ID NO: 351361 - DNA, 525 bp, Homo Sapiens
acccggcacagaggccatcacacccttacacaaaaaatatttctgcaaggacaactgcccagcaattgcctgtccaacctcagactggaatgacctttgttattgatgtttgtagccaaggagaattatctcaaaaccactgtgatcctgctcgcttttcctttaaagacctttgtcttccttgacctccctgaataggcatatggtttactatggcgtgtgtactctccttgtaatgttctgttctcaagctaacatctattcttctagagaacctctctcttaggctgacaacgctgtggatctgggctcccaggaactggggctgacatcagaggggtggaaagagaacagcagctctccctgaggggatgcttgccaaggataaggagacgatggttctctaaggattattttatattcatctaaaagggtatttttgttgttacccctagccttttttcccttttaattttctgatgaataatttatataaagaaaacccattctaagtgtgcaaaaaaa

SEQ ID NO: 351362 - DNA, 455 bp, Homo Sapiens
  misc_feature (64)..(64): n is a, c, g, or t
  misc_feature (238)..(238): n is a, c, g, or t
ctttggttaatggatgtttgtaagcccaaggagaaattatcctcaaaaacccactgtgaacccngctcgcttttccctttaaaaaaccctttgtccttcccttgaaccacccctgaataggacatatggtttacctatggccgtgtgtaactctcccttgtaatgttcctgttcctcaagcctaacatcctattccttcctagagaacctctctcttaggctgacaacgctgtggatnctgggctccccaggaactggggctgacatccagaggggtggaaagagaacagcagctactccctgaggggatgcttgccaaggataaggagacgatggttctctaaggattattttatattcatctaaaagggtatttttgttgttacccctagccttttttcccttttaattttctgatgaataatttatataaagaaaacccattctaagtgtgc

SEQ ID NO: 351363 - DNA, 463 bp, Homo Sapiens
  misc_feature (31)..(31): n is a, c, g, or t
  misc_feature (75)..(91): n is a, c, g, or t
  misc_feature (107)..(107): n is a, c, g, or t
caacatggcaacatgccatacctatgttaanaaacctgcacgttgtgtaacatgtacccctagaactttaaattnnnnnnnnnnnnnnnnntctcaggagttggtgnagtgaggtcaagcatgcacactacgaggcaaagtggcaaagtttaaccagcgtgtgaccttcccctaggaactggtaagggaagactgcctcaagagggcaccgcacaactccagtaaacacactgtgcacgcggccctcccaagtgtcggcaggccactgcgcatgcggacagcccaccccaagggaagaatcaggggagaagggacgcagcccccagaagcatgccaagatataaaccccaagtcaaaggtcaaaaccgtgtacttgctctctcaagatgcccacctggccctcctccaagtgtactttatttcctttcgttcctgctctaacacttttttaataaactcctcg

SEQ ID NO: 351364 - DNA, 450 bp, Homo Sapiens
  misc_feature (63)..(63): n is a, c, g, or t
  misc_feature (71)..(71): n is a, c, g, or t
aacactccactggaaacaacactgaaagtggtttaggtccccaagggcctgttaggccagagnctcccccnaatcccatctgccagaggtgtttccaggtggaaggaagtggagaacagcccttcctcctgcctcccacactgtcctccagcaagggtttcctgtatcctgtgcattgaggattaaattattcacatgggtcagagaagccccatcacccactgatagttattgtaggtatggaaaactaacgactaagaagggagaaaaatataccaagcagttggcttggctgaacacaagtaaagactcttacagtcactggtgtgaactgcttattatcaatgtctgattacagtgctgcatactaatgattatgcatgtcattaaatgtgtcagattaactttgttataaaatttatgacaacattaaattttattcacatgaaa

SEQ ID NO: 351365 - DNA, 551 bp, Homo Sapiens
aagcttggcacgaggtggcacgagggaaacactctgggtctctgcttgatcagtgtcccctctaaactgcacctcactacagtagggatggcataagatacttctttacacagcatctttttgttcccacctcacccccagagctgtaataggtagagccagccaaatgtcaaagggatgatttgtcttgtcaccactagtttcccttttctctgccttgtatgtaacaggaatattctttagttcctccttatgttctaaagcacctccccaacctaaaaatagaagaggagttgtggggtcatttacactttagtgtgaatttgcccttgtgactttgccaaggctgttgtgcctaaccctttcaatctaacagcagaatgagagtctctgggactatccggggtccttcccggagaagaatgaactgggaattgttggtctagacatcaagactaccagagacctattgctcagagatgtttgggctgtacaatttctgtagatatggcatctggagcagccttttctaagcaatggcattatcattc

SEQ ID NO: 351366 - DNA, 1471 bp, Homo Sapiens
aagcttggcacgaggcgagcacgaggtcaagcggctcaagcaggagaattataagctgcgggatcagaacgacgacttgaatgggcagattttgagcctcagcctctacgaagcaaaaaacctctttgctgcccagactaaagcccagtctctggctgcggagatagacaccgcctcgcgcgatgagctaatggaagccctgaaggagcaggaggagatcaacttccggctgaggcagtacatggacaagattatcctcgccatcctggaccacaatccctccatcctcgagatcaaacactaaggcacggggctggctgcagagcgtttaagggaccctgggaccaagggcagaccctgcccaaggatgcaggcctaagccgggccttcacactcacactgtaaatgtctctctggccaccatgcgttacgtgtacccgtgtatatgtggggaggctgtgcacacgagcgaggggtgagtggccgtggctgtgggcagcatccacacggttagccgtgcatgcactttgtggcccctttgcaaggggcagagggtactggaagtgggaggaggcaaggtctgctatcaggagttactgtaaaaacaagaactggaagctcgtgtttccggtactgggtaaaatgattctacctctggggataaggattcacattcgctctagtacgatgggctctttcaccccactcctagtccccttggaagtgggagcaaaattgtgatctttcctaggagtttgaatgccccatatttgtgtcctcgccagctctttggccacctttcaagccccagtgttcaagctcagagaggatgaaggggcatctgggagggtccatgagatggggccctcaccaaatgccttggccaccggccagcagccctctgtgatgtgtgtgcagagtgaacagaggactcaggtttcatagcagctagtgcggggcatcctcatcctgtacctatagagttcgtgcactcccccatccatgctacctacctccccgtttctgtttcagttttaagacaatgaagcagcattcactgcgtcattgtaacatgaagggataaaaatgaaggagaaggagggtttggggatggggtgtctaaggcaggagttgacatcgggcaaccaaagaaatgagtttttgggggagggaacacaactccccatccccagtcagttttcccttcccatgggctggcatctttaagatggaatgcaccggaagaaaaaccgttctggcctgggctcccctggcccttcatttctcccacggcaagccctggggggaatgggcaaggggccctggggtttttgggaattttccagaaaacccccaggccttcccggggcgttcccaacttccaggggggggcaaaccccaaaaaaactggccttttcgcttttccccaacgggtttttagcaaaacccccgccccgtgggaaaattttgg

SEQ ID NO: 351367 - DNA, 437 bp, Homo Sapiens
  misc_feature (20)..(20): n is a, c, g, or t
ttttcccccttccaggttcngggttctttcttgggtatatgacaatgagattgtcaatgctttttagggcacactgcctcctcctaacagaaatatcaccttaccctttgtgattaatggtacaatccataatagatatgatgaatccaaatgtggtgagggggagggctttatatctttttcatatcttttttgttttcttgttgcttatgatctgatgtgtgtcttgtcatatacagaaaaaaaatattttgggtggtattttcaaaaatttgtttagattttgcatgattctaatgaaaatatttgttttatatttaatgtcagtaattgtagtttctattaaagaatatcaatttaacaataattcatcaatatatacttagaaaatagcttaaaaagcagtgacctgaataaatatattcattcattataaa

SEQ ID NO: 351368 - DNA, 461 bp, Homo Sapiens
  misc_feature (22)..(22): n is a, c, g, or t
  misc_feature (32)..(32): n is a, c, g, or t
  misc_feature (56)..(56): n is a, c, g, or t
  misc_feature (98)..(98): n is a, c, g, or t
  misc_feature (127)..(127): n is a, c, g, or t
gggtaccggccaacattccccntcccttgaangcccagcattacctaaagcatccngaaattaaacaaaaccctcccaatccttaggaaacaagattncagaacctaccccggattaggtgaatccnccgacaagaaaagtatcctgtgcattgccttaatcctgggggtttaacatttaacttttttaaaaaagaggcaaagatttataactccctagtgccctacaatggtgtccaatactcagtaaataataagtatctattgaaagaatgccatagaacagatcagactgagatgagagaatgtaagagaaatacaccacaagagatcaaagcactgatcttatagaagacaaaaatcagacataaaagtaaaaagaaaatgcaaactaggataagagaaaatcattaaaagcataggaaagccagtgaaagagaatactaccctcgtgccaagctt

SEQ ID NO: 351369 - DNA, 110 bp, Homo Sapiens
accataactgaattattttatctcttatgttaacatgagaaatgtatgccaaatgattagttgatgtatgttttttaatttaatatttaaataaaatatttggaaggaaa

SEQ ID NO: 351370 - DNA, 1342 bp, Homo Sapiens
  misc_feature (20)..(20): n is a, c, g, or t
  misc_feature (132)..(149): n is a, c, g, or t
  misc_feature (207)..(231): n is a, c, g, or t
  misc_feature (785)..(807): n is a, c, g, or t
ggtccaacaagaacacctgnacttgggtgaagttgtgcaatattggaggctgactgtagggctgggcagctgggagacaggctcatggctcatggctcatggctcagggcggtgcctgccctgggccgggannnnnnnnnnnnnnnnnnacctaggctttttgggttttgttcaaggaaggtaaagtgagaggtttaggtcaggtgnnnnnnnnnnnnnnnnnnnnnnnnnaaagcaaatcctgtatatgtatctacatgggagacaggtagacactacttatttgttacattttgtactacacgtttgtgttccaggtttcagcttccctcgctcctgttgttaagaagcgtccctgtcagcacaggtgtgcattgaggaaggggccccagggccttcgctccctcagcactggggtggaggcggcaggaaggggcggcccttacctggcaggtctgggcgcacctttagcaggtggactccgtggggctccaccagccagaagcctttggaaggcaacgaaggcaatgctgctccctgagtccagtccccgcccccaaacccagcccaggtgccttcagctacttcggcttcttaaaccctgcagtgttaaacagaggcattgagaaaggggaaaggcgggtatttttaaaagccaaagattgacccagttacttgagggtagggaggcgggcccagtgcaggaggctgcatccctggcctgctggtgcccaccgggggctgtgcctgtgccgggccgcagggaagctggctgcccccattcnnnnnnnnnnnnnnnnnnnnnnnctgtggctgtttcaaagactgggcgaaaggctgtccggagggcagaccaggtgccttgccgcagagaaaacaccaaagtctcctgttcgctcataaagaagtttttgggatgggagagaatccagaccatcttggggcagccaggcccttgccttcatttttacagaggtagcacaattgattccaacacaaaactccttcccctttttaaaatgatttctgttctaatgccatagatcaaaggcctcagaaaccattgtgtgtttcctctttgaagcaatgacaagcactttactttcacggtggtttttgttttttcttattgctgtggaacctcttttggaggacgttaaaggcgtgttttacttgtttttttaagagtgtgtgatgtgtgttttgtagatttcttgacagtgctgtaatacagacggcaatgcaatagcctatttaaagacactacgtgatctgattgagatgtacatagtttttattttttagccataagtgaattattttatctcttatgtgaactacc

SEQ ID NO: 351371 - DNA, 1105 bp, Homo Sapiens
  misc_feature (53)..(94): n is a, c, g, or t
  misc_feature (327)..(350): n is a, c, g, or t
  misc_feature (358)..(358): n is a, c, g, or t
  misc_feature (407)..(424): n is a, c, g, or t
  misc_feature (967)..(994): n is a, c, g, or t
gagagactatggggtggccgttccaaaagggggtttttgggggtggttggaannnnnnnnnnnnnnnnnnnnnnnnnnnnnnnnnnnnnnnnnnaccttgcccaggtaaggggccgcccctttccttgccgccttcccccccagtttggaaaggagggaagaccctgggggcccctccctcaatgcgcacactgtgctgacagggacgctcttacaaccaggagcgagggaagctgaaacctggaacacaacggtgtagttcaaaatgtaccaaataagtagtgtctacctgtctcccatgtagatacatatacaggatttgctttnnnnnnnnnnnnnnnnnnnnnnnncactgacntaaacctctcactttaccttccttgaacaaaacccaaaaagcctaggtnnnnnnnnnnnnnnnnnntcccggcccagggcaggcaccgccctgagccatgagccatgagccatgagcctgtctcccagctgcccagccctacagtcagcctccaatattgcacaacttcacccaagtcaggtgttcttgttggaccccatcatgaaatgcataaacgtcagcagcagcggaaacgggaggtgcagcaggaagaagcttctgggcttccgcaagggcacgcaggggctcagggccaagtgaccctcaggacggagtccccagcactttgaagtcacctctgccctctctgaggttcttcctgccgttcctccgcagagtcctggaaaactaatccttgagcagtttatgaaacttctcaactaaaataagaaaaaaaagtcttccaggttttgatttcaggggagagaattcctagaatctgtagatgatctttgcctgggctgctttaaaactgatacatgaagcagaaagttcacagttttccttaaagcagaaatcaggaagtggagagcgttgactaaagaaatggatagtaatcaatgtacgcgnnnnnnnnnnnnnnnnnnnnnnnnnnnnagcggacaacaatgcgcccgctcgtttccgtagacgtccgaggtaatcatctcaaccacgacgaacccagagagaggggccgagcctcgtgccgaattcgccacccaggcc

SEQ ID NO: 351372 - DNA, 1158 bp, Homo Sapiens
  misc_feature (111)..(138): n is a, c, g, or t
  misc_feature (682)..(698): n is a, c, g, or t
  misc_feature (755)..(779): n is a, c, g, or t
  misc_feature (1052)..(1052): n is a, c, g, or t
ggcctgggtggcgaattcggcacgaggctcggcccctctctctgggttcgtcgtggttgagaaattacctcggacgtctacggaaacgagcgggcgcattgttgtccgctnnnnnnnnnnnnnnnnnnnnnnnnnnnncgcgtacattgattactatccatttctttagtcaacgctctccacttcctgatttctgctttaaggaaaactgtgaactttctgcttcatgtatcagttttaaagcagcccaggcaaagatcatctacagattctaggaattctctcccctgaaatcaaaacctggaagacttttttttcttattttagttgagaagtttcataaactgctcaaggattagttttccaggactctgcggaggaacggcaggaagaacctcagagagggcagaggtgacttcaaagtgctggggactccgtcctgagggtcacttggccctgagcccctgcgtgcccttgcggaagcccagaagcttcttcctgctgcacctcccgtttccgctgctgctgacgtttatgcatttcatgatggggtccaacaagaacacctgacttgggtgaagttgtgcaatattggaggctgactgtagggctgggcagctgggagacaggctcatggctcatggctcatggctcagggcggtggcctgccctgggccgggannnnnnnnnnnnnnnnnacctaggctttttgggttttgttcaaggaaggtaaagtgagaggtttaagtcagtgnnnnnnnnnnnnnnnnnnnnnnnnnaaagcaaatcctgtatatgtatctacatgggagacgagtagacactacttatttgttacattttgtactacacgtttgtgttccaggtttcagcttccctcgcctcctggtgtgtaaaaaacgtccctttcagcacaggtggtgaatttgaggaaaggggccccagggccctttccctccctcaaaaactggggggggaggcggcaaagaaagggccgcccctttacctggggaggctaggggcgacaccttttaacagaggggactctcctnggggcgtcaccccagcagaaaaggcttttttaagagccgaaccgagggggaattcgtctttccctacgaagaaaaagccccgcccacaacaaaacaaaggaccaac

SEQ ID NO: 351373 - DNA, 515 bp, Homo Sapiens
  misc_feature (188)..(188): n is a, c, g, or t
  misc_feature (191)..(191): n is a, c, g, or t
  misc_feature (193)..(193): n is a, c, g, or t
  misc_feature (201)..(201): n is a, c, g, or t
  misc_feature (407)..(407): n is a, c, g, or t
  misc_feature (423)..(438): n is a, c, g, or t
  misc_feature (443)..(443): n is a, c, g, or t
  misc_feature (451)..(451): n is a, c, g, or t
  misc_feature (466)..(466): n is a, c, g, or t
  misc_feature (492)..(492): n is a, c, g, or t
aagcttggcacgaggtttggcagatagaacactgcacacagaaatgttttttcacttcaaattctatcctctttgatacttgattttttaaaaatactgttcagaatgctttaataagctcagcttgagcattaccatttccaggacactttccatgaattgttgagaagctccccatcccccgcctnttntntttttttntttaactgctgctatctgcagctggatactcttctttaaaaatgtttaaaaattatttagattgattctccccaaatgtggatgaactgagaccctccatcagccagagtcttatggggatcttcacttcacatgtttgtcttaggtttacctttcacaggaagggcaggggtaacttgctggcagggaaacgttttgggtgtatnaaaattaggaatcacnnnnnnnnnnnnnnnngaggngggagttntcactctgtcacccngggtgggagtgcagtgggtgtgatcntgggctcactgctggcaacctcc

SEQ ID NO: 351374 - DNA, 546 bp, Homo Sapiens
  misc_feature (180)..(217): n is a, c, g, or t
ggctgccaagacaccagatgccaaagctgcccccacccccatctcccttgctcatttggatgcgtcaccttaattctcctgctgccaccgtctttgattcaccgggatgtacagtttacagttgaagagcaaacagaaaggttttctcttggtgggatatgcagaacttgggatgtgtgnnnnnnnnnnnnnnnnnnnnnnnnnnnnnnnnnnnnnnctgacttaaaaaatcaaatcccccgacatacgttttttttaatctgtgccaaaaatgtgttttcagaggaaatcttattttcatattcagactttgtattgcccactcatttgtataagtgcgcttcggtacagcacgggtcctgctcccgcgatgtggaagtgtcacacggcacctgtacaaaaagactggctaacccctcttcctattaccttgatctcttcccccaacttcctaacacttattaatttatgaaactgtttttctcagcgcagttttgttttgtgtgtccattggattacaaactttattaaaaaatataaaacaca

SEQ ID NO: 351375 - DNA, 424 bp, Homo Sapiens
  misc_feature (397)..(397): n is a, c, g, or t
  misc_feature (400)..(400): n is a, c, g, or t
ttcatgattacgccaagcttggcacgaggcccagctggacctgcaaacaggccacctgagcctcacacccaggttcagagggcacaagcagaaacaggcccgacttccttcccctcccctgtgtctgtctccatgaagcctgaccttccagtctctcttcccactcagactgccccaaaacagccgttgtttgtcccaacaacctctggccccagcaccccaccaggactggttctgccacacactgaattccagccagcccccaaacaagattcctctccacacctgacttcccagagacccgtggatatggttcaacttctgaagaagtaccccatcgtgtggcagggcctgctggcctccaagaatgacacagctgctgtgcagtagccacttngtntctggcaacaacgtcctgggccat

SEQ ID NO: 351376 - DNA, 1579 bp, Homo Sapiens
aagcttggcacgaggctggaagaattcgcggcctgggtctagttggcggcggggtcgggtccgcgcgagccgcgatggagctgcacatcctagaacaccgggtgcgggtgctgagcgtcgcccgtcccggtctctggctctacacccacccgctcatcaagctgctcttcctgccccgccgcagccggtgcaagttcttcagcctgacggagacccctgaggattacacgcttatggtggacgaggagggctttaaagagctgcccccatctgagttcctgcaagtagctgaggccacatggctggtgctgaacgtgtcgtctcacagcggtgcggcagtgcaggctgctggggtcaccaagatcgcccgttcggtcatcgcgccactggccgagcaccacgtgtctgtgctgatgctgtccacttaccagacggacttcatcctggtgcgggagcaggacctgtccgtggtgatccacacgctggcccaggagttcgacatttaccgcgaggtgggcggagagcctgtgcctgtgacgagggatgattccagcaatggctttccccgcactcagcatgggcccagccccacggtgcatcccatccagagcccacagaaccgcttctgtgtcctcacactggaccctgagacgcttccagccatcgccaccaccctcatagatgtcctcttctactcgcacagcacccccaaggaggcagcctctagcagtcctgaacccagctccatcacgttctttgccttctccctcatcgagggttatatctccattgtcatggatgctgaaacacagaaaaagttccccagtgacctcctgctgaccagctcctcgggggagctgtggaggatggtgcgcatcggtggacagcccctgggctttgatgaatgtggcatcgtggcacagattgcaggtcccctggctgccgctgacatctctgcctactacatcagcaccttcaacttcgaccacgccctggtgcccgaggacggtatcggcagcgtcatcgaggtcctccagcggcggcaggaaggcctgggcttcctgaggcccaagggccaacagaacaagcctccctgctctccccctcaacccaggcttccaaagacttctctaagctatttccttaagctctggaacgagccccctgttctgctggggaccctcgttccgctctctgtatgtaagctgcgtgcaggcaccggcttttacgcggacacctgtgtacactcacaggtggagtgggcaggtgctagcctgactgcgtgtctgcccatgcaggggaacacggtgctcggggcttaagcccccaacccatcactccctgcgcagcctcggcgtttgcacagtccctgcctgaggcctgagccattccccaaaggcttcctgggccagctgcccccctgacctccgttctgcctctggtggggttgccttccctggccaggtgagtcctgacagtgcctctccctcctggggcctccaaggaaagtattttgacatctctctctcttctgtttttattgacttgttaataaaggactttgtagtgacaaaaaaaa

SEQ ID NO: 351377 - DNA, 1733 bp, Homo Sapiens
  misc_feature (1098)..(1098): n is a, c, g, or t
  misc_feature (1115)..(1165): n is a, c, g, or t
  misc_feature (1176)..(1176): n is a, c, g, or t
  misc_feature (1185)..(1185): n is a, c, g, or t
  misc_feature (1236)..(1236): n is a, c, g, or t
  misc_feature (1243)..(1243): n is a, c, g, or t
  misc_feature (1248)..(1249): n is a, c, g, or t
  misc_feature (1255)..(1255): n is a, c, g, or t
  misc_feature (1258)..(1258): n is a, c, g, or t
  misc_feature (1301)..(1301): n is a, c, g, or t
  misc_feature (1308)..(1308): n is a, c, g, or t
  misc_feature (1330)..(1330): n is a, c, g, or t
  misc_feature (1338)..(1338): n is a, c, g, or t
  misc_feature (1347)..(1347): n is a, c, g, or t
  misc_feature (1349)..(1349): n is a, c, g, or t
  misc_feature (1352)..(1352): n is a, c, g, or t
  misc_feature (1354)..(1354): n is a, c, g, or t
  misc_feature (1373)..(1374): n is a, c, g, or t
  misc_feature (1408)..(1416): n is a, c, g, or t
atggaatcagtgtgagtggctttcccctgtccagtccttttcggcaggtcgttcggccccgagtggagggcaaacctgtgaacccacccgagagcaacaaagcaggcgactacagccacgtgaagaccctggaagctgtcctgaatttcaaatactctggaggcccgggccacactgaaggatattacaggaatctctccctggggctgcatgtagaagtcgagccgtctgtatttttcacccgagtcagcaccctcccagcaaccagtacccggcagtgtcacctgctcctggatgtcttcaactccaccgagcatgagctgaccgtcagcaccaggagcagcgaggcactcatcctgcacgccggcgagtgccagcgaatggctattcaagtggacaagttcaactttgagagtttcccggagtcccctggggagaaggggcaatttgcaaaccccaagcagctggaggaagagcggcgggaagcccgaggcctggagatccacagcaagctgggcatctgctggagaatcccctccctgaagcgcagtggcgaggcgagtgtggaaggactcctgaaccagctcgtcctggagcacctgcagctggcgcctctgcagtgggatgtgctggtggacggacagccatgtgaccgcgaggctgtggcggcctgccaggtgggcgaccccgtgcgcctggaggtgcggctgaccaaccggagcccgcgcagcgtagggcccttcgccctcactgtggtccccttccaggaccaccagaacggcgtgcacaactacgacctgcacgacaccgtctccttcgtgggctccagcaccttctacctcgacgcggtgcagccgtccggccagtcggcctgcctcggggccctcctcttcctctacacgggagacttcttcctccacatccggttccacgaggacagcaccagcaaggagctgccaccctcttggttctgcctgcccagtgtgcacgtgtgtgccctggaggcgcaggcctgagcccgcctacttccgtccctctttctgcagggccagaggtgaccctgcctggcctcccacaccccctgcaatgagcaaggcnttaactgcagccccatnnnnnnnnnnnnnnnnnnnnnnnnnnnnnnnnnnnnnnnnnnnnnnnnnnntagcatctttnctggctacncaaaaaccccgaacatggcagccccaccccatgccacgccccttcctaaantgttccntgaannatacanaanctaaagcaaaaaaaatcccaaagcgggtgcccatccagcccangtcccanaatccctgcacccatttctttnacctgganccccaaccntnctntnctactcatcccagcaaagnnacctccctcgtccagcaacttccctttggccatnnnnnnnnntggtgagcatgagactgggcacaacctgagggcgtgggcaacttcccaccctccctgggccttggaatcccccaaggctggttttcttcctggagacccccatggccaacttggcaggagagatggtcccgtaggaggtcgtggatggttgatgccaagagaggccctccacccgtggtggccaaatgtccaggcctgggctgacaacccagggctgtttctgggtcctccctgcccccagggtggcgtctggttaccatggctgtgtgtgtccatgtctccaaacagttcttcaataaatggcctgcctccccaaa

SEQ ID NO: 351378 - DNA, 884 bp, Homo Sapiens
aggatggggaaccctgccctctctgtcagacacctgtccttccttctacagaccatgctggacttcttgtcggatcaggaaaagaaagatgtggcccaaagcctagagaactatacgtccaagtgtcctgggaccatggagcccatcgccctccctggcggcctcaccctgccaccggtgcccttcaccaagcttcccatcgtcaggcatgtgaaactattgaaccttcctgctagcctccggccacacaaaatgaaaagcttgctgggtcagaatgtgtcaaccaaaagtcctttcatctattcaccaattatcgcacacaaccgtggagaagagcggaacaagaaaatagatttccagtgggttcaaggagatgtgtgtgaagttcagctgatggtatataacccaatgccgtttgaacttcgagttgaaaacatggggctgctcaccagcggagtggagttcgagtctctccctgcggcgctttctcttccggctgaatctggtctgtacccagtgacgctcgtcggggtcccgcagacgactggaacgattactgtgaacggttaccataccacggtcttcggtgtgttcagtgactgtttgctggataacctgccgggaataaaaaccagtggctccacagtggaagtcattcccgcgttgccaagactgcagatcagcacctctctgcccagatctgcacattcattgcaaccttcttctggtgatgaaatatccactaatgtatctgtccagctttacaattggagaaagtcagcaactaatcattaaattggaaaatattggaatggaaccattggagaaaccggaggtcacctcgaaagttctcaccactaaagaaaaattgtatggcgctcgta

SEQ ID NO: 351379 - DNA, 558 bp, Homo Sapiens
  misc_feature (20)..(20): n is a, c, g, or t
  misc_feature (25)..(25): n is a, c, g, or t
accctaagccactgtttggncctanttttggtgtgccaattatacccaatagtaacatccggatatttaagaatggacaaaaaataggggtatccgttggaaatttaaaagtgaacaatggagccacacttaaacagtggtcctgtggtatcctgaggaaactttaagatgaacagaaagcccactgttttatgagtcccaccccagtaagctgttacaacccaactaactaccttttcatgtttgttttgtgtgttgaatagaggtttgtgagcatcagaacgtcttataggttaaaaacaataaaaaaccattttgaggaagtggcgtctccacaaacactgtacacccagacaacgcggcatttgtgttacactagcacccgactgtgtgccaacactaatgtaatcggcacaactggggtgtggttccttcccagttaaaagagctatattacagaatggatcactgttgcagaccagtcaacacaatattcaagtaacaaggtgtttaaatggataagtgaaaaaaattttacctaaccctcgtgccaagctt

SEQ ID NO: 351380 - DNA, 479 bp, Homo Sapiens
gtacccgttgaaaaatttaaaaagtgaacaaatggaagcaaccaccttaaaccagtgggtcctggtgggtatcctgaaggaaaactttaaaatgaaacaagaaaagcccactgttttaatgaagtcccacccccagtaagcctgttacaaccccaacctaactaccctttccatgtttgttttgtgtgttgaatagaggtttgtgagcatccagaacgtccttataggttaaaaacaataaaaaaccattttgaggaagtggcgtctcccacaaacactgtacacccagacaacgcggcatttgtgttacactagcacccgactgtgtgccaacactaatgtaatcggcacaactggggtgtggttccttcccagttaaaagagctatattacagaatggatcactgttgcagaccagtcaacacaatattcaagtaacaaggtgtttaaatggataagtgaaaaaaattttacctaac

SEQ ID NO: 351381 - DNA, 2647 bp, Homo Sapiens
aagcttggcacgaggctcacgcagaggatgccaggcagggtgaggatgggggagtagataccgcttatgcagtggctcgcactgctgtggccactcctgaccactgaggctcccagcggaaggtgttcacagccagatcccgggccacgaagctcccttactcgaagttctccttcagcatagattagacgtgatccactttgctttcttgcttctcacctcgcccccttgcacattgcctgacaccctcatattggccagctgtaatctcgtgactatgggactgaggctcaatcttggcttggggtgtttgaatgtctatagcaaaggaattcataatgggaaatctttttcatttgaggaattgtatgatatttattggttgtgtctactgccaacatttatatccaattctaagatttctgaaaaaaaattcttatcccttgctgctcagaaaaagtttacggaaaacaccagttcactaaaagcaccgaaatctgcaaagcctgtcttccgctagaacaacgtctacaaatgtgaagatgatgacttctggcacgcggtcatgagggtggggaatggcactaggagctgatgtttgcctcatttaaagtaggcaagccgagccaactgcagccatcattcattaagttttgggtagtgctctaatggtttgttcactttaataaagacagattttggtaaagtagaatatttttcattctgagcatgtttgtcccaaaaggtgatgcacttaagctgacagtcccttcagtggttttgttaggtcacggcttgtcctgtctggattctgcatctggaagcgctgcatgctctcagaggagcgtgccgtttcccctgtagatggatacttttgttttgttgcctatttaaaaacaattaagtggttatttgcagttatttcagaactccaagtaagtggatggctttgggttctttctgccttggtcccaatggtgttgatgcttctgtggagcgcggacattcccaggagcaggtgcgtgccagccatggctgccagacactgctgcaactgaccagctgccggaagattctggagccactaacattagttttgcacatattttcttgggagtgttacttgaatctatctcaaactgcagaaaaaatcaaaagatcaataattgggagaaaaagagacaaatttaactgttacataattttagatagacaaaaaacatgagtgagtcgtgtacataaggagggaacatggtacagaaggctagaaggaattataggtcttattcccctttcctcagtcctttgaagagaagtacagtctcttgcgattttgtatatatcgtgttcgacacagccgctctctgtcctgtaaatagggaactaaaggctgtatgatttctcaagtgctgagttacacagtcctgagtgagctttctgttaccatactttcacacgtgggctttatttctcactgtatgtttgatatgatattactgtatttattttaagaaagcactaagatgtaataaagtgatgaactaatttgctttacattgaatcgtatgtgtgaggttgctgtggctcatttcgctgaccaggcgacaccaactccttgctttataggagtttcacattgttctttaccatggccctatcgaagtcagtggaattggattctttttaatgaagagctagaaaatatctggcatagagctggaaaattgcattcccatgggacgtctgaatcaattctggattttctccatggaatgagtcagtgtgtggaacatcctgaaacttgtccttaagcgtgtagttttcactgttcgttgcgagtaagcactaatgtggcatggacattcctgatgtcccaagtccccaggccagtgttcgcctaatgattgacagaagcgtccctgcgttcttcatgcttggacacagcaacccttttaattagtcttgaaaagtttcagacacaggattaattttcgtggtggtgcttttgggcctttctggcttgggtggtggtaaagtcatgattttgcagttgataacactgacttataactctgtttatcaatgtctcctatattcaaagcccctgcagtggtatttgtgtctcgttgcaaatttctttcagcggaaagcttgcacaactttcgttgtgtctcagaattctaaccttgttatttaagacaagctgctctacccatttaggatataactttgtaaagaaagtgtaaaccaaatgattcaatgtatgatgaagtttatgtgtaaatccttggtaatgctagaattctgggagcccagaagggttgaaagagaaatgaaacttgcgtgagtcccattattttacgcatgtatgtgcagatacgttctacccacacgtgtgcgtgcacatggctgtgtgcgtgcaccaaagatggactgctttccatgtgtccttttgactttctgcacgtgtccacgcggtgcagtctcttagcagacttcaggcccaaactgtattcttcactcaggcaaaattgaaaagtggaataattctaaattacttctaggttatacttttacctccctgaaattgtagttgtcacttggagggcaaaatatttattgaaataaaattttctgttaaaaattc

SEQ ID NO: 351382 - DNA, 1677 bp, Homo Sapiens
tgcgagtgtgaaggaggtggggtccagctcctcagatgtctcgggaaaagagagcgtccccgtggaggagcctctgaggagcagggccagcctcattgaagtggacctctccgacctgaaggcccccgacgaggatggggagctggtaagcctcgatggctcggcggaccttgtcagcgaaggcgaccagaagccgggggtcggcttcttcttcaaggatgaacagaaagcggaagatgagctcgccaagaagcgggcggccttcctcctgaagcagcagcgcaaggccgaggaggcccgcgtgcgcaagcagcagctggaagcggaggtggagctcaagcgtgacgaagcccggcgcaaagctgaggaagaccgggtgcggaaggaggaggagaaggcgcggcgcgagctcatcaagcaggagtacctgcggaggaagcagcagcagatcctagaggagcaggggctcggcaagcccaagtcaaagccgaagaagccgcggccgaagtcggtgcaccgggaagagtcgtgcagcgactccggcaccaagtgctcctccacccctgataacttgagccggactcagtcaggctccagcctgtccttggcctctgcggcgacgacagaacccgagagcgttcattccgggggcacaccctctcagcgagtggaatcgatggaagccctgcccatactgagccgtaacccaagcaggagcacagaccgagactgggagaccgcgtcggcggcatcttccctggcctcagtggccgagtacacaggtcccaagctctttaaggagcccagtagtaaatcaaacaagccgattattcacaatgccatatcccattgctgcctggctggaaaagtgaacgaaccccacaagaattccatattggaggagctggagaagtgtgatgccaatcactacatcatactgtttcgtgatgctggctgccagttcagggcgctttactgctactatcctgatactgaggaaatctacaaactcactggcacggggccaaagaacatcaccaagaaaatgatcgacaaactgtataaatacagctcagaccgaaaacagtttaacttgatcccagccaaaaccatgtctgtcagtgtggacgcactcacaatccacaaccacctgtggcagcccaagcggcctgccagacactgctgcaactgaccagctgccggaagattctggagccactaacattagttttgcacatattttcttgggagtgttacttgaatctatctcaaactgcagaaaaaatcaaaagatcaataattgggagaaaaagagacaaatttaactgttacataattttagatagacaaaaaacatgagtgagtcgtgtacataaggagggaacatggtacagaaggctagaaggaattataggtcttattcccctttcctcagtcctttgaagagaagtacagtctcttgcgattttgtatatatcgtgttcgacacagccgctctctgtcctgtaaatagggaactaaaggctgtatgatttctcaagtgctgagttacacagtcctgagtgagctttctgttaccatactttcacacgtgggctttatttctcactgtatgtttgatatgatattactgtatttattttaagaaagcactaagatgtaataaagtgatgaact

SEQ ID NO: 351383 - DNA, 426 bp, Homo Sapiens
  misc_feature (16)..(16): n is a, c, g, or t
gctttccttaaaaatnaaatacgggaatatccatatccaaaccatacagtgaagaaataaagccccacgtgtgaaagtatggtaacagaaagcctcactcaggactgtgtaactcagcacttggagaaatcatacagccctttagttcccctatttacaggacagagagcggctgtgtcgaacacgatatatacaaaatcgcaagagactgtacttctcttcaaaggactgaggaaaggggaataagacctataattccttctagccttctgtaccatgttccctccttatgtacacgactcactcatgttttttgtctatctaaaattatgtaacagttaaatttgtctctttttctcccaattattgatcttttgattttttctgcagtttgagatagattcaagtaacactcccaagaaaata

SEQ ID NO: 351384 - DNA, 486 bp, Homo Sapiens
  misc_feature (30)..(31): n is a, c, g, or t
  misc_feature (35)..(35): n is a, c, g, or t
ctgcatgtgactagcatcactgtggaaatnnatgnctctgttcttcacaagaatgtagtaagtggttaaactgagctatcccccacctgatgactattggccatccatttgcaagagccaatggccctggattaagggttaggattatttgtagcctagaaggtaattttatttctgtgaaactaattggctcatatttgaggttaggtgtggccttgaccttaccagtacatttatacccactaccagttgactagcccagataattgttaaatggtgcttcttttctgcttctcagcagacttccatgccattacaaaggaaatttgaattacctagtgtttgtatattccatgataactaaggtataacttctgttacacagcttatgtattgttaacatttaagtgtaaaccatgccacagctaacacttaaaaatgaaactaattagttcttgcttagagagtccagtatgccggccgagc

SEQ ID NO: 351385 - DNA, 922 bp, Homo Sapiens
tgatccaggatcttaaagaatatataccaacccaaatcctttgtggaaaatggcacggtattaaaaaataaaggattataaatttaaataaattcaggtttcagatttttggatttatagaactcaaaattcttttaacaaatttgactcaagctttctcaagcatttacctttctgctaagaatgaaaatgcatcagaagtttatttttaaatagaatattggctttcctagtattctatgtatgactgttatcctttaagaaataaaactagctttgcgcaggcctcccttaaactgaaattctagatggtgatgcccaatctgtgagttaaacattaatgagctaatgaaatcacagaataataagtaattctgatatttttttggataattcatgccataaaaccattgctatctcaattacctgagtatttcagcaaaatactttttggtccaaatcattacataattcagaaagtgcttcctatagtccatccacaagagaaagccagtcatttgccatcaccagccaaacatttctgcccactcttgatatacaatacaagagatacccatcaaataccattacaaatcccagaattcattaagtcttttcataggcactttcacccacatacctgcatacctgctttacaagggggggcatatattaccaaacagcctttgcttggacaacccaaaaatgggattttagggaatgtggtgaaatttctttgaaagtggcctttttggattaaaagagaggtttttgggaaaaaagtgtgtagaaaaagaggggttagaaaaaggtatttctttgtaacccaccttgaattattcccggaatatatcacctcagaaaaaattcttttatttccaaagtgggaaaataaagaaatcttttaaaggggcgttttcta

SEQ ID NO: 351386 - DNA, 515 bp, Homo Sapiens
  misc_feature (213)..(213): n is a, c, g, or t
gacacgcctttgaccagaactgcaacatttcaaacacaaacccagatctgttgggaaatcctaattaaaaacgttccattcccaggtggcacaatcacatcctgcctaaaacttctggcccacatcccaccacccagatgttgaaaagaaacctttctctgcttaacaccaaaacctgcacttcaaggtttctttaggggacaaaggaaaaanaagtacacacatgcagagttcagcctacatgttcattgaggaaaaagagcgtggcttattcatctttcaatcttttgattgttggcattatgattatgattatgattaattactctgacctgacaggaattgaagaagagactatatgctggtgctctgaaatgatctacccaactctgtcatctgtaacaaccagtgataactctcttgtcttgtaaaaagggtttgtacataacttgtacatggtttcattttgtatttttcgcagattaaaaatttatgtatttgtgttctaaaaaaaa

SEQ ID NO: 351387 - DNA, 420 bp, Homo Sapiens
  misc_feature (15)..(15): n is a, c, g, or t
  misc_feature (25)..(25): n is a, c, g, or t
  misc_feature (31)..(31): n is a, c, g, or t
  misc_feature (102)..(102): n is a, c, g, or t
  misc_feature (189)..(189): n is a, c, g, or t
ccacatcccccaccnacccccagangttganaaagaaaacccttcctccgccctaaacacccaaaacccgcacctccaaggtttcctttaggggacaaaggnaaaaaaaagtaacacacatgccagaagttccagccctacatgttccattgaggaaaaagagcgtggccttattccatccttccaatncttttgattgttggcattatgattatgattatgattaattactctgacctgacaggaattgaagaagagactatatgctggtgctctgaaatgatctacccaactctgtcatctgtaacaaccagtgataactctcttgtcttgtaaaaagggtttgtacataacttgtacatggtttcattttgtatttttcgcagattaaaaatttatgtatttgtgttctaaaaaaaa

SEQ ID NO: 351388 - DNA, 678 bp, Homo Sapiens
  misc_feature (656)..(656): n is a, c, g, or t
aagcttggcacgaggtttagatcagctggcagatgtgtttgtgggctacagccaagtttttcaggactaagaaggagaaaaataagtagaacttcttgggacaggagatctagggtactccagaaccagggaaatgagaaacaagaggggaattttaagaaagagagggaagatcatctatgaggttggagatgaaaggtgttggagatggtgaggcacaagtcaaaagactcactcgaagggcaggaactctgcttatttgtccatattcccagagtttgtcatgaggtctggcccacgtgggcagttcactcggccactatgtatcactgtggctgccatggtggatggaggctggacaggacctgtggtgatcggcagtctttctggaggactcaccagggaggggtctcagggtgggcatctcctttcaccttcctgtgcatgtcactggcactgttctttcttccctccctggaacagcacacacactgcatccttagtttcaggggtctgaaaacaaatgctacgaccaccttgctttggtgggcttttctggaacagggcattgtgaggaaggagatgttctgggccagggtgaaagtgggactttgatttttagggtaggttttttcagttttaggaaaggttttccnttggcttattccccttgaggga

SEQ ID NO: 351389 - DNA, 984 bp, Homo Sapiens
  misc_feature (853)..(853): n is a, c, g, or t
  misc_feature (946)..(946): n is a, c, g, or t
  misc_feature (951)..(951): n is a, c, g, or t
tgcgatctcctcccacagtgcggcagcccccacttgtacccacatgttccttcgaacaagaacaacctcagtggggcccagcaactccgggggctctctttgtgccatgagtggccgcgtgtgcgtggggtccccgcctggcccaggcttcggctcttcccctccaggagcagaggcagctcccagcctgagatacgtgccttacggtgcttcaccccccagcctagaggggctcatcacctttgaagcccctgaactgccggaggagacgctgatggagcgggaacacacagacaccttacgccatctgaatgtgatgctgatgttcactgagtgtgtgctggacctgacagccatgaggggaggaaaccctgagctgtgcacatctgctgtgtccttgtaccagatccaggagagtgtggtggtggaccagatcagtcagctgagcaaagactgggggcgggtggagcagctggtgttgtacatgaaagcagcacagctgcttgcggcttctctgcatcttgccaaagcccagatcaagtccgggaaactgagcccatccacagctgtgaaacaagttgtcaagaatctgaacgaacgatataaattctgcatcaccatgtgcaagaaacttacagaaaagctgaatcgattcttctctgacaaacagaggtttattgatgaaatcaacagtgtgactgcagagaaactcatctataattgtgctgtagaaatggttcagtctgcagccctggatgagatgtttcagcagaccgaagatattgtttatcgctatccataagggcagcccttcttttgggagggcctaagtagggattcttacagggacccntgcaagatatttgaaaatgtggcattaaatattaaatgtaggtattttgaggaggaggacttttccgggcgcttttgcccctagggcacccgnaaccntgttttaggccggccgggtttcttcccctgggg

SEQ ID NO: 351390 - DNA, 2514 bp, Homo Sapiens
tgtgcaagaaacttacagaaaagctgaagcgattcttctctgacaaacagaggtttattgatgaaatcaacagtgtgactgcagagaaactcatctataattgtgctgtagaaatggttcagtctgcagccctggatgagatgtttcagcagaccgaagatattgtttatcgctatcataaggcagcccttcttttggaaggcctaagtaggattctacaggaccctgcagatattgaaaatgtgcataaatataaatgtagtattgagagaagactgtcggcgctctgccatagcaccgcaaccgtgtgagcagcaggctcatcccgtggaccggtggtgggaacgtgaggtgatgcctttgggattacagcttgagttctgtcaccccatccccaggaaactgtagcttcttaactggtgactaccaaagaacaagcagtgatttgaaaaaggaaaaacaatccaaaaactacatatttgtaggaaatctgccttattggagaaaatcaccctttccctttttctttgtagaagcaggagcaagagtgtttggctcccagtttggacttggtgaataaatgtaccttagaactaggataatcggtacagttattcttaaagataattaaaaatgaaacaaagtgagtgctcgtcactgggttcatcagagcagtgtgtgaaattccatgtgtttgctgaggtgtaaaggtaaatgtattcacccctcatccaggcagtttgatatttggagtaagtttgtttaaatctgagcatgcatctttaaacagctcaggaagaaatagcttaagaagaagtgaaacatggatcttggaagaaattttgaaatcttcaatttgatcctaatatggatacatgttaatcttccaaaatctttcatattgcactaatttattaaaacaactgtgtattggattttgtaatttaactaaggcacaatggacttgtttaaaatattttacttgattgtatacatagaccctttccagaattcacatgtaatctccagtgaacttttaagtggttaaaacttgtattcatgtgaacctttgcacattttttatttttaacttctttatctacacctacagattttctcagtaatgtttttgttagcttttggttccattttttattgtgcatgcagaatgtacattgatgcctgtgaccttaggtttattaaaggctaggtttatttgggcagtattagaaacaaaatcatggatcaagagatactcttgataatttgaatagggccaaaacaaagttggtgacctaaaggcttgttagtgatgtggagttcctacatgcagtgagtggaaaatgaagttcgttttctcttaggaaaatgggcagctgtcttctgcctaatgtgtatttttcatgttaattctgacagttcaccaaatagctagtcatggagaatgcaggcagttaacttaatatccctccaggaatggttcctacgttgtgtattatttggtttcttttacttacctgcttgaatacttgaataaaccattcaccaattttaatccttttattttaatccttttacataaaataatctgaactctttgacaaattgcacagagctctttggcattaatctaattttaatgtactgataaaaacaaacatggttgtcctttactttgacaaagtaatgtaatttttaccttatttatctgtatgaaattccagtagttaatttgaacatttatttatatgacgtttgtatttttaggtctttaatacagtgtttctacctctcatttgtaactgcatgcattattcttgaaactaggtaaaactcactgaattgttgtgtaatagcctttttattattgcctgtacaaatgtatattaaggtaaaataaaactgacaaagtgtttctagggtgtagctgggtacatattaagtggcttgttgagccaggtacttccttagtgagtttagagacttggccatgaatatcctttgtcctgccccaggatttagatcttggctactgtcatgcaggcttccaggaacatagactgttttacctccacaaccctatttgttattagtgatactttattttatataatattttttattcacagtgaaatttcattcatgttctttcagttatcacctgtgttatctcagttgtaggtttattctatcctctcctcttcctctcccatttcttttttaacacaggatgaaacaggttcagagaggggaagtgattggcctaaagtcaggaactaggcaagtggtcaagccatgctttgtgactttcaagttaattcttcttgttcttgtatattaaaggtcttggggtagatggtgtgtgtgaaacagtgaagtctcaacagcagaaaagaacaaaatgtaaattcatgaataatggttctggttatacttccattatcaaggctaattaagagattttgccttgagtatagcaataataaacaaatgctttatgtttccctgaaaaaa

SEQ ID NO: 351391 - DNA, 499 bp, Homo Sapiens
catctggtctgcccatggcttagggctctggagccattggccgtggatatatagtcagccttccatgcctggcttctccggtaggaccacagacctcagatcagcccatttatgatcctgccctgggcggctccccacttacaggaaaccccaccaagaggaatttgggctgcatcatttccggcttcctgcctgggctgctggaggtggctggctggcagccccctgacccagtggtgtttggagtggggagagggaggtctccacacctggggtgcctcactatttgggtaaagccagcccagaagtgcatgctagggctccccctcttggcgaagaaggctggtcccttcctcctgagccctggagtcagccccccaggaaggtgttggcggtcaccttgggcatccctctgttgccctgattgggagggggtcccttaaaaagcctaaacccgctgcactccagcctgggcgacagagcgggactccgtctcaaa

SEQ ID NO: 351392 - DNA, 512 bp, Homo Sapiens
  misc_feature (12)..(12): n is a, c, g, or t
  misc_feature (63)..(63): n is a, c, g, or t
  misc_feature (111)..(111): n is a, c, g, or t
aataatacatcntttggaaaaatagcttggagaaaaaaaatcaataaagagtcccataaaatnttaagaaaatggttctattctgtgatatattactaagaaatacagttnttaaacgtgtataactattgtcagacaatttataggtgtttcatctagtcctgggatgaaatacgatgactcatgcaaattcagggagcacactggctgactttaaattggaacattgtaaagtgaaagctgtgaaaggttgtgtgtcctatcaatgagatttattttctaaccaagagctgttcggatgattcagtataaatacgaaaatcacatccaaaaacggtataacccagcttccttaaggcaattttcttctctgaaacaagaatatactcatatgttctttactataatgtatatgatttttatcttgtactttaaaagatgataattatgcattgtatatacgattgtgtgccttgcaataaaatcaaaactgtacctgctgaaaatccaaa

SEQ ID NO: 351393 - DNA, 399 bp, Homo Sapiens
aagcttggcacgagggattacagatgtgaatggccacgcctggcctgtttcctttaagttagcacttcacgtgctcttacagcgttaattgccattattggtttgcctgattttcctgcatctcctcatatgtaagtctgcagcccaaggagagaatagtagctgtatgtgcccacaaggggtgtccaagcttcttgattcttgttaatatcgactccccaacattgaaaaaggagtgaagaagggaatatcattttagggtactgctttaaaggaatgataaagtaaacaacgtagcagggaaaataccacttgcacaaatgtatttctttgtcaaagtgtgtacacgctttcttgtttggtcctgatgtcctgcttgtgaagcagggactacattgg

SEQ ID NO: 351394 - DNA, 1153 bp, Homo Sapiens
  misc_feature (6)..(6): n is a, c, g, or t
  misc_feature (10)..(10): n is a, c, g, or t
  misc_feature (13)..(13): n is a, c, g, or t
  misc_feature (18)..(18): n is a, c, g, or t
  misc_feature (22)..(22): n is a, c, g, or t
  misc_feature (26)..(26): n is a, c, g, or t
  misc_feature (29)..(31): n is a, c, g, or t
  misc_feature (33)..(33): n is a, c, g, or t
  misc_feature (36)..(36): n is a, c, g, or t
  misc_feature (43)..(43): n is a, c, g, or t
  misc_feature (45)..(45): n is a, c, g, or t
  misc_feature (52)..(52): n is a, c, g, or t
  misc_feature (57)..(58): n is a, c, g, or t
  misc_feature (65)..(65): n is a, c, g, or t
  misc_feature (73)..(74): n is a, c, g, or t
  misc_feature (84)..(84): n is a, c, g, or t
  misc_feature (88)..(90): n is a, c, g, or t
  misc_feature (102)..(102): n is a, c, g, or t
  misc_feature (105)..(105): n is a, c, g, or t
  misc_feature (110)..(110): n is a, c, g, or t
  misc_feature (118)..(118): n is a, c, g, or t
  misc_feature (124)..(124): n is a, c, g, or t
  misc_feature (134)..(134): n is a, c, g, or t
  misc_feature (143)..(145): n is a, c, g, or t
  misc_feature (147)..(147): n is a, c, g, or t
  misc_feature (151)..(151): n is a, c, g, or t
  misc_feature (1081)..(1106): n is a, c, g, or t
agaganctgntgngggcngaantgtncannnanagnggatctntnttacccnctgtnnttctganggcccctnncacaggagtnggtnnnttacaagccctncancaccnccccttgngcaagnactcttctgnagatctttnnntnattnacaactcagtggagacaacacagctgaaaggagtcataggggagaaggagaagaagatcatgaatcaccatcttcaggcagggtaccagcaccagacacctccattgaagaaactgaatcagatgccagtagtgatagtgaggatgtatctgcagttgttgcacagcactccttgacccaacagagacttttggtttctaatgcaaaccagacagtacccgatcgatcagatcgatcgggaactgatcgatcagtagcagggggtggaacagtgagtgtcagtgtcagatctagaaggcctgatggacagtgcacagtaactgaagtttaaataaaaatgtcttcagctccatgctcaaggttgaaagggttacctgtaaatttctgcccacataacattatactcatccctagtagtgcattttgggagttggggtgggaaggggtatgggaaggatagactcataattaaaatgtctaacatgtctctgttgagaaatttatttaatgtaaggaacttgggtgttaatagttgagagctgtttagtaataacccagttttcttgaggtctgtttactttatactttttaaaaacttctgtagttcttttggccagtgtgtttgtattatctgtgcattaatggtcctcatctgactcctgcattgtgtcttatttttctgcatggattggcataagaccattactaaaatttggcacctgtgagatgtttgatattatgaacaggaaacataatttaatgtatgaatagatgtgaatttgggatttcaaaatagatgaataacaactattttatagtaaagttattgaaatggaaatgaaaacagccagtaacttatgtttcagaatgtttgtaacacacttcatggtgttcccataggctttgctgtctagtcttatagtttgaggnnnnnnnnnnnnnnnnnnnnnnnnnngattacaaaatttataatttaataaatactagagtttatcaaaaaaa

SEQ ID NO: 351395 - DNA, 310 bp, Homo Sapiens
  misc_feature (15)..(15): n is a, c, g, or t
acttaaagtggggtntgggaaacctgcctgtacctggggttcagtccctccccaaatccctccttgtgtcttccccccagcaaaggtggggtgaccacttctggtagctaagcacctgctccccggctctcttcacccaggacatctgtctctctggagtgtctgtctgtctgtccctccctctctgaacctgcttcctccgtgtcccctgctcctcgcccctgggagcccactccccctccttgcggctccctcccatctcactcaaggttctctgaggacattaaagtggtggattcaccctgaaaaa

SEQ ID NO: 351396 - DNA, 1041 bp, Homo Sapiens
  misc_feature (129)..(180): n is a, c, g, or t
  misc_feature (827)..(827): n is a, c, g, or t
  misc_feature (871)..(871): n is a, c, g, or t
  misc_feature (920)..(996): n is a, c, g, or t
gtccggaattcccgggatgcagggacggcccaggctggagctgaggccgagctgagggcgcccgagccccccgccccgcccgtcctctggctccgcagcgctcagccccgggcccgcggagacatgaannnnnnnnnnnnnnnnnnnnnnnnnnnnnnnnnnnnnnnnnnnnnnnnnnnntgatgggctcctgcgtgtcgcgagacctgttcacaatgtgcccacaagaactgccccatgccccagggtgcggaccccttgaacccagatctgccctcgggccgcactcccaccgtggctccagactgtgtcattggcaaggacaaacagatggatttctgttgggatccttggcagaggtgcttccagaccaccaacggctacctgtccgactccaggtcccgccccggcaactacaacgtggcagccctggccacctcgtcccttgtgggggtggtgcagagcatcaaggaccacatcacaaagcccacggccatggcccaaggccgcgtggcccacctcatcgagtggaagggctggagtgcccagcgggcaggctgggagctgtccccagctgaggatgagcattactgctgcctcccggatgagctgcgtgaggcccgctttgctgcaggggtcgccgagcagtttgccatcacagaggccacactgagcgcttggtcctcgctggacgaagaggagctgcaccccgagaacagcccccagggcatcgtccagctccaagatctggagagcatctaccttcaggacagccttcccagtggcccctcacaggatgacagccctcaggacttctcctcgcccancccctcccctgaaagctggtcctcaccctgaggaagcccccaancaccgcctgggattcccggaagccccccaaccccaaagttgtagccatnnnnnnnnnnnnnnnnnnnnnnnnnnnnnnnnnnnnnnnnnnnnnnnnnnnnnnnnnnnnnnnnnnnnnnnnnnnnnatcggtaagcgagggctccccctccggggaagcgacgaccgaaac

SEQ ID NO: 351397 - DNA, 516 bp, Homo Sapiens
  misc_feature (381)..(381): n is a, c, g, or t
  misc_feature (394)..(394): n is a, c, g, or t
  misc_feature (420)..(420): n is a, c, g, or t
  misc_feature (485)..(485): n is a, c, g, or t
taacctccctgagccaaaatgtgctcagctgtaaaagactggctaatagaaactgcccctttaagattgtgggatgaaagcgtctagcgcagtaaagcattggctaaatgaagagggcaggctggaaacagtgcttctcaaacctttcctctctcttctccaaaaatacatggatggtttaacataaaactccttcccccctcccccatcatctggtaaaactgaactccggggagacgcaccccgtgtgcccttccgactccactgccctagagtgggaagtctattatgagtttcactttgtgttactccaggcctcgcctgtgaacctgccgcactggcttctcggcctgggagcttgttaagtgcagactctcagtnccgcgccccggcntcctggatcagactgcacttaacaanacccctaggtgattcacaggcacatcaaggtttgagaagcactgctttaactcactgtttctganaaagattcagagtctcccggggggctttaaa

SEQ ID NO: 351398 - DNA, 729 bp, Homo Sapiens
ggcccagcggcacgaggccggttccccagaaaaaatgggcatgcgtgtgtgcctgtgtgttcagttccatcctacagtcctcccaggggtctccagaaagcgtggctttgtcttctccagggcggacgagtcctagagcagtccgcagagccttcggtgaagtttcccgcggcctcccaagtccacggagcccggcaccccgtcccagggcagccctgacggcccgggcgcggtacccatgcggccagtaggtgtcgctgttcccctgccggcgggagccaggagccccgcgcgggcccccagcgccactcagccttccgctcccggcaggttcgcagacccaccggagctcccgagagagggccgctctacccgcccccgccccgggactgtgcccgtgctcacctggctaccaccgtagcgacactgccggcctaaggaagtaccttcggggagagaaaggagagacgggtctgttggggcgaaacatgggccccgacggaagcggctccgagccggcttctctcgtggctcccaactctccctcctttctcttcacgtgccatgggcggcggtggggcactgagggcctcctggtaaaatccgaagaggggagattcaaccggggttccatatgggctttacgaataaacaagaggttgaaaatcccagcttcgtgggagctagctacagaaagagtggattggtttcaatattcttgcctccaaa

SEQ ID NO: 351399 - DNA, 546 bp, Homo Sapiens
aagcttggcacgaggatgatttataaatgacttgctaattttgtccaaagggagtaatgataattagggcattcttcccacacgaagatgacacaattgacccaatatcattgaggcaaacagtttgggctgtttttccagtagtatgacagtgacggtgtgtcaaccgcaggacctcacccacatttctttgggacctaggagtgtgggaaatagcagccagatttgaggtacaaatcatggtgtccagcctgcaaagcctttttgcagcaatctaagcctgactgctcctgttgtatggtcaaagtcattttaatctactttagcttattgtaaaatgttcaagaattgtattttgtcttgaaaaccatgaattttattgtttagggggagttattttttaaggagtgcaggatttcagttttggatgatgaaaaagttttgaagatgggtagtgacagtggtcacacaacattgtaaatgtacttaatgccattgtacacttacgtgactttaaagtaaacatgaaattttctacaaaaaaaa

SEQ ID NO: 351400 - DNA, 2715 bp, Homo Sapiens
  misc_feature (53)..(89): n is a, c, g, or t
  misc_feature (2070)..(2080): n is a, c, g, or t
  misc_feature (2117)..(2128): n is a, c, g, or t
aggggactgattgactatataggggacctggaggcttaacgcggtggcggcgnnnnnnnnnnnnnnnnnnnnnnnnnnnnnnnnnnnnnatcaggccaaatcggccgagctcgaattcgtcgagagcgggccgttctgctgggagggcgcgcaggccagcgaggcgctgctgctcttcatgggcctcacctacctgggctcgccgttcggaggctggctggccgacgcgcggctgggccgggcgcgcgccatcctgctgagcctggcgctctacctgctgggcatgctggccttcccgctgctggccgcgcccgccacgcgagccgcgctctgcggttccgcgcgcctgctcaactgcacggcgcctggtcccgacgccgccgcccgctgctgctcaccggccaccttcgcggggctggtgctggtgggcctgggcgtggccaccgtcaaggccaacatcacgcccttcggcgccgaccaggttaaagatcgaggtccggaagccactaggagattttttaattggttttattggagcattaacctgggagcgatcctgtcgttaggtggcattgcctatattcagcagaacgtcagctttgtcactggttatgcgatccccactgtctgcgtcggccttgcttttgtggtcttcctctgtggccagagcgttttcatcaccaagcctcctgatggcagtgccttcaccgacatgttcaagatactgacgtattcctgctgttcccagaagcgaagtggagagcgccagagtaatggtgaaggcattggagtctttcagcaatcttctaaacaaagtctgtttgattcatgtaagatgtctcatggtgggccatttacagaagagaaagtggaagatgtgaaagctctggtcaagattgtccctgttttcttggctttgataccttactggacagtgtatttccaaatgcagacaacatatgttttacagagtcttcatttgaggattccagaaatttcaaatattacaaccactcctcacacgctccctgcagcctggctgaccatgtttgatgctgtgctcatcctcctgctcatccctctgaaggacaaactggtcgatcccattttgagaagacatggcctgctcccatcctccctgaagaggatcgccgtgggcatgttctttgtcatgtgctcagcctttgctgcaggaattttggagagtaaaaggctgaaccttgttaaagagaaaaccattaatcagaccatcggcaacgtcgtctaccatgctgccgatctgtcgctgtggtggcaggtgccgcagtacttgctgattgggatcagcgagatctttgcaagtatcgcaggcctggaatttgcatactcagctgcccccaagtccatgcagagtgccataatgggcttgttctttttcttctctggcgtcgggtcgttcgtgggttctggactgctggcactggtgtctatcaaagccatcggatggatgagcagtcacacagactttggtaatattaacggctgctatttgaactattacttttttcttctggctgctattcaaggagctaccctcctgcttttcctcattatttctgtgaaatatgaccatcatcgagaccatcagcgatcaagagccaatggcgtgcccaccagcaggagggcctgaccttcctgaggccatgtgcggtttctgaggctgacatgtcagtaactgactggggtgcactgagaacaggcaagactttaaattcccataaaatgtctgacttcactgaaacttgcatgttgcctggattgatttcttctttccctctatccaaaggagcttggtaagtgccttactgcagcgtgtctcctggcacgctgggccctccgggaggagagctgcagatttcgagtatgtcgcttgtcattcaaggtctctgtgaatcctctagctgggttcccttttttacagaaactcacaaatggagattgcaaagtcttggggaactccacgtgttagttggcatcccagtttcttaaacaaatagtatcacctgcttcccatagccatatctcactgtnnnnnnnnnnnttaataaactgttacttatatttaagaaagtgaggannnnnnnnnnnnaaagataaaagcatggtcagatgctgcaaggattttacataaatgccatatttatggtttccttcctgagaacaatcttgctcttgccatgttctttgatttaggctggtagtaaacacatttcatctgctgcttcaaaaagtacttactttttaaaccatcaacattacttttctttcttaaggcaaggcatgcataagagtcatttgagaccatgtgtcccatctcaagccacagagcaactcacggggtacttcacaccttacctagtcagagtgcttatatatagctttattttggtacgattgagactaaagactgatcatggttgtatgtaaggaaaacattcttttgaacagaaatagtgtaattaaaaataattgaaagtgttaaatgtgaacttgagctgtttgaccagtcacatttttgtattgttactgtacgtgtatctggggcttctccgtttgttaatactttttctgtatttgttgctgtatttttggcataactttattataaaaagcatctcaaatgcgaaataaatctctctactctctatatcctgcagctaagtgtaccccctagtt

SEQ ID NO: 351401 - DNA, 1221 bp, Homo Sapiens
  misc_feature (880)..(904): n is a, c, g, or t
  misc_feature (1110)..(1121): n is a, c, g, or t
aaaaggagaaagggaatttctttttcccggcccgaaaaattaagaaaaaaacgaccttgaccctgttaaagagaacccaggtgtaaatgtttccccttggtgtaagcccagcctgtggtcttttccgtaaccacaaaggtggtcatctgtgcccgtgacgtcacctgtgcccgtgcgtggcgtccccgtctccgttggggccattagaatgaggcagacaccaggccactctagaagccgagccgtcacacctcaggcgtgtgcggggcggggacggggggtctcctggttacattttggattaaacctgtttcccggttatgtgtagggaacagcagagtgatgcacgaactttgaacattcgttatggggaaaacatcctttaacttcggggtcgtctgccagagcagggtctgggagggtccatgcagttcccgctggtgtggagggaaatgccctggtctggcctccgagcccccaggtccaccgtctcccctcccctcatttgtaagaatagctacacactaacattttgggaaggagaggcacataactttttttaacatttggtaactaggttatgggctctacattgtcagctacttgggatatatatttaattttcttaaattcccgttaaactctattttatggttttgatttcagattgcaaacatgtaaaacctgcatagcagcgagtcctcggttttgccggtttctttagttctttactgtcactgtcatgtaatcagctaattctctgtggatgttgctgtaaagtatgcatgttcctttcatgtgtatttaatcatgatgtttaattttgcacacttatttgtaatgtttcttttaaataaaagtgactaattttgttgtaaannnnnnnnnnnnnnnnnnnnnnnnnaaaaccaaaaggggcggccgctctagagtatccctcgaggggccccagcttacgcggtacccagctttctttggaccaagtgggtcccttatagggagccgtattataaagctaggacctgggccgcgcgttttaccacggtcctgaacgggggaaaactgctcaccttgggggaattctttgggaaaaggaacacttacccttcnnnnnnnnnnnnaacatcaatttggggccaaaacctaccccttcccgcagatttttcaggcgtctctcaaagggatacactactcaccaccttcttttccaagggggatacc

SEQ ID NO: 351402 - DNA, 2200 bp, Homo Sapiens
gcaggctggtaccggtccggaattcccgggggggcggcctcagcgccggcccgaagggaccaggccgccgtccccagcgagaggcatgcagcgctgaggagcggcgacccagcacggcggcgccatgaacctcctgccgtgtaaccctcacggcaacgggctgctctacgccggcttcaaccaggaccacggatgctttgcgtgtgggatggaaaatggattccgagtctataacactgatccactaaaagaaaaagagaaacaagaatttctagaaggaggagttggccatgttgaaatgttatttcgctgcaactatttagctttagttggtggtggaaaaaagccgaaataccctcccaacaaagtaatgatctgggatgacctgaagaagaagactgttattgaaatagaattttctacagaagtcaaggcagtcaagctgcggcgagatagaattgtggtggttttggactccatgattaaggtgttcacattcacacacaatccccatcagttgcacgtcttcgaaacctgctataaccccaaaggcctctgtgtcctttgtcccaatagtaacaactccctcctggcctttccgggcacgcacacgggccatgtgcagcttgtggacctggccagcacggagaagccacccgtggacattcctgcacacgagggtgtcctgagctgcattgcactcaacctgcagggaacaagaattgcaactgcatccgagaaagggacgcttataagaatatttgatacttcatcagggcatttaatccaggaactgcgaagaggatctcaagcagccaatatttactgcatcaacttcaatcaggatgcgtccctcatctgcgtatccagcgaccacggcacagtgcatatttttgcagctgaagatccaaaaaggaataaacagtccagtttggcctcagccagtttccttccaaaatacttcagttccaagtggagtttctccaagtttcaggttccctcaggctctccgtgcatttgtgcctttggaacagagccaaacgccgtcattgcaatttgtgcagacggcagctactacaaattcctgttcaaccccaagggggagtgcatccgagatgtctacgcgcagtttctagagatgaccgatgacaagctgtgactccagctgggggcgccacagcacccaccacctgccgccttcagactctcggggctggtgccagtgccccaggggcctcctgggccacgggctggaggggctgcccagggaccctggtctcgaagccatacgtggttgtctgctttcctaaggactcccatttccagtattaaagagagaatcatcatcaaggcaccgtaggtaactcagtggctgtgaccagctcgactggcggccactggctgttcccatgagttcagctgtgacgttagcttcagtggctccgccgcatcctcacactgacgggggctccatacggacctggggactgggctgagagggtggacgagttcaggtttgtttttgcagcagattccgtcgttcttactgagtctgcagcgggggagtgaacaagtgtgcagatgtaagttcttacatgataagcagattgaatacaacaccagcagcttgccttagaaaaggagaaaggaattccttttcccgcccgaacatgaagaaaaacgacctgaccctgtagagagaacagcagagtgatgcacgaactttgaacattcgttatggggaaaacatcctttaacttcggggtcgtctgccagagcagggtctgggagggtccatgcagttcccgctggtgtggagggaaatgccctggtctggcctccgagcccccaggtccaccgtctcccctcccctcatttgtaagaatagctacacactaacattttgggaaggagaggcacataactttttttaacatttggtaactaggttatgggctctacattgtcagctacttgggatatatatttaattttcttaaattcccgttaaactctattttatggttttgatttcagattgcaaacatgtcctgcatagcagcgagtcctcggttatgccggtttctttagttctttactgtcactgtcatgtaatcagctaattctctgtggatgttgctgtgtatgcatgttcctttcatgtgaatttaatcatgatggttttttgcacactttttgt

SEQ ID NO: 351403 - DNA, 1234 bp, Homo Sapiens
  misc_feature (50)..(82): n is a, c, g, or t
ctgtatagactcatataggggcatggaggttcacgcggtggcggcgcatnnnnnnnnnnnnnnnnnnnnnnnnnnnnnnnnnatcaggccaaatcggccgaagctctgaattcgtctgagagcggacttccggccgcggcggctcagcgccggcccgaagggaccaggccgccgtccccagcgagaggcatgcagcgctgaggagcggcgacccagcacggcggcgccatgaacctcctgccgtgtaaccctcacggcaacgggctgctctacgccggcttcaaccaggaccacggatgctttgcgtgtgggatggaaaatggattccgagtctataacactgatccactaaaagaaaaagagaaacaagaatttctagaaggaggagttggccatgttgaaatgttatttcgctgcaactatttagctttagttggtggtggaaaaaagccgaaataccctcccaacaaagtaatgatctgggatgacctgaagaagaagactgttattgaaatagaattttctacagaagtcaaggcagtcaagctgcggcgagatagaattgtggtggttttggactccatgattaaggtgttcacattcacacacaatccccatcagttgcacgtcttcgaaacctgctataaccccaaaggcctctgtgtcctttgtcccaatagtaacaactccctcctggcctttccgggcacgcacacgggccatgtgcagcttgtggacctggccagcacggagaagccacccgtggacattcctgcacacgagggtgtcctgagctgcattgcactcaaactgcagggaacaagaattgcaactgcatccgagaaagggacgcttataagaatatttgatacttcatcagggccttttaatcccaggaactgggaagaaggatcttcaagcagccaatatttactgcatcaacttcaatcaagatgcgtccctcatctgcgtatccagcgaacaaggcacagggcatatttttgcagctgaagatcccaaaagggataaaccggccccgttttggcctcagccagtttccttccaaaatacttcagtttccagggggaggttccccccagttttcagggttcccccagggcttcccccggaatttgggggcctttggaaacagaacccaaaagaccgtccttttgccattttgggcaaacggggaccttataacacaatcccgggtaaaccccccaggggggga

SEQ ID NO: 351404 - DNA, 893 bp, Homo Sapiens
ggatcctcttccagttcctggataaaatgcccctgatgaagtatcaaatattctataagcgtccctttctcggatgcagtgcaattcttgttccctgcaggtttgagtgcaatgcagctcagggacaccctcgtgtgcaggaaatgtcccacgggtggcttctccggtgctggccaggtccacaagctgcacatggcccgtgtgcgtgcccggaaaggccaggagggagttgttactattgggacaaaggacacagaggcctttggggttatagcaggtttcgaagacgtgcaactgatggggattgtgtgtgaatgtggacaccttaatcatggagtccaaaccaccacaattctatctcgccgcagcttgactgccttgacttctgtagaaaattctatttcaataacagtcttcttcttcaggtcatcccagatcattacttgtgagattacagaaccgctcaaaggccaagatctcaagccctgtcttccactgtttttcctaccgataatctcttcccatttcatttctctgttcctttgttgggagggtatttcggcttttttccaccaccaactaaagctaaatagttgcagcgaaataacatttcaacatggccaactcctccttctagaaattcttgtttctctttttcttttagtggatcagtgttatagactcggaatccattttccatcccacacgcaaagcatccgtggtcctggttgaagccggcgtagagcagcccgttgccgtgagggttacacggcaggaggttcatggcgccgccgtgctgggtcgccgctcctcagcgctgcatgcctctcgctggggacggccgcctggtcccttcgggccggcgctgaggccgccgcggccggaagtccgct

SEQ ID NO: 351405 - DNA, 1087 bp, Homo Sapiens
  misc_feature (39)..(39): n is a, c, g, or t
  misc_feature (154)..(154): n is a, c, g, or t
  misc_feature (184)..(184): n is a, c, g, or t
  misc_feature (445)..(445): n is a, c, g, or t
gtccggaattcccgggatgtctccttttagcataggggnttcggcgccacggccagcgctagtcggtctggtaaggatttacaaaaggtgcaggtatgagcaggtctgaagactaacattttgtgaagttgtaaaacagaaaacctgttagaanatgtggtggtttcagcaaggcctcagtttnccttccttcagacccttgtaatttggacatctgctagctttcatattttcatacattactgcagtaacactccaccatatagacccggctttaccttatatcagtgacactggtacagtagctccagaaaaatgcttatttggggcaatgctaaatattgcggcagttttataaaacaaccctttttgctgcacatgtaagtggagctgtgcttacctttggtatgggctcattatatatgtttgttcagaccatcctttnctaccaaatgcagcccaaaatccatggcaaacaagtcttctggatcagactgttgttggttatctggtgtggagtaagtgcacttagcatgctgacttgctcatcagttttgcacagtggcaattttgggactgatttagaacagaaactccatatggaaccccgaggacaaaggttatgtgcttcacatgatcactactgcagcagaatggtctatgtcattttccttctttggttttttcctgaccttacattccgtgattttccagaaaatttcctttacgggtggaagcccaatttacatggattaaccctctatgacactgcaccttgcccctattaacaatgaacgaacacggctactttccagagatatttgatgaaaggataaaatatttctgtaatgattatgattctcagggattggggaaaggttcacagaagttgcttattcttctctgaaattttcaaccacttaatcaaggctgacagtaacactgatgaatgctgataatcaggaaacatgaaagaagccatttgatagattattctaaaggatatcatcaagaagactattaaaaacacctatgcctatacttttttatctcagaaaataaagtcgaaagactatgatatcataaa

SEQ ID NO: 351406 - DNA, 1127 bp, Homo Sapiens
aagcttggcacgagggtgcagctgggctcagctccccgtgccctacctttctgttctcttccttggtttcccctactctcctcctgccccaagcagtgcctgatgccgagttccgtctctcgggtcttttcctggtcccaggcaaagcggagcaggatcctcaaacggcctagtgcttcgcgcttccggagaaaatcagcggtctaattaattcctctggtttgttgaagcagttaccaagaatcttcaaccctttcccacaaaagctaattgagtacacgttcctgttgagtacacgttcctgttgatttacaaaaggtgcaggtatgagcaggtctgaagactaacattttgtgaagttgtaaaacagaaaacctgttagaaatgtggtggtttcagcaaggcctcagtttccttccttcagcccttgtaatttgggacatctgctgctttcatattttcatacattactgcagtaacactccaccatatagacccggctttaccgttatatcagtgacactgggtacagtagctccagaaaaatgcttatatggggcaatgctaaactattgcggcaggtctatgcatcgctaccatttatgttcgttataagcaagttcatgctctgagtcctgaagagaacgttatcatcaaattaaacaaggctggccttgtacttggaatactgagttgtttaggactttctattgtggcaaacttccagaaaacaaccctttttgctgcacatgtaagtggagctgtgcttacctttggtatgggctcattatatatgtttgttcaaaccatcctttcctaccaaatgcagcccaaaatccatggcaaacaagtcttctggatcagactgttgttggttatctggtgtggagtaagtgcacttagcatgctgacttgctcaatcagttttgcactgtggcaattttgggactgatttagaacagaaactccattggaacccccgaggacaaagggtatgtgccttcacatgaatccctacctgcagccaaaatggtccaaggtcatttttcccttcttggggttttttcccggaccttacattcctggattttccaaaaaaatttcttttaccgggtgggaaacccaat

SEQ ID NO: 351407 - DNA, 750 bp, Homo Sapiens
gtacttggaatactgagttgtttaggactttctattgtggcaaacttccagaaaacaaccctttttgctgcacatgtaagtggagctgtgcttacctttggtatgggctcattatatatgtttgttcagaccatcctttcctaccaaatgcagcccaaaatccatggcaaacaagtcttctggatcagactgttgttggttatctggtgtggatgctgacttgctcatcagttttgcacagtggcaattttgggactgatttagaacagaaactccattggaaccccgaggacaaaggttatgtgcttcacatgatcactactgcagcagaatggtctatgtcattttccttctttggttttttcctgacttacattcgtgattttcagaaaatttctttacgggtggaagccaatttacatggattaaccctctatgacactgcaccttgccctattaacaatgaacgaacacggctactttccagagatatttgatgaaaggataaaatatttctgtaatgattatgattctcagggattggggaaaggttcacagaagttgcttattcttctctgaaattttcaaccacttaatcaaggctgacagtaacactgatgaatgctgataatcaggaaacatgaaagaagccatttgatagattattctaaaggatatcatcaagaagactattaaaaacacctatgcctatacttttttatctcagaaaataaagtcaaaagactatga

SEQ ID NO: 351408 - DNA, 1094 bp, Homo Sapiens
ttccatcacgtgtttacctgtccagcccttgaattaaggtgggtggaaaaattttcaggagaagggattaaggcaactttttgggaacctttccccccaattcccctgagaatcaattattcattccaggaaaatattttatccctttcatcaaaataatcttcgggaaagtagccgtgttcgttcattgttaatagggcaaggtgcagtgtcatagagggttaatccatgtaaattggctttccacccgtaaagaaattttctgaaaatcacgaatgtaagtcaggaaaaaaccaaagaagggaaaatgacatagaccattctgctgcagtagtgatcatgtgaagcacataacctttgtcctcggggttccaatggagtttctgttctaaatcagtcccaaaattgccactgtgcaaaactgatgagcaagtcagcatgctaagtgcacttactccacaccagataaccaacaacagtctgatccagaagacttgtttgccatggattttgggctgcatttggtaggaaaggatggtctgaacaaacatatataatgagcccataccaaaggtaagcacagctccacttacatgtgcagcaaaaagggttgttttctggaagtttgccacaatagaaagtcctaaacaactcagtattccaagtacaaggccagccttgtttaatttgatgataacgttctcttcaggactcagagcatgaacttgcttataacgaacataaatggtagcaatgcataaaactgccgcaatatttagcattgccccaaataagcatttttctggagctactgtaccagtgtcactgatataaggtaaagccgggtctatatggtggagtgttactgcagtaatgtatgaaaatatgaaagcagcagatgtccaaattacaagggctgaaggaaggaaactgaggccttgctgaaaccaccacatttctaacaggttttctgttttacaacttcacaaaatgttagtcttcagacctgctcatacctgcaccttttgtaaatccttaccagaccgactagcgctggccgctggcgccgaagcccctatgctaaaaggaccgct

SEQ ID NO: 351409 - DNA, 1238 bp, Homo Sapiens
  misc_feature (1191)..(1192): n is a, c, g, or t
  misc_feature (1195)..(1195): n is a, c, g, or t
  misc_feature (1225)..(1226): n is a, c, g, or t
cgagaagctcggcggccatcgccgccattttgggctgggaggaggcagcggagggactcgctgcgcagtgagagcaccccgtggggggtggtccgggcgcggggagaggccgggccgagtgggctacctgaagtggcggcgccgggagacggcgggaagtgggaccgggggccagggagggtgaaggttggagtctcctcggccgagcccggtcctcaaaccgtcccggcagccccgcagcctcgcctctcacagagtgcggggttcttcggtaattaccgcgtgtttcccgagaccccagaaggggagaggctggtgaaacggcttccctctgcggtctttccacaggggcgcggatcctgaggccgagctctgccagcttccctccccacccccattcggcctgggtatggcggcgaggcccgcacagagggactccacttcgactggagaggtgggggcgacgccagattccagaagctggcgccgcgggggagggcggaggtcgcaggtctggccacaagtcggcgtggcagtcagctggaggctccgagagcggagatcacagtgcacccaccttacctcgcttacaccaaagcgccatctcgccgcccgggttgcgaaaaaccacgaccctcttaaactactgtagcaaccactaattccccctgggagcagctagagaggggcacttggaaaccttcacgagctcggtgcctgaaggtctctgaggctcttgccctcaagatctctcccattcagccccgattctccggacaacctgacctagcatgtcgccagcctcttggtgaaacgcctaaagtgtgctgccccacttctcttgaaagtttacaccgaagggatgaggttttgccctttacagggttggggcacaaagtcggagtcgctgcggctccgaaatagaaacggagttgcccatttcgtatgcttcatcaacatctgcttgcattttgaaatcctagtcttaacttttacacaacttttagagaaatggctgccctcctagagggaaaaacgaactacagtaattccaatttcaatgtaatctttgtaagactacaaaatctttccagtttaaagatttttcttttcccacagactaaacaaagtcagagtattttgtgttctactggtgcattgttactaggtaacttcaattttttgaaattnnaantaattgaaggatacacattatatgtagatnntaaataatacac

SEQ ID NO: 351410 - DNA, 1890 bp, Homo Sapiens
  misc_feature (1440)..(1464): n is a, c, g, or t
  misc_feature (1661)..(1661): n is a, c, g, or t
  misc_feature (1711)..(1711): n is a, c, g, or t
gtcctctgtgcggggcctcgccgccatacccaggccgaatgggggtggggagggaagctggcagagctcggcctcaggatccgcgcccctgtggaaagaccgcagagggaagccgtttcaccagcctctccccttctggggtctcgggaaacacgcggtaattaccgaagaaccccgcactctgtgagaggcgaggctgcggggctgccgggacggtttgaggaccgggctcggccgaggagactccaaccttcaccctccctggcccccggtcccacttcccgccgtctcccggcgccgccacttcaggtgtcactagttccaggcgtctgctgaaagatttggaacagaagatgatggccactccgaaccagaccgcctgtaatgcagagtcaccagtggccctggaggaggccaagacctctggtgccccggggagcccccaaacaccccctgagcgtcatgactctggtggttccctgcccctgacaccgcggatggagagccactcagaggatgaagatcttgctggggctgtcggtggcctgggctggaacagtaggagtccccggacccagagcccagggggctgctcagcggaggctgtgctggcccggaagaaacaccgtcggcggccatcgaagcgcaaaaggcactggcgaacctacctggagctgagctgggctgagaaacaacagcgggatgagaggcagagccagagggcctcccgggtccgcgaagagatgttcgccaaaggccagcccgtggccccctacaacaccacccagttcctgatgaatgacagggacccggaggagcccaacttggatgtgccccatgggatctcccacccaggttccagtggggagagtgaggccggggacagtgatgggcggggccgagcgcacggtgagttccagcggaaggacttctctgagacttacgaacgcttccacaccgagagcctgcagggccgcagcaagcaggagctggtgcgagactacctggagctggagaagcggctgtcgcaggcggaggaggagactaggaggctgcagcagctgcaggcgtccaccggccagcagtcctgccgccaggtggaggagctggctgccgaggtccagaggctccggaccgaaaaccagcggcttcgtcaggagaaccagatgtggaaccgagagggctgccgctgtgatgaggagccgggtacctaggggtgcctcccagcctggtggacccaaggagaaggtcccatttcgtgcacactcaggccagctgggtctcaaggaggcaggtggcagatgaaaaccaccgtcaacaccctgtgcgccctgagaacagctaaatcggttcagactcccacctcaccgtttccatagttggctcttttgtgtcatcttaccctttacagagaaattaaatggcctttggtggggaccnnnnnnnnnnnnnnnnnnnnnnnnngggcggccgcttcaaaagaatcccctcgagggggcccaagtttacgcctacccagcttttcttgtaccaaggtggcccccatattgaggtcctattataagctaaggccctggcccctccgttttacaacggtctggagttgagaaaccctgcctaaatttgggaatcttttgcgcaaggacctttcctttctggantgcgtacgttaatctccaatcaccatccttcacagaatcctccactctcncaaactgaaacaagtcccagtctattatcgcgggattaaagcccgctagccaaattcccccatcgcatctctgtgcccttccaatctgcgcactcagctaccatactcacaccccacaaaacatcctttaaaaacgcccgagccgaataaactatcctaaccccccctgccacttcaag

SEQ ID NO: 351411 - DNA, 815 bp, Homo Sapiens
ctacaatccccagcaggcaccgcgcggtcaggctctctcttcccccccagtcttagtggcctgagcggcttgaccatggatgctgctgcaactgcagcaagaggtagggctcaggcgttgggaattgcaccgacaggcagtcgcacagaaaggcacacagatgtagtgggtgtgcactagcccttgacagcgaataggaggacagtacaggacatgagtcctggtgagggacccgaggagcaggacagagaagacggcccctgaatcccatttggccccttgctggctggaggtgtgaaaaccagcggtggaggcagccttcggggcctgcatttgagaataagggtgtcactagttccaggcgtctgctgaaagatttggaacagaagatgatggccactccgaaccagaccgcctgtaatgcagagtcaccagtggccctggaggaggccaagacctctggtgccccggggagcccccaaacaccccctgagcgtcatgactctggtggttccctgcccctgacaccgcggatggagagccactcagaggatgaagatcttgctggggctgtcggtggcctgggctggaacagaaggagtccccggacccagagcccagggcgctgctcagcggaggctgtgctggcccggaagaaacaccgacggacggccatcgaagcgcaaaaaggcactggcgaccataactggagctgagctgggctgagaaacaaacagcggggatgagaggcagagccaagaggggcatcccgggtccgcgaagagatgttcgccaaagggccacgccgaggccat

SEQ ID NO: 351412 - DNA, 150 bp, Homo Sapiens
cttcttaaatgacatttaaagctaaaagagaatcacaaagggtaagtctgatttaagacatttcacacatgaaagaaatcctggtttcatgcgtgttatgtcacaggaaaaactcatttagagtcaacattctgccctcgtgccaagctt

SEQ ID NO: 351413 - DNA, 721 bp, Homo Sapiens
ctgtcaccagagattgagaagcaatgctttactttctctgaaaaaaaccccaattcttccaattataaaaaagtggatttttttattagaaacagtgaatgtaaaaaggaagttgatttcagtatgtatcatcctgatgatgaagctgatgaaatgaagtctttattgggaatatttgatggtattttctaaaacaaacaaatactttttatattgataagagaaagaataaagacacctaatcacaaagcatgctttttatttttaaaaagtagttcataattgttcggatttttttctcctgtatttgattagctttgttcactttttgcaacaaaatgtatgggccgatttattttcccattatattgtaacttcttgaaaagctcttttacagtggctttgtttcaataagcccttaagttaagggctgattgcacttagaaataagttgcacttagaaataattatttggctattaattggattttgacaagaaccaatgtaaaatttcatttttatattttcttaacaagaagaaaaatattctatgaaagcaaagtaatgctaacttaatgaatctgcttattgtatggattaatcactaatattattcccatgtattttgttttactaaagatttttaagaatccagtggctatttgaacctactgttatctaactttgagcaacaataaatgaaacattaatcagtataggg

SEQ ID NO: 351414 - DNA, 1212 bp, Homo Sapiens
ggagcgaggcctgggtggcgatttcggcacgagggagagtatccggggtattgggcccaagcgggctgtggacctcatccagaagcacaagagcatcgaggagatcgtgcggcgacttgaccccaacaagtaccctgtgccagaaaattggctccacaaggaggctcaccagctcttcttggaacctgaggtgctggacccagagtctgtggagctgaagtggagcgagccaaatgaagaagagctgatcaagttcatgtgtggtgaaaagcagttctctgaggagcgaatccgcagtggggtcaagaggctgagtaagagccgccaaggcagcacccagggccgcctggatgatttcttcaaggtgaccggctcactctcttcagctaagcgcaaggagccagaacccaagggatccactaagaagaaggcaaagactggggcagcagggaagtttaaaaggggaaaataaatgtgtttccccattatacctccttcaccccagaatatttgccgtcttgtacccttaagagctacagctagagaaaccttcacggggtggagagaggattctaaggcttttctagcgtgacccttttcagtagtgctagtcccttttttacttgatcttaatggcaagaaggccacagaggtacttttccttttttagctcaggaaaatatgtcaggctcaaaccacttctcaggcagtttaatggacactaagtccattgttacatgaaagtgatagatagcaacaagttttggagaagagagagggagataaaagggggagacaaaagatgtacagaaatgatttcctggctggccaactggtggccagtgggaggtgatggtggacctagactgtgcttttctgtcttgttcagccttgacccaccttgagagagagccaccaggaaggcgcatcttagcagatgggaggaactgctgagagaagatgggcagaaagctggagcccctggagttggctgtgtctgtgtttgtgactgattactggctgtgtcttgggtgggcagaaactcgaacttgctatgtaatttgtgtctagttattcagaggagtaagatggtgatgttcacctggcaatcagctgagttgagactttggaataagacactggttttcatgcgctgtttttgttttaaagttatgaagaaaaaagtcaataaaattctaaaagtaacccaaa

SEQ ID NO: 351415 - DNA, 1953 bp, Homo Sapiens
  misc_feature (1607)..(1607): n is a, c, g, or t
  misc_feature (1674)..(1674): n is a, c, g, or t
  misc_feature (1678)..(1678): n is a, c, g, or t
  misc_feature (1710)..(1710): n is a, c, g, or t
  misc_feature (1806)..(1806): n is a, c, g, or t
  misc_feature (1843)..(1843): n is a, c, g, or t
  misc_feature (1855)..(1855): n is a, c, g, or t
  misc_feature (1886)..(1907): n is a, c, g, or t
cgcgggctttggaaggcggctgaacgtcaggccacccgccgctaagctgagaagggagagcgagcttaggaccgcctgcccggggcaaccccgaaccaagctttagccgccgaggccgcgtgtcccaaaggccagtcatccctcctctgtgttgccatgggaattcaaggcctggccaaactaattgctgatgtggcccccagtgccatccgggagaatgacatcaagagctactttggccgtaaggtggccattgatgcctctatgagcatttatcagttcctgattgctgttcgccagggtggggatgtgctgcagaatgaggagggtgagaccaccagccacctgatgggcatgttctaccgcaccattcgcatgatggagaacggcatcaagcccgtgtatgtctttgatggcaagccgccacagctcaagtcaggcgagctggccaaacgcagtgagcggcgggctgaggcagagaagcagctgcagcaggctcaggctgctggggccgagcaggaggtggaaaaattcactaagcggctggtgaaggtcactaagcagcacaatgatgagtgcaaacatctgctgagcctcatgggcatcccttatcttgatgcacccagtgaggcagaggccagctgtgctgccctggtgaaggctggcaaagtctatgctgcggctaccgaggacatggactgcctcaccttcggcagccctgtgctaatgcgacacctgactgccagtgaagccaaaaagctgccaatccaggaattccacctgagccggattctgcaggagctgggcctgaaccaggaacagtttgtggatctgtgcatcctgctaggcagtgactactgtgagagtatccggggtattgggcccaagcgggctgtggacctcatccagaagcacaagagcatcgaggagatcgtgcggcgacttgaccccaacaagtaccctgtgccagaaaattggctccacaaggaggctcaccagctcttcttggaacctgaggtgctggacccagagtctgtggagctgaagtggagcgagccaaatgaagaagagctgatcaagttcatgtgtggtgaaaagcagttctctgaggagcgaatccgcagtggggtcaagaggctgagtaagagccgccaaggcagcacccagggccgcctggatgatttcttcaaggtgaccggctcactctcttcagctaagcgcaaggagccagaacccaagggatccactaagaagaaggcaaagactggggcagcagggaagtttaaaaggggaaaataaatgtgtttccccattatacctccttcaccccagaatatttgccgtcttgtacccttaagagctacagctagagaaaccttcacggggtggagagaggattctaaggcttttctagcgtgacccttttcagtagtgctagtcccttttttacttgatcttaatggcaagaaggccacagaggtacttttccttttttagctcaggaaaatatgtcagggctcaaaccacttctcaggcagtttaatgggacactaagtccattggttacatggaagtgatagatagcaacaagttttgggagaagagangagggagataaaaggggggagacaaaagatgtacagaaatgaatttcctggctggccaactggtggnccantggggaaaggtgatggtgggacctagactggngcttttttctgtcttggttcaggcttgacccccaccttgagagagaagccaccaggaaagcgcatcttaaaccagatggggaggaactgcctgaanagaagatggggcagaaagctggaacccccctgggaantgggcctggggncccgggggtttgggaacggaattactgggcnnnnnnnnnnnnnnnnnnnnnncaaaaaaactcccaacttggccttggggaaattttggggggcccag

SEQ ID NO: 351416 - DNA, 1664 bp, Homo Sapiens
  misc_feature (197)..(213): n is a, c, g, or t
  misc_feature (247)..(263): n is a, c, g, or t
  misc_feature (1093)..(1093): n is a, c, g, or t
  misc_feature (1370)..(1382): n is a, c, g, or t
  misc_feature (1574)..(1574): n is a, c, g, or t
  misc_feature (1578)..(1578): n is a, c, g, or t
  misc_feature (1633)..(1634): n is a, c, g, or t
  misc_feature (1653)..(1653): n is a, c, g, or t
actcccgacaatttgtaataatttggaggggtgggattatttcccacactttttgggcttgtgctcaaccgcgtgttaggggggttcatctcccgcccgccttttttaaaaaaaagggggctatttaaaaagggggctaaatgtttttcaaccccgggggttggtaaaaccttttccggggaatatcgggtgacccnnnnnnnnnnnnnnnnnttttgttacccaaagcggtaacccccccccattnnnnnnnnnnnnnnnnntatcttccgggaaaaaaattggttatccatatccagggtttcccattaaagccaggggaaaggagggggaattccagcagtaccaagaacatttatggcacccaagtaaagcactttttttgaaacattcaggaacagtacaaataccacaaagtttttttacagtctaaattatttctgcaactatcaaatatagtacaaagcgacaatagtatgtgcctataaaaaagcagctcctttaaattatagtaaaaacgctttttgttctttttacagtgacaaagcatgaagactgaagacgacaggaattttatatttagtaacattttggccacataggcccctgacagtccgattcagagttcctgttctaggactcttcacaactgttctctgggaacgcagatcgacagtgactctgggctctgcatgctcagggggtcattcccactaggcagctaccgctgtgctgggcctcaccaccgtacagacgatgctaccctaggcttggcttcagcttctaaaacctgggacttcattacaccacggaggaactgggaaaccagaggccacggtaacttccacttttgaaattgtgcgggggtttgtaaaggaaatggggctacagcaacatgtattcttactctcgactgcattataaagcaccatatgtaccagcttgtttttgtgtattttgaaccgagtaagaatatccaaggtccagcagtcaactaaactttctatatagctcatcccagaaacacataccatcccaaagtctttatagcaaccaggctcaacctcataggtttgttttcaagttttttttntcttcaaactagaccttcgcagggaaatattatataactatggtgctcagttcaccaaaatttctactattctcattttggggaagaaaaaattattttcattttgaaaatgaatttgcatcacaatgctcttattaacatgcccattaactaacctaaatgtctttatacacctcaggcatatgcatatcttataggaggaggattagggaatagcagttttcttccttcccctgctccaaaagtgctacttagggaaatacatcctttgtgattnnnnnnnnnnnnnttgtatggtacatgtgcaagttctattcctgataagaataaaactgtgtccagtaatcaggataatgcacatgctaacatttgcacactacaccacaataaccatgtagtaaataatatactacatttgcacatagcagacacatgtagaaatcagaaaactaaggacctactcagaatatactggattttncccngtatatatatattaaatggaaacctataaaatatctgacccacattttacatctnnatttctcttcttcctttcngttatatttta

SEQ ID NO: 351417 - DNA, 468 bp, Homo Sapiens
  misc_feature (42)..(42): n is a, c, g, or t
aaaaattatttttggccccaaaaaaccctaggttacccgtgnaccccaagcctccttttgggcaagacccttgaacgtccacaaaacccgtaacgccttgcctggaagaaagggaaaaaggaagagttgccagcccacctaagagaagtccaaagcctgtggccctgccctggtggtgttttataggaactggctcagggaggctgcatgtcctttgttttcctgaggccttgttcccacgtggcctcccacttgaggcccaggaatattgcagcaatgccgaagagtgggtggacaaatagccttattattaacctaagttggaaacatggctttttgagtgtcttcattcacagatgcagtcacaaaatattaatactctttttttgaacatgacaaaacaaagtattcatttaaacctcctttgtccacgtccatggtaaaagagcacctcaggcaggggagaaa

SEQ ID NO: 351418 - DNA, 461 bp, Homo Sapiens
aagcttggcacgaggggaaaggcaaagcaagctgcacaaagggaagatggcccgtagccttgaaatgcactcttgctagccctccccattttggttattatcagcaaagatcagtgacatgttaatatattcggctattttactgtgaatataatggtaaattttaatagaaattgagttagatagcagtttctgaatctgaaagaaagtgacattgcttgcgaatgctcacagtagcacttaacattgtgaagttcaactcaatttttatttgctgtttcacagaaagcaataatccctcatattttatagtaccatctggggttacaaaaatcccgatgcgtctttgttgggacaagccgggatctcagggaaggagtgggagggggagcttccatcttcagtgggctttctgccctggaattttggaatttttttaaccagggcaggctttttaaggc

SEQ ID NO: 351419 - DNA, 573 bp, Homo Sapiens
gtagccagaaaaagtaataaatcctagcaaatacacagggcattcccaaatgctttcaggtaatatcctgcatcacccatgattcctgtagccttgccaagcggcaatgtgaaacaagacacacatacacaggttctgtagcagctactcaactttcccattatagcaaaaaagtatccatagataatatgtaaattagtgtggctgcattccaataaaaacttatagacactaaaatttgaatttcatgtaattttcagatgtcaggaaataatcttttgattatttttcccaaccatttaaaagccattttcagttcatgggccacacaaaaacaggcaggaagctgattctggctacgggccatagtttggcaacccttgctctagtagatttaacagaatatatgagcctgtaattaattaatggctcagtaacactaaaatatcagccaaatatcttacatctggaacctagactttacaaacattgagactgtctggaacaaaataaaaaagtaaaacttagacccagtaaaagtcaaaatgtccctctacaaaaagttacactata

SEQ ID NO: 351420 - DNA, 449 bp, Homo Sapiens
aagcttggcacgaggcaaataacaaattaaacccaccttcaaaggcagacaaaaatcatatcactcttttatgcttctaccagcatttgaaccacctccatatagacataattagttagaaaaagtcaggttaatatttttgtcagtgtctctgtgtgtgtgtattcaataagtttgcaaatatatctttggctcctgttaaggagacccaaactataatcctgctaaatgtccaagtctcctgtttatgactatgtaaaatcggaggctacagatgccctaaataccctcctatgccaaaatatctccaccatcacccctgcctagggtgtcagttcccaaactggaatttcccgcctcactcatttctctgggttaaagtccagcctccaggaagggccaagtaaaataccagattaatcttgaaaaggacaacttggtaatactca

SEQ ID NO: 351421 - DNA, 847 bp, Homo Sapiens
ggactctgtcccatcacatttcctataaggccaggagctgcaggcacaggcacgcccatcgatggaaagccctgaaatgcagctggtgcttgtgaggtaaatggtatatttgtgggtcccataaatacacctgcaccacaaaaagaaaatgaatgaagacagagctatcacgtgtagttgcactcatctctataatcacagaaaaattgcctttctgaactactcacagcaaacattttaattccagttggctgctcctactactcagaccaacccacacctaaaccctgagagctggttgtttctaggatgcagacaaatcagttattaacctgagtaaatttaattaagaaatgtaaatcatatgcaacagccacacaaaatatcttccactgtgaagaccaaactatgtagcatgacatcatacactgttttattgctgatttgtaccactggtcccccagtacgaaacagggaagtgagagctgactatatctcgcttcaataggtgtagtgggctgcccaacaattttagctcacatgtgaaatgcagctcattattttaaaggaaatggtgtgaaagattaaaactctgtaaacaataaggcttatgctaatattttgttatgattacaaaaaaattcatagattttttttaatccatgtggtaactcaagactgtttacctgcagagaaaatacactgtacgcagtcataaacttcatgcaaatcgtttcaataattcatcaaagataatccatgttctataagcttgtgaaacaacatttagtgatctatgaacagcttgttaattccaaataaagttctgtgaatccctgaaaaaaaa

SEQ ID NO: 351422 - DNA, 2650 bp, Homo Sapiens
  misc_feature (715)..(772): n is a, c, g, or t
  misc_feature (1715)..(1728): n is a, c, g, or t
agcgggtgcgtgccggcaggccggtcaaggaggcgggacacgtcggcgctaccaccgccaccgccgccgccgcccctcctcccgttccagctgccgctgccgcttcctgggctgagtccgcccgcggtcccggtcggcgccaggtgcgttcactctgcccggctccagccagcgtccgccgccaggcacgtagctgccccaggctccccgccccgctgccgagatggcgacgcgctcctgtcgggagaaggctcagaagctgaacgagcagcaccagctcatcctatccaagcttctgagggaggaggacaacaagtactgcgccgactgcgaggccaaaggtcctcgatgggcttcctggaatattggtgtgtttatttgcatcagatgtgctggaattcatagaaatcttggggttcatatatccagggtcaaatcagtcaacctagaccaatggacagcagaacagatacagtgcatgcaagatatgggaaatactaaagcaagactactctatgaagccaatcttccagagaactttcgaagaccacagacagatcaagcagtggaatttttcatcagagataaatatgaaaagaagaaatactacgataaaaatgccatagctattacaaatatttcctcctctgatgctcctcttcagcctttggtatcctctccttctctgcaagctgctgttgaccaaaataaattnnnnnnnnnnnnnnnnnnnnnnnnnnnnnnnnnnnnnnnnnnnnnnnnnnnnnnnnnnccggcaaaaccacttacagctgaaaagctgcagaagaaagatcagcaactggagcctaaaaaaagtaccagccctaaaaaagctgtggagcccactgtggatcttttaggacttgatggccctgctgtggcaccagtgaccaacgggaacacaacggtgccacccctgaacgatgatctggacatctttggaccgatgatttctaatcccttacctgcaactgtcatgcccccagctcaggggacaccctctgcaccagcagctgcaaccctgtctacagtaacatctggggatctagatttattcactgagcaaactacaaaatcagaagaagtggcaaagaaacaactttccaaagactccatcttatctctgtatggcacaggaaccattcaacagcaaagtactcctggtgtatttatgggacccacaaatataccatttacctcacaagcaccagctgcatttcagggctttccatcgatgggcgtgcctgtgcctgcagctcctggccttataggaaatgtgatgggacagagtccaagcatgataggtgggcatgcccatgcccaatgggtttatgggaaatgcacaaactggtgtgatgccacttcctcagaacgttgttggcccccaaggaggaatggtgggacaaatgggtgcaccccagagtaagtttggcctgccgcaagctcagcagccccagtggagcctctcacagatgaatcagcagatggctggcatgagtatcagtagtgcaacccctactgcaggttttggccagccctccagcacaacagcaggatggtctggaagctcatcaggtcagactctcagcacacaactgtggaaatgaaaactgcaatacaagtttcatccagaactaccacctgacattccttgctgaaacgcatctagttcccctgtttattcatatgcatannnnnnnnnnnnnnacccatttgttcatattaagaatgatctgattgaccgtgttggtctgtactgattcaatttgatgtggtgaaaagcaggttgataaatcattttatgtcaagggcagctttgctcatatttcccatgatttcatgtactgcattatttgagaagctgctcaacttgcaaaatcagttttcctctcaataaaattatagctctaatgtttgcatataagggaagtagttatcatgttagtaatacctctaatagtataaaccccaccccaaaattagccagtaatcctgtaggaaggtactgtatgatcaaatgtttaatcatataaatagaatgtaaatgtctcactgagcactgttttctagtgtatcaaaatgctcttatttcatcattcacttcactgtgctgttgttatgatgtgcttaacagggaacgtgattagtgaaaggaagataaacgtggatgttactccaaaacttcgtttaatgaatgcttaaagaattcaaattttatctgcctctcttgtaatttggatctcttcttaatgtacatagtgctaacatgaagacctttttctgcactatatgcaaacagggtaactaactaaaacaaagccactttcaatcttcaatccttgaaggtatatctaggtttatgacagtaattgtgtttacattttatggtgcctagtattgacaaaatgttatttccctacattaaacatgactccatagaccttttcatttgtgggtttttatttcctatgatgtatactgccactaaccttccaaaaattacttagtattgcaaagtcaggaatcatcaggaaacgtttagctgacaaaatacttgtcctgttttaaaaacttgttcaagtctaccaacctggttcaggtctaccaaattataagggcaaattgggag

SEQ ID NO: 351423 - DNA, 408 bp, Homo Sapiens
gaacattaaaatatagagacaggacagaatgtgttcttttctcctttaccagtcctatttttcaatgggaagactcaggagtctgccacttgtcaaagaaggtgctgatcctaagaatttttcattctcagaattcggtgtgctgccaacttgatgttccacctgccacaaaccaccaggactgaaagaagaaaacagtacagaaggcaaagtttacagatgtttttaattctagtattttatctgggaacaacttgtaggcagctatatatttccccttgggtcccaagcctggatactttaggccatcataacttcactaacaggggaggaagtaggctagtaggcaatgtggccttggattggattaggataaagattttctagtaagggcagccaaaaggaccc

SEQ ID NO: 351424 - DNA, 2791 bp, Homo Sapiens
  misc_feature (1657)..(1657): n is a, c, g, or t
  misc_feature (1660)..(1685): n is a, c, g, or t
gcgagatcctccgcagctgagtaattctgaggaaagggaattctccccgagtttcatcaactttgtcaacttgtgccttacgaaggatgaatccaaaaggccaaagtataaagagcttctgaaacatccctttattttgatgtatgaagaacgtgccgttgaggtcgcatgctatgtttgtaaaatcctggatcaaatgccagctactcccagctctcccatgtatgtcgattgatatcgctgctacatcagactctagaaaaaagggctgagaggaagcaagacgtaaagaattttcatcccgtatcacagtgtttttattgctcgcccagacaccatgtgcaataagattggtgttcgtttccatcatgtctgtatactcctgtcacctagaacgtgcatccttgtaatacctgattgatcacacagtgttagtgctggtcagagagacctcatcctgctcttttgtgatgaacatattcatgaaatgtggaagtcagtacgatcaagttgttgactgtgattagatcacatcttaaattcatttctagactcaaaacctggagatgcagctactggaatggtgttttgtcagacttccaaatcctggaaggacacagtgatgaatgtactatgtctgaacatagaaactcgggcttgagtgagaagagcttgcacagccaacgagacacattgccttctggagctgggagacaaaggaggaatttactttcttcaccaagtgcaatagattactgatgtgatattctgttgctttacagttacagttgatgtttggggatcgatgtgctcagccaaatttcctgtttgaaatatcatgttaaattagaatgaatttatctttaccaaaaaccatgttgcgttcaaagaggtgaacattaaaatatagagacaggacagaatgtgttcttttctcctttaccagtcctatttttcaatgggaagactcaggagtctgccacttgtcaaagaaggtgctgatcctaagaatttttcattctcagaattcggtgtgctgccaacttgatgttccacctgccacaaaccaccaggactgaaagaagaaaacagtacagaaggcaaagtttacagatgtttttaattctagtattttatctggaacaacttgtagcagctatatatttccccttggtcccaagcctgatactttagccatcataactcactaacagggagaagtagctagtagcaatgtgccttgattgattagataaagatttctagtaggcagcaaaagaccaaatctcagttgtttgcttcttgccatcactggtccaggtcttcagtttccgaatctctttcccttcccctgtggtctattgtcgctatgtgacttgcgcttaatccaatattttgccttttttctatatcaaaaaacctttacagttagcagggatgttccttaccaaggatttttagccccaaatctctcatattcgctagtgtttaaaaggctaagaatagtggggcccagccgatgtggtaggtgataaagaggcatcttttctagagacacattggaccagatgaggatccgaaacggcagcctttacgttcatcacctgctagaacctctcgtagtccatcaccatttcttggcattggaattctactnggnnnnnnnnnnnnnnnnnnnnnnnnnnccctcagcactgttacaagaggccatttaagtatcttgtgcttcttcacttacccattagccaggttctcattaggttttgcttgggcctccctggcactgaaccttaggctttgtatgacagtgaagcagcactgtgagtggttcaagcacactggaatataaaacagtcatggcctgagatgcaggtgatgccattacagaaccaaatcgtggcacgtattgctgtgtctcctctcagagtgacagtcataaatactgtcaaacaataaagggagaatggtgctgtttaaagtcacatccctgtaaattgcagaattcaaaagtgattatctctttgatctacttgcctcatttccctatcttctcccccacggtatcctaaactttagacttcccactgttctgaaaggagacattgctctatgtctgccttcgaccacagcaagccatcatcctccattgctcccggggactcaagaggaatctgtttctctgctgtcaacttcccatctggctcagcatagggtcactttgccattatgcaaatggagataaaagcaattctgactgtccaggagctaatctgaccgttctattgtgtggatgaccacataagaaggcaattttagtgtattaatcatagattattataaactataaacttaagggcaaggagtttattacaatgtatctttattaaaacaaaagggtgtatagtgttcacaaactgtgaaaatagtgtaagaactgtacattgtgagctctggttatttttctcttgtaccatagaaaaatgtataaaaattatcaaaaagctaatgtgcagggatattgccttatttgtctgtaaaaaatggagctcagtaacataactgcttcttggagctttggaatattttatcctgtattcttgtttgaattcctcctctatttaagatatatacatggaatcgaagtgtttatgtaatagttctatccttttgcctgcaggtcagttgtaataaatctaggatgtgatgatgactttgtaatttgattttctgaaatcagaccctgagaggggaaaatcttaaagtaaattacattaaattatctgtgcatttc

SEQ ID NO: 351425 - DNA, 1240 bp, Homo Sapiens
  misc_feature (1216)..(1216): n is a, c, g, or t
  misc_feature (1228)..(1228): n is a, c, g, or t
ttcttgatcccctctcctgtctcgtcttggtgctttcccttcctctctctgtcttttccgccactatctcttctttcgcctcttctacctgttgcccctcttccgacctcccggctctgtcactctctcctcgcacctctctcctgctgcatcgcgactccggcgccccttacatgctctctcgctcctcgctctccgcgtcctcctgtcgcgtcgcttcttccgcattatctcccccccacgtgccccttcttcctatactacgtcttctcgccactcttgcacccctttctccgtgtatctctcacctccattaggtcctcgcccttctatgtgcggctatacgctcagtccccatactctacggctacactcgtgttccctcgttcttcagcgctttcctgtgacccttccttcaatcggccgtgtcttacgacaacatcaccatctgttaggtaaggcaatttaccggagcacaaatggcatcgatgatcttactcatatactattctgtacttaatccctttattatttaaagccgggcttgtaatttttcgtctctaacaatttaacattatgcagccctgctcagtagagactcactcagcattatgacatcataaatttttaaatgccatattttattcaaggtgatacgaataataatagacatacactggaacagcagttgttgaaatacccagatttttcaccttggttactctgaccttgggtcagaacctaactttacagtgcttcagttttcccaccttttaaggaggataattactgatttccacgttaatttaaaagaacattatgaggattaggcgaacactttgtaatactttgcccaagaaaaagaaaaaatgttgttactgaaattataaggtattttattgtcttttagaacccttgtaattgaacagggagattatttttgaagtcttaagaaattactagatagtaatgttggaaacatgttgtggaataaatgagttctaaaaagcatgtgaaagagacacacaatgaggaaatagggagtttctcaaaatctaaacttgtacaggtatctaaacgttgcctcaagtaactcagatgtcttatttaaaatcatttagtgaaaaatgacatttaaagctaaaaaataatttagttgtactaattatggtaccataaagtgctttgacataaatttgaacctagaattggcagntctaataaaagnttttccactttg

SEQ ID NO: 351426 - DNA, 1362 bp, Homo Sapiens
  misc_feature (1254)..(1304): n is a, c, g, or t
ggtgctccttcccacaggcatgggagccagctcactccagttgccaatggcagctatgagagcattctcctgatccaacaggattgaagtaccgaagttccttgaccttgcagacctcgcgctttttcccaccaatgatatacagagtgtctgactggaatcgtggtttggtcctgcgagtctgccagacaggctgtgcatagatgctctggtggtattccagggcctcgttgacaagggctgttgcagtctcacttgcttggacaagggggtgggacagggcaactgtatggagagtatccacatccattaggccaaagcggatgtattgcaggagctcgtccatgtactggtagtggcagttgtgttccaaccacctcacagctagctgccagatctgctcttcactcagggaggtcaggcggtcgctcttcagcaccttcctgaagcaggcaatagggaagcgttagaacttcttctgggcggctcttcaggagttcagagagatgtttcactaagaaatcgatcactgccttctccaacaaagtgaggttaaagaggtcagcaagtctgtacagatccaagtaattaaagctatttaattcctggatgagatagtgggagcataaattgagaagctccaacagctgtaggtgactgcccgctgctagcacatcctggatcacacctggctccagcaaaatctgtcctgtgtatgcaaactccagagcctgctttaagccaaggctggtcacaccgtgcaaattaacctcatcagctccactttccaccatacaaagactgaacattgcccggaaatagtcactgcatgctgctaggactgccttgtgagcatggaatttctgttcctcagcaatcagggtgatgtcgcagaggatgccatcactcctctgctgattcagcgctgccaggacactgtcattgtgagattcggagtggcagagcctctggcctgtcagcatttcttgaatactgaggcagcgttcagacggcattttccagctgggttcctcaggttctcagccttagaagtgtgcagaggaatcagcaagcattccagccgatggggtgagcggtctgctgggttaggtgccagagacggcagcgcaggcaccggcctctccttgatgcacaatggctctgcttcgccccacgatgctgaggttaacagaacccgcagtagcttcgctctgctggttcggggatgcagtagcgaagacgagcgtcctagcnnnnnnnnnnnnnnnnnnnnnnnnnnnnnnnnnnnnnnnnnnnnnnnnnnncctgcgtgcgtgtgtgcgcgcgactgcctgcgcgctcccgaactgtcgcgcggggaac

SEQ ID NO: 351427 - DNA, 1226 bp, Homo Sapiens
  misc_feature (517)..(631): n is a, c, g, or t
cagctctgacaaaaccccgcctacaggtctggcaggatccgccttcttttcttctccgcggggtgattcagtccagtgattgggtttgtggctccaggcctcgcccacagacggacagacccctccctttcttccggcaaaaggaccgagccctggggtagtaaggcccccacactcctgttttttgcaagtacatttttgtccctcctccacccaggtatctgcctattttcttgctaatcccagaacctttccttttgctttttttaaggacatttgggaagttcctggtgtaggacccttctccctgggataagaaacctgcctgtaaacgctctgtaaatactcccttccacccatcccagcccctgggcagccgggcagaagggaatccaggctatggacctcccaagtccccgctccccgctcccctcggcggccccgccttgttctgatctgtgtgtgagtgtgtgtgaacttctgaaagacaatattaaagagacttagttgatttatnnnnnnnnnnnnnnnnnnnnnnnnnnnnnnnnnnnnnnnnnnnnnnnnnnnnnnnnnnnnnnnnnnnnnnnnnnnnnnnnnnnnnnnnnnnnnnnnnnnnnnnnnnnnnnnnnnnggcgggcgcggcgcgcccctatactataatcccctcccaccgccgaggcaggcgcagcaccttcaggccgccaccctcctcactctcttcttatctgactacgacgcggcgcgccctcctctatgtgcgggatcgtctttattattatagacgagcacaacgacgcggcgcgcgatctcacctcatacaaaggccaatagcgagacgcggacagacgaagaacatcctgatgtcggcgcgcagaccccacggcttgtccgacagacggggagccccactactaactgtctgtcgccgctgcgcggcgcgagacgcccgccgtcgcgccgccaacacccactcgtcccggcgtgcgcagtctattgatgcataccgccccgccagctggagccgcgcgtcatagcaataccaaaaaaactagccgctcgacgcggcgccgagaggagagacggcgcgtgagtacacaacgcaccgcgcgtctccgacatgtgtctgtgtccgccgggcgccgcaagttgagagttttgtgctgtcccgcgcgaggcgagcgtgtctcaatacgattcgcggcgacgctgctaagttaagcataggg

SEQ ID NO: 351428 - DNA, 344 bp, Homo Sapiens
tccggcggggcggggacttgggaggtccatagcctggattcccttctgcccggctgcccaggggctgggatgggtggaggggagtatttacagagcgtttacaggcaggtttcttatcccagggagaagggtcctacaccaggaacttcccaaatgtccttaaaaaaagcaaaaggaaaggttctgggataaatctggtgttcacattacacaacaaaatgattgtacttcaagaaggaaagaaacagcaactcacgtggggcatggttttttagaactgatcaattttctgggttcttctcctggaggtgtgcagagtccagagaagccagtgctggacaagg

SEQ ID NO: 351429 - DNA, 482 bp, Homo Sapiens
accatttatgatttattctcctatgtgtcatatgaaaggcccaggggctttatcttttacctagtaggcaaccccgggcatttctgcatttgtgcccagctaacactacaaaatagacttaattagagaaatttagaccccagaattgcagcttcaacaacacaaaacaggaaagctagaagaggttgctgtgtcaacctacaagatagtgattcttggaagttggtatggaccagaaagcattcccaggacatttaggctatggctgagttctctaagactcagggtgggaattataatccctggtctaagctgatatgaaagtttctatgtgtgaaaatatggagttatatgctttgagattttctgccagttaaactaaaacaagatcatactgtaaatgtttgtaacttgcttccccccactgtatactgtaaacatctttgcatgtcaataaatatgcctctacaacataaaaaaaa

SEQ ID NO: 351430 - DNA, 788 bp, Homo Sapiens
  misc_feature (654)..(685): n is a, c, g, or t
gtacccaaatgtctaatggacacccgaatttggaggaagttaagaattgtaacacctggcatggacatgatccattgcaaaattaaaccattccaaaccagtctctgagctttgaagccccccccacctcaaaatgtcccttcaggaagactgtaaagcagtgtggtgagatgggttctggtgtcagacaaaacagctatgcccaccttcctgctgtgggaatctaggaaaaggtatttaacctctctaattctcattggagggtacccagaataatgagttctaataaaaatataagtaactaactcacaagatcactgtgagaagaggaaaaaaacttgtaaaatatggtgccaacacagtgtttgacatagaataggcactcacaaaacgtttcctgccttctcttttgtgagataactttgatgtaaatgaaacagcctaacaatttaagagttatgaatgtagtagcaaaattaaaattgaacaaataatacattttgtctgagattctgagtcatttctgtgttgcggaacgagtatctgatacagctggaacaggagaaaaatagtttctcttacattaaatagcctataggaactcctgcctcctttatgtagagtgcgcacatttggccatgagcgtgcacgtgnnnnnnnnnnnnnnnnnnnnnnnnnnnnnnnnctctctctaggtactgttatctttgtgtgtgtgtatgccttacttctgtaactagattacaaactcaaggatattttcttttttgccattttaagccacagat

SEQ ID NO: 351431 - DNA, 1454 bp, Homo Sapiens
  misc_feature (801)..(877): n is a, c, g, or t
  misc_feature (925)..(943): n is a, c, g, or t
  misc_feature (945)..(948): n is a, c, g, or t
  misc_feature (950)..(953): n is a, c, g, or t
  misc_feature (955)..(955): n is a, c, g, or t
  misc_feature (960)..(1097): n is a, c, g, or t
  misc_feature (1104)..(1150): n is a, c, g, or t
  misc_feature (1185)..(1185): n is a, c, g, or t
  misc_feature (1194)..(1194): n is a, c, g, or t
  misc_feature (1406)..(1406): n is a, c, g, or t
ccccagttgaagcagtgcatacgcagtagctattattgtgttatctttatttctcttcatgttagaaaccaaagtcttcgcggcgtggcatggggctgagagagggtctgggttatctccttctgatcttcaaaacaagagagagaccttgaatacactgactcttccaccctttttttatctgggaaaggagagcaagaggtcccgagtcccctcctagtctttcatcctgaatttgcacagaggaaagcgggtgcccggcatggccatcctgatgttgctggcgggatccccatacaccttgtccttctccactgatactggcagctcggctcctggacccaagatcccttgagtggaattctgcagtgcaagagcccttcgtgggagctgtcccatgtttccatggtccccagtctcccctccacttggtggggtcaccaactactcaccagaagggggcttaccaagaaagccctaaaaagctgttgacttatctgcgcttgttccaactcttatgcccccaacctgccctaccaccaccacgcgctcagcctgatgtgtttacatggtactgtatgtatgggagagcagactgcaccctccagcaacaacagatgaaagccagtgagcctactaaccgtgccatcttgcaaactacactttaaaaaaaactcattgctttgtattgtagtaaccaatatgtgcagtatacgttgaatgtatatgaacatactttcctatttctgttctttgaaaatgtcagaaatatttttttctttctcattttatgttgaactnnnnnnnnnnnnnnnnnnnnnnnnnnnnnnnnnnnnnnnnnnnnnnnnnnnnnnnnnnnnnnnnnnnnnnnnnnnnncttgtcgccgcctcgctcaaacttcaacatctgcgcagaatgagtaannnnnnnnnnnnnnnnnnncnnnncnnnncnccccnnnnnnnnnnnnnnnnnnnnnnnnnnnnnnnnnnnnnnnnnnnnnnnnnnnnnnnnnnnnnnnnnnnnnnnnnnnnnnnnnnnnnnnnnnnnnnnnnnnnnnnnnnnnnnnnnnnnnnnnnnnnnnnnnnnnnnnnnnccgaatnnnnnnnnnnnnnnnnnnnnnnnnnnnnnnnnnnnnnnnnnnnnnnngcgcacgaaacaccgatagagacgccgggggcaancaccccaangccccacccacattctccccccttacttacttatctccaccccgcgccccattgttgataccacgcccatggtaaatcgaccattagcgagcccccccttgtgatacccccacaaacgatattccccacccgtatactaaccgcgctatctgtcacccgcatacgataatactcccaagcaccgcaatccccactgcgacatcactcatganctctcacccaatatattatccatccttcggcctctttgtcacactcat

SEQ ID NO: 351432 - DNA, 892 bp, Homo Sapiens
  misc_feature (372)..(503): n is a, c, g, or t
  misc_feature (824)..(852): n is a, c, g, or t
ttctagaggtccctccacactggcacactggggaaaggagacactgcatctgtcactggcacaagtaagagctgttcacaattacaatgcctaaaggaaatactttgaacaaaaggtgcaagtcacaattcaaatagaacagaatctggttaaacatttctcatttaaacaaaaattccttttctctttatttattaataatgataataacaataatatcaacatttaccaaaaacaatttctacatgatcaagaattaaaatataggggctgagggtacccagtggggaagaggaggttaggagagaggcagggcccaaggcaacctcctacacttcttccctgtgacaaagaggctgaaagaggagagcnnnnnnnnnnnnnnnnnnnnnnnnnnnnnnnnnnnnnnnnnnnnnnnnnnnnnnnnnnnnnnnnnnnnnnnnnnnnnnnnnnnnnnnnnnnnnnnnnnnnnnnnnnnnnnnnnnnnnnnnnnnnnnnnnnnnggagaaacaatcctttttatagcacaatataaaatgagaatgaaagatgccatagaaagcatagtgcactgctgttgggtgttcagtccatggataaaaccagcaggatgataaaggcaaccaactttccaggttacaagaggggagctgagttatccaccaaaagcaaaggctcaaattgagacatcctaactggcaaaccatctatgccaggtcattctcagcctccgtgccaaactcttcatatgatcttggctaggacagacatgttttccgtggatcccagcagtaaagacctctctgcgttccaggcttgggggnnnnnnnnnnnnnnnnnnnnnnnnnnnnnaagtgccagaagccgtcacccttcccctcgtgccaagctt

SEQ ID NO: 351433 - DNA, 594 bp, Homo Sapiens
  misc_feature (559)..(559): n is a, c, g, or t
  misc_feature (580)..(580): n is a, c, g, or t
aagcttggcacgaggacaagcaactaactaccactatcatagggctactgaacatggagagtcagtctttattaaaagacagttgcaacaattgcatgcgagggtttctgtataacagaatatatgatttttaaactatttcctgggttgcaaaagaacacatttagtaagaaacaacaatcttttcgcatctttttgaaatgcatatttgtgctgggtgtaaagaagattacaggaagggcattacaaatctggtcaaaacacctgtccatttccatcattgtactaacagaagtctgtactatttgggtcagtttgtatggaagcataaatattccctaaattcctgcagttagtcttcatagaaagcaagctttctcaacatgccatctctgagatactgatgacgtttgccttactcacattccttctctttcctgtgtaaaatgcagataggatgaccaaatactctggggataaactggaatatgcctgtctttggtggctaaaaatattccataaaatcttaaggggtgtcccaaaagttctttattgtccntgtttggtaatcactttcttnacttctacacacca

SEQ ID NO: 351434 - DNA, 567 bp, Homo Sapiens
  misc_feature (419)..(419): n is a, c, g, or t
  misc_feature (444)..(444): n is a, c, g, or t
  misc_feature (450)..(450): n is a, c, g, or t
  misc_feature (466)..(466): n is a, c, g, or t
  misc_feature (474)..(474): n is a, c, g, or t
  misc_feature (484)..(484): n is a, c, g, or t
  misc_feature (496)..(496): n is a, c, g, or t
  misc_feature (515)..(515): n is a, c, g, or t
  misc_feature (529)..(529): n is a, c, g, or t
  misc_feature (542)..(542): n is a, c, g, or t
  misc_feature (549)..(549): n is a, c, g, or t
aagcttggcacgaggtgcactataggagcctgtccacacagtcaggatccgagggattgaaggtctgttctaggtcggcctgttcagccaccaactctacaagttgctgtcttccactcactgtctgtaagctttttaacccagacagtatcttcataaatagaacaaattcttcaccagtcacatcttctaggacctttttggattcagttagtataagctcttccacttcctttgttaagacttcatctggtaaagtcttaagttttgtagaaaggaatttaattgctcgtctctctaacaatgtcctctccttgaagtatttgggctggaacaacccacctaaaagtcccttttggcatccatttttaaatatacttaataggggcattgttcactagggttaaattcttgcaggngtcatctggtctggcaaaagttgcngtaggnatattccggccctcgngggagggnttttctcccngggggccaatgnggggcagttcttttaatgncttgacgtcggaanggtacactttcancccacgnggggccaaccgtggcttg

SEQ ID NO: 351435 - DNA, 1342 bp, Homo Sapiens
aggctccacctttttccctgaaaagaaaaagaagtgttatataaaacttcaggccccgtcaaagtatcaaccttattttaaattttaacttttccgcatacagttggctgtaaaaaatctgaagttttcgcccaaactggtaaaaattgtccaacaaacatccacaaaactgaactgtagttgggttcttcattaccagcattctctccattttctgcctttctgaagggagggcatgtattcccaataacttatcaaaatagttcccttaaatttgtttctagtttttccatgtcaccacaaaatgaactcatctccgccaacaatttcaatacctccaactgtatatcaagaccttccactggggtagtcaaggtaccgaggttagggagaacctgctcacagaaatatgtcacaaaccttgtggaatggacatttttagagaagaggggtactgcctgccgagtgcactgtaagagcctgtccacacagtcaggatccgagggattgaaggtctgttctaggtcggcctgttcagccaccaactctacaagttgctgtcttccactcactgtctgtaagctttttaacccagacagtatcttcataaatagaacaaattcttcaccagtcacatcttctaggacctttttggattcagttagtataagctcttccacttcctttgttaagacttcatctggtaaagtcttaagttttgtagaaaggaatttaattgctcgttctctaacaatgtcctctccttgaagtatttggctgaacaacccacctaaagtcccttttgcatccattttaaatatacttaataggggcattgttcactagggttaaattctgcagagtcatctgtctggcaaaagttgcgttagtatatctggccactcgagggaggattttctccagtgggcaaattgagggcagttctttaattgcttgacgtcgaatagatacatcttcatcctcacagaggtctaactgtgcattgatagcagaatcagccaattctggaaaatgcttaaagaatttcggaataaattgagctgctaatcgcttttccttagtaccacctttcacaccatccaatatcacttgataggcatctttatgctggcccacttgctccgtggcatcggccaggatgccataattgcggtaaagctcctctactgtcggcatggtgagcgacaagcccagggcccggttccgctatccttgtcctgaccggcgccaccgccgcctcggaacttctccaaacccactacccgcactattacacctccagctgccgccagtgcagccgccagtcaccgcgcacatcccg

SEQ ID NO: 351436 - DNA, 647 bp, Homo Sapiens
  misc_feature (443)..(443): n is a, c, g, or t
  misc_feature (448)..(448): n is a, c, g, or t
  misc_feature (468)..(468): n is a, c, g, or t
  misc_feature (473)..(473): n is a, c, g, or t
  misc_feature (479)..(479): n is a, c, g, or t
  misc_feature (516)..(516): n is a, c, g, or t
  misc_feature (523)..(523): n is a, c, g, or t
  misc_feature (533)..(533): n is a, c, g, or t
  misc_feature (552)..(552): n is a, c, g, or t
  misc_feature (569)..(569): n is a, c, g, or t
  misc_feature (574)..(574): n is a, c, g, or t
  misc_feature (583)..(583): n is a, c, g, or t
  misc_feature (595)..(595): n is a, c, g, or t
  misc_feature (617)..(617): n is a, c, g, or t
  misc_feature (637)..(637): n is a, c, g, or t
cactgtaagagcctgtccacacagtcaggatccgagggattgaaggtctgttctaggtcggcctgttcagccaccaactctacaagttgctgtcttccactcactgtctgtaagctttttaacccagacagtatcttcataaatagaacaaattcttcaccagtcacatcttctaggacctttttggattcagttagtataagctcttccacttcctttgttaagacttcatctggtaaagtcttaagttttgtaggaaagggaatttaattgctcgttctcttaacaatgtcctctccttgaagtatttgggctggaacaacccacctaaaagtcccttttggcatccatttttaaatattacttaatagggggcattgtttcactaggggttaaattctggcaggaggtcatctgttctggcaaaaggtggcgttaggtantatcntggccactcgaggggagggnttttntccatngggccaaatggaggacagtttctttaattgccttgangtcgganaggggtacancttcatccccacagagggnctaaccgtggcattganaggcnggatcaggnccattcgggggnaaggtttaaggatttcgggggntaattgaggccggcaacggntttccctggg

SEQ ID NO: 351437 - DNA, 323 bp, Homo Sapiens
acctttttgtttaacttctctcttcactgcatcccaagccatctacaggcatgcacacttattaggaaagcaggtttgaggtaacgagactttcactatattttgctttgacagaaggaaagaggaagagtttctattaaaatctgtcacttgagtgatgtcattcaagtcctattttaggagataaaaacacctttggggactggttaaagtcccccagaaactacaataaagaacaacttttgttttaactcttaatcattttgtaattttgactcaatccttttctggaccatttttgttaataaatatcaaagtgtaaa

SEQ ID NO: 351438 - DNA, 346 bp, Homo Sapiens
aagcttggcacgaaggagctgctgaagcaaaagttgcagtcatacaagatctctcctggagggataagccagatgttgggtttagtaaaggggacacattatcaggtagtcctgtcaaaaatactttgagatgatacacaatgtggatgattgtggcttttctttgaatcatcctaatcagttcttttgtgagagccaacgtattctaaatggtggtaaagacataaagaaggaacctatccaaccagaaactcctcaacccaaaccaagtgtccagaaaaccaaggatgcatcatcttgctctggcctcttttaaattccctctcttggaaattggatatggtaa

SEQ ID NO: 351439 - DNA, 657 bp, Homo Sapiens
  misc_feature (333)..(346): n is a, c, g, or t
tttagtcctgtctgatgatggtagctggctctctgtagctgatagatggctagagttccatccaaatccttgaccacgacttcatggagatttgaataatctatttgatgagatttctatttcaataacccacctctatcaccccacattcatatccctaaatttgaccctctgggccgagtcacattaccttcaggagacttgatcccagtagactgaggtcttccctttcagcagaaagatttcatttccctggcttgccagtggcactgatttccgaacacccaatgagtttaatattctttcctccttggcattactgccccagcctcnnnnnnnnnnnnnngtgtgtgtctaataaccaggaaaaaaataaagcttaggttttaaaaagttttaaaaataatctgtttcagaaactgtcaaatgtaccatatttgtattaagagttgttgggaatttttgtacaatgaatttacatttatttatggtgacatatttacgcttgtgatcaaataatgatgttaaattcttaaatcatatttgctatgcagctgaagatgatattttgatttgtattttgggggtacctgtgttgagttgataaacatttccatcttcattaaaactgcttccaaactagtaaaaccacccaaa

SEQ ID NO: 351440 - DNA, 1788 bp, Homo Sapiens
  misc_feature (1241)..(1367): n is a, c, g, or t
  misc_feature (1760)..(1760): n is a, c, g, or t
atcatcccacctatctgtggttgcttcccaagacctcctcccaagatagacatctcctacccagtgcccttgtgtgaccccaggactcaagtctcagactgtgaacagatgtggccatgcccagagacgccagcctggccagaagggcatgcctcagcttactacttcatctctcctggttccctccctgcagtgccccgggtgtcatcttctcccactctgggtaccagggattctaccacataggcttcccaaagccccattctaactcccctctctcagggaagccctagagagaggtccaaaaagcattcacagctgtatcacactctatgcaggtggggtaggagactgatcaggcctgctgtggggaagcagtatgtatgaacacagccagaaatgtcatagtccaaacaggatgctttcaggccatctcagctgcttgatggtgagatggttcccttattccttcaggaaaggcttagcattgggccacataggggaagcagctttgaacaaatcagtcatagcactgcctatagcattagccagtgaccaaattagggacaacgtcttggcacagaattgcttatcaaggaacatttccacaagaaagaaaatattaaggggttatttccacagaagcccaaaacgtcttgggaaacacagaggtgaggaggaggaatagtaattgtcaatgagcttttaataccaagatacaccccctgcccccaaagaagagtcctcttttagggaatcagaaccttcattgtcctagaagctgaaagattcttggaacattttagcttttactctcaacttgctgttctctttacattccttaagttagactttcgggtgtggcttctctcccaggggtaacatttacttccattttctagaccgaaccaaaagtcttctgcagaatctcccaccgagtgtggtaagaaggaaggacaaaaggctttaggatataaatttcatgttacagagcatgtcattgtcaaaggaaatctgtggccctgagattttaagaacataaaatgtgacatttgatatttctccagcccagggaagtaagatggttagcaatggttgccttaatcaaatggtcccatttttaaccccaaaggaagtgcccacagcaagaggtttgtgtgatgcacttatgtcctccggtgaggaaagggggccacatatgaaaggccccttaggtcagatcctgagagtagcacatttgnnnnnnnnnnnnnnnnnnnnnnnnnnnnnnnnnnnnnnnnnnnnnnnnnnnnnnnnnnnnnnnnnnnnnnnnnnnnnnnnnnnnnnnnnnnnnnnnnnnnnnnnnnnnnnnnnnnnnnnnnnnnnnnctgtaagggaatcattctggtcaccttgagctttgagctaccactaagccatgaaagaaaatacatcatacagggaagagagaagggaggaggttccaagtagtaactggcagatcctcctgtctggaggtaccaccttctattctggtttctgacttttccttcttgatgaccatagatgtgttccagaggcaaaagagacacattatcccagatggcagaacatgctttcaaaacatataaaacgtcaaagttccagatctttctacattttaaatcctgtctgaggatggcagctgactttatgtagctgatagacgactagagtttcatccaaatacctgaccacgacttcatggagatttgaataatctatccgatgagatttatatntaaacaactcaactcctgtcgaaacaaa

SEQ ID NO: 351441 - DNA, 481 bp, Homo Sapiens
  misc_feature (23)..(23): n is a, c, g, or t
  misc_feature (29)..(29): n is a, c, g, or t
  misc_feature (44)..(44): n is a, c, g, or t
  misc_feature (63)..(63): n is a, c, g, or t
  misc_feature (153)..(153): n is a, c, g, or t
gaaaaagaaagaaacccggcccnggtganaaaaaggcccccccnaactcaattgcccctgccngtttcccaaagcccatccaatatggtaacatatttaccaaaaaccttgaaaacccccttgaagaaagaaacccgttttccaaatgtgcantgctatacgaagtgaagcccagtaaactagatactgtaaatctagatattgtaccctagacaaaatatcattggttcctatctctttttgtatcctgttgtgcccagggaaggtttataatcccttcctcagtatacactcactagtgcacgtctgaaatagtatcccacgggagatgctgctccacgtctgaggtcaccctgccctgtgtggggcacaccaccgtcagcaccaccgtttttacagttactttggagctgctagactggttttctgtgttggtaaattgcctatataaatctgaataaaaaggatctgtacaaagaaa

SEQ ID NO: 351442 - DNA, 764 bp, Homo Sapiens
  misc_feature (38)..(38): n is a, c, g, or t
ggggagggataagctacctgccccccaaacacaggggnccccccggacaatacccgtggcctttagaaacaaaccctaggttcctgagggaatgacactgcaaagtcttacagaaatcccttttatgagatagcccagtcccagaataaagcctttgcggtacttgtcaacaagcaagaagccttctgaagaggtagatgaaagcagtatttcacagcaggtgtgctgcccgacgtgacgaaagacatgcatgcgcctctcagcacagaccagaagatcaactgttgttgaaaacagtccatggtggtgagaagagatgtcggccacattactaggtgcattatttcaattttattgtattaagaacaggaaggactgccatttctttaaataacaaactatacaaataaaaaggagcagaaataatatggaatgtttttgacgaaaacaaacttatggattcaataaataatataaaatgcctttgtgctaaaatagaactcttgtttcttatatatatatagttcagtgatctttatgctatccagaaaaagccagatctattataattaaacatagaaaaataccatttaacaataaaactaaaaaaatggccagtgttgagcttataaaccacatataatatatacatcatttaatataatcaactaagaaagtaaatttcaagttctttgtaatacaaatacacaattgaaaatattcctccattccctacccttacatcaaagacatctgatatttag

SEQ ID NO: 351443 - DNA, 1266 bp, Homo Sapiens
  misc_feature (33)..(33): n is a, c, g, or t
  misc_feature (42)..(42): n is a, c, g, or t
  misc_feature (53)..(53): n is a, c, g, or t
  misc_feature (801)..(801): n is a, c, g, or t
  misc_feature (839)..(839): n is a, c, g, or t
  misc_feature (904)..(939): n is a, c, g, or t
ctgaatgtgttaatgaatttaatgagtctggcnaaagttgcnaattatatgcnagtttgtcctatcgcttataaatgtagtgtttccattggatttattttatgctaggttatattaagttgaaatagtctgtgattaaatgtcctcatccatgcacagaatatgaatggcagcaaatctttgtgcaagaaatttgaaacttattgggaaaagcctcccagtagattaattgttcatatcaggagatttagggtaagtcatgggttgaggtgtcagatagtaatatctatttgttttgtacatgtatatatctaggaactttgtaacaacacatctttaataatgttaaaggttttttcatttttaatattttaaactaaaaactgtacttcaatctcagtttctaaaattaaaaataatttatactgatctataataattttttctttttgaaagatttcattaaaaactgatggggaacttttcaaatgaggggccatggaaccaatatttggggatgcattgagaacccccagggatccttgtggtatttggaaccttaattgggttggaaaaggggaatttttcttgaacgcggacccggaacccaaattttgccctccccacggggaagggaaaacccccttctcccctttttcctcccgtggcccctttccccggagacaacacccccgggcccctcttttaagatttatttctgccatatatatattcttttttacaaggcggtgcctcttttgcgacacacaaaaaaaattattccggggccaaggtcgcccncaacaacatttgggggcggacaacaagacaaatcctcncccctctttgcggagccccggcggggggcagagttgaagaaaacaaaaaatagaagacgaccgcnnnnnnnnnnnnnnnnnnnnnnnnnnnnnnnnnnnncaagatcctagttccaggctggataacacacgttagcgcagcgcgcgagcagcgaactcacatatttgtaccggtaccgattgtggttgagtgcgcgcgagctatatacctcgcccacctcagctcctgtagcgtcgcgccactctccacacctaacgatcacccctgctatcccacactcgaatcgccctctcacccctcgtatcgcaaccctcctgttcggcagtactattcactgcacacaactccactgcattgtgttctcccgcgcttgcgttgccccgctccccatcagcctagcaccaccgctgtaatcgctatttttat

SEQ ID NO: 351444 - DNA, 361 bp, Homo Sapiens
  misc_feature (12)..(12): n is a, c, g, or t
aaaggtaaattnaatgggctggtgtatctggaaagagggaagacttgatcctcagccccgaggttggtgcagggcctcccctgtgtgactctacctgcactctgtgtttatatcctgtgccctaaagtggccaagcccaggtaaattcctgctggccttggaactccaaggtttggctgaccagcagactggctccctgactcttcagcctcaaatccccagtttttgatgaatgtggatttctgtctgtaattaaaagcaatgcaacaagttggctcttgagaatggcagtaaactgagggccctaagagtgtggtctgcagggtcaagaataaagattacagattatatttacttgaaa

SEQ ID NO: 351445 - DNA, 448 bp, Homo Sapiens
  misc_feature (56)..(56): n is a, c, g, or t
  misc_feature (133)..(133): n is a, c, g, or t
ccctccccctccccccaactcccttccctagcccaacaaaatgtgggggttggaanaaaaaacccataagaaagggaaaattaagtgggccgggtgtaacctggaaaagagggaaagacttggatccctcagncccccgaaggttggtgcagggccctccccctgtgtgactcctaccctgcactctgtgtttatatccctgtgccctaaagtgcccaagccccaggtaaattccctgctggcccttggaactcccaaggtttggctgaaccagcagactggctccctgactcttcagcctcaaatccccagtttttgatgaatgtggatttctgtctgtaattaaaagcaatgcaacaagttggctcttgagaatggcagtaaactgagggccctaagagtgtggtctgcagggtcaagaataaagattacagattatatttacttg

SEQ ID NO: 351446 - DNA, 701 bp, Homo Sapiens
  misc_feature (465)..(485): n is a, c, g, or t
  misc_feature (625)..(625): n is a, c, g, or t
  misc_feature (658)..(658): n is a, c, g, or t
aacctggggcctctgcagagacagcagaagagaaaccaaagtatttataatccattcctgaagctggaatatgtgagtgagaggatgagtccgatggtacagcctgccctcccaatttcaaaaccacctggttattttccagtgcaactgttaccaatgggcactcttttcttgagaagttcatttatacctcatcactgtttccaggagaaaaatctttacccaaatagcaatggtggcagaacttcctggaaacagattcagtgaccaaatacccaagtttacatcagtgcctgcaggttccctggaccttccttctcattcattctttcggtgccatctctatgccgttgggaagaagatggagtctgacccactgaatgtagcacagtccaaggacttctctaagatattggtcattggaagttccttcacaccaattctcctcctgagacggaatctccnnnnnnnnnnnnnnnnnnnnnttctagcccaaggatgacataggagctggctcccagagggcccacagaggcaattgggccatgccttccctatccagagcttgacaggggacacaaccagtgttaaaatatcctgttggcctttgttcacttcctctttnggagggcagaagcaagacctcagttggaccttnttactgtgaaagccattggatgtctcaggggaaaatttcaacc

SEQ ID NO: 351447 - DNA, 555 bp, Homo Sapiens
ggcaaacactctatatcaagacccccctccccgagagctggttgttaaacatttgtcagcacaccactgctgctgggagacagagagaagaaactgatacacgtgagcactgaaacatcttagttccagggaggtagcatttgtgttgtatttctcagaagcaagtgtcctagtgtaatgtgcacaagtggcatgaagtttaacacctaaaagactgcttctctgcttgtcctgtcctaacttctgtgatttcaacacttgagaaagatgtttactttgctactaaacttattggagtgatttgtaaagttcactgtcacctgtgggcagtagttcagctaaattccctccaggaaagtggactgtagcttttcctgcctaactggcaaaatgaaaatatgctgaaaagaatacatcttaactaggcaccagaatagctcatttccaagtggtttatacagcaataacagtgttaacttctccaacagagacgaaatcatttataaatgattgttttgctgtttttgctttttattaaaattattactatggaaa

SEQ ID NO: 351448 - DNA, 475 bp, Homo Sapiens
  misc_feature (362)..(362): n is a, c, g, or t
  misc_feature (382)..(382): n is a, c, g, or t
  misc_feature (387)..(387): n is a, c, g, or t
  misc_feature (424)..(424): n is a, c, g, or t
  misc_feature (453)..(453): n is a, c, g, or t
  misc_feature (459)..(459): n is a, c, g, or t
gcaaacactctatatcaagacccccctccccgagagctggttgttaaacatttgtcagcacaccactgctgctgggagacagagagaagaaactgatacacgtgagcactgaaacatcttagttccagggaggtagcatttgtgttgtatttctcagaagcaagtgtcctagtgtaatgtgcacaagtggcatgaagtttaacacctaaaagactgcttctctgcttgttctgtctaatttctgtgatttcaacacttgagaaagatgtttactttgctactaaacttattgggagtgatttgtaaagttcactgtcacctgtggggcagtagttcagcctaaattcccaccaggggaagtngggactgtaggctttttccnggccntaactgggccaaaatggaaaatatggctggaaaaggnttacatcttaacttggggcacccggattngctccntttcccagtgggtttt

SEQ ID NO: 351449 - DNA, 677 bp, Homo Sapiens
  misc_feature (22)..(22): n is a, c, g, or t
  misc_feature (34)..(34): n is a, c, g, or t
  misc_feature (68)..(68): n is a, c, g, or t
ccgagccttgtgttgcctccanagtggggggaanccaagaggaaaaggaacccctatggaaaaccccnggcatgtggttaaagtgccgacacattccaagtttgtttatgtatcaacatttataggtgaacaaaattaaggtttaaacaagttgaagtaaagtgtcccctgggtcacacaagctttaagttacctggatttgaactggatctgactcagactagtaccattcacattagcccacgctgccttccaaaaggtgtacccctgacaacgagtggtgaatatggtcattgtgatgcctggcttgtgcagtgggaattaaaaatgcatcaccttaagagatggcactcgaattccgcttggggagggaactgtcttcgtccaggaaaatgtttttaataagccacccatggtaaaaggtgaagtcatgacggttagggtgttggcaggaatcaaattaagaaaaggaatggctatccatccggttgtatgtgagaatataaatggatctgctctgtcccaaggacaggagacagggaccacgtggagtggaaggtgagtggagattcctccatagtatataaaaagaacattctataaatggggtgccgagtctgcactgttgtagcatctgccattccttcccacgtcactgagacacacgcaggcacaca

SEQ ID NO: 351450 - DNA, 320 bp, Homo Sapiens
ctatttcctgctttggtagatattcccacctgaaatatatggaaaattcaactgaaagaattgtttaaggccctttttcttaggtctcatgaaatcatatttcaagcaatatatgcatattactacataccattctaccgaataactcaaagatatcccaccttgtttttaggagatattgtcaaaaacactgacaaataccaaagatttcctagtcatgcttacgaatggataaaattgtttggagaactaaacaattctactatgtataattcaatgttgggattttgttaaaaaataaaattccttcaaatcttaaa

SEQ ID NO: 351451 - DNA, 561 bp, Homo Sapiens
  misc_feature (454)..(454): n is a, c, g, or t
aggcttggcacgagggtaaaaaatgcataaaatatacacataaaatagtcaatagttgctcatttgttttagccactgaaaattgactgagttctccacttggaacatgtaaggtagtgttgactttacttgaaaggctgacatccatttcagataacggtgtctctttttattttatcatcctattatattctcttctacgtgatttgccttctctgcttttcatgttgtgtaaaattttcatatttttctaaaagaaattttggaacatgaagaatgcatacaagcggtctgcagacccatctaaactttgttagtagactttatatctcactgcggctcaatgacctgggaagataaagctggccctgtctgttccatcagaacaacagggaatttcccgagttcagggcaaacagaaggtttgcttttgtctggatacttcaaatttctnctctcaatcactcagattctccagataattgcctggcttttttcttggtactagaggagtgaattatctactttctggaggccaattaagttttctaaaccactagt

SEQ ID NO: 351452 - DNA, 683 bp, Homo Sapiens
  misc_feature (14)..(14): n is a, c, g, or t
aagcagccaaacgngccctttgaacccattcaaatacccccagtttagctccctacctttttagtctccgtgagaaagacaagcttgttgcattatcatattcctcttgtgttgaccagctcaagatcagccccaatatgcaaattgctttaatgccatattacggcagttgatttagacatttgcccagtgcaccaaaccatgagagattgtccgacctaatgccacctggcagatgtgtacccagagatttttctgtagctccatgtttcccataaagggcattggaaatgccacagatgaagatcttcctttggaaccaggcacatttggcccccttctcagtgactgcactgtggaactctccttaagaaaatattgaaaacagcttaatgctttcatatagtgaccgacatttagttgaaaactactgctgcatagcaaatattgtgactcttcatgtgtccacaggagctcttgtgtgggtttaaagctatgaagtgtattcacattgtgaagttttaattatctttattgaaattaattgtgtaaaaatggtatgtgctctattaggtattcagtttgtatgtgaattctatatagaaagtggtttttgttctttgagtttgttttatttcttgaagattacaataaatatctaagagactatattccgaaaaagg

SEQ ID NO: 351453 - DNA, 454 bp, Homo Sapiens
aatttcctgtagctcccaggtttccccaaaaagggcaatgggaaaagccacagatgaaagatcctccctttggaacccaggcacatttggcccccctcctcagtgaactgccacctgtggaactcttcctaaagaaaataattggaaaacagcttaatgcctttccatatagtgaccgacatttagttgaaaactactgccgcatagcaaatattgtgactcttccatgtgtcccacaggagcctcttgtgtgggtttaaagctatgaagtgtattcacattgtgaagttttaattatctttattgaaattaattgtgtaaaaatggtatgtgctctattaggtattcagtttgtatgtgaattctatatagaaagtggtttttgttctttgagtttgttttatttcttgaagattacaataaatatctaagagactatattcctgaaaaaaaa

SEQ ID NO: 351454 - DNA, 688 bp, Homo Sapiens
cccattaaatatgaatgggcacacccctcaacaggtcaaatcctcccagcccaagcacccatagagagaactgaaggttttaatatgatgaaacacatggccatggtcatcctagaaccaactgtcttgcatcaattttagtgaataagtcataacttgtttttcttcctaagggtttcatgacttactccactaactgaatgaaaaggcaaagtacaatattaaaatgaatgctttgccttagaaatggcaagtaggagtttaagacggttattctaatttaaaattcacatacataaacatttatagctttttgttatctagcaactaggcttcagttcttgattttgcatctcagtgaagttccaggccaccaattagcattaaacaagggagtttgaggatgaatatatgagtttatgatggcattacaaagtatttaatgattctgatttgttcctcttatatcaccagtgtggacaactgagaattgaaagtgaatacaacattagctacaacctaaaaatacattggtattttagaattcccagggttgacagtgttgaatttgtaaataaaatacaagattgagtaacaataaaatatacatacaagtacagaggtgaaaattcttagtagacatgtcatgtgatcaacctttctgagaagaaaaacatgacttttccta

SEQ ID NO: 351455 - DNA, 551 bp, Homo Sapiens
aggagccatacctcttccatgtttgattcccacagcactgagcatatgaggttcaataactatgtgacaactaactaaaatccaaccacacccttaaattatcattctaaatattggctacctgcttcccattttttaaaaaatttggcacaaagttgtcactaatctcccctattttacccaccttcacttgacttcttcagtggattttgagagctaagaacaaatttcagtctatcacagttacattcaggccacatatcacccacatagaccaaatccatttaatatgattggcacatcctcacatgtcaatctccagccaagcaccatagagagaactgaaggttttatatgatgaacacatggccatggtcatctagaaccaactgtcttgcatcaattttagtgaataagtcataacttgtttttcttcctaagggtttcatgacttactccactaactgaatgaaaaggcaaagtacaatattaaaatgaatgctttgccttagaaatggcaagtaggagtttaagacggttattctaattta

SEQ ID NO: 351456 - DNA, 1593 bp, Homo Sapiens
ggacagtagagaagatttgtataaaagaaataggaacaaagcaaagcttctctttgactatgtctattgagatgccgtatgtgattgaattcattttcagtgatacacatgaactgaaacaaaagcgcacagactgcaaagctgtcattagcaccatggaaggcagctccttagacagcagtggattttctctccacatcggtttgtctgctgcctatctcccaagaatgtgggttgaaaaacatccagaaaaagaaagcgaggcttgcatgcttgtctttcaacccgatctcgatgtcgacctccctgacctagccagtgagagcgaagtgattatttgtcttgactgctccagttccatggagggtgtgacattcttgcaagccaagcaaatcaccttgcatgcgctgtccttggtgggtgagaagcagaaagtaaatattatccagttcggcacaggttacaaggagctattttcgtatcctaagcatatcacaagcaatacccacggcagcagagttcatcatgtctgccacacctaccatgggggaacacagacttctgggaaaacactccgatatcttagcttattgtaccctgctcgagggtcacggaacatcctcctggtgtctgatgggcacctccaggatgagagcctgacattacagctcgtgaagaggagccgcccgcacaccaggttattcgcctgcggtatcggttctacagcaaatcgtcacgtcttaaggattttgtcccagtgtggtgccggagtatttgaatattttaatgcaaaatccaagcatagttggagaaaacagatagaagaccaaatgaccaggctatgttctccgagttgccactctgtctccgtcaaatggcagcaactcaatccagatgcgcccgaggccctgcaggccccagcccaggtgccatccttgtttcgcaatgatcgactccttgtctatggattcattcctcactgcacacaagcaactctgtgtgcactaattcaagagaaagaattttgtacaatggtgtcgactactgagcttcagaagacaactggaactatgatccacaagctggcagcccgagctctaatcagagattatgaagatggcattcttcacgaaaatgaaaccagtcatgagatgaaaaaacaaaccttgaaatctctgattattaaactcagtaaagaaaactctctcataacacaatttacaagctttgtgggcagttgaggaaaaggggatgaggaatgagtcgccattttcctggatattccaaaagtttctgaacttattgccacaagaagatgtacgacttccatgccctacatgagctggcagggggagccccaagaagccgtcaggaaccaggtctcttttagcatcctctgagtggcagaatcacgtatatccaaaagaacacataggaacattccattgttccaaaagaaaaatggattatctcagccagaagtttctgaacgatttgaaagaggatggataaggtgtataccagataacacatcacatatgaacgtgaaggtgtggaaaaggtattgaagtacaaatgaaaagaagacaagta

SEQ ID NO: 351457 - DNA, 460 bp, Homo Sapiens
  misc_feature (94)..(94): n is a, c, g, or t
  misc_feature (252)..(252): n is a, c, g, or t
  misc_feature (258)..(258): n is a, c, g, or t
  misc_feature (391)..(391): n is a, c, g, or t
  misc_feature (404)..(404): n is a, c, g, or t
aagcttggcacgagggaggcctagaaatggggagcatgtttcctgttcccaaccagcgaggtgtcagtaaatcaccaggagcgcggagcagccncctgcccgggaccatagctggtgatcccccatagtgggcaaccatgcccagcctgcttccttgattggccaagtttggggtgagggggtggttgggttttccttagggatggcagccctattggggtctgtgggtgctcagggctgcgggccgcatgnctgctnaccaggccctgcccacctatgctcgctcctttctctctgtcagcgttggggccttcgtgaagacctgggctgcccttcatccttcttcctggggcatcatccttcaccgttcagcctgggtcttttaaacctnccggtgaatgggntgcttcggtgggccccacacccaccaggggttccccgagggaaacagccgccatcc

SEQ ID NO: 351458 - DNA, 841 bp, Homo Sapiens
  misc_feature (21)..(21): n is a, c, g, or t
  misc_feature (49)..(49): n is a, c, g, or t
  misc_feature (57)..(57): n is a, c, g, or t
  misc_feature (64)..(64): n is a, c, g, or t
  misc_feature (83)..(83): n is a, c, g, or t
  misc_feature (88)..(88): n is a, c, g, or t
  misc_feature (285)..(399): n is a, c, g, or t
  misc_feature (416)..(450): n is a, c, g, or t
attggggtaaaaaatgtccanccctccaaccctgcaaaagtgtccccantccgaccntagaaancctgaaaagtcctaaaaantaacntcctgtaatgttaaattaaaaacctaaactgcctgtttgaaatttgaagtaatgttttgtcctggaggcctagttggagatttttttcctccccttcctagcaacaaattggcctaagtggtcaacctctgtggctcacagttttgtaaaaaaagcatacagaaaagaaactaggctgggcacagtggctcatgccnnnnnnnnnnnnnnnnnnnnnnnnnnnnnnnnnnnnnnnnnnnnnnnnnnnnnnnnnnnnnnnnnnnnnnnnnnnnnnnnnnnnnnnnnnnnnnnnnnnnnnnnnnnnnnnnnnnagacactgtctctcttnnnnnnnnnnnnnnnnnnnnnnnnnnnnnnnnnnntctggaatttggatattattctgatagtgttaagctggaatgggaggagtggtggagtttaggattcttggtcaagactttttcaagatcataagcactaatccacattagctgttggtataagcagccttcaaaaacaccacaaaggggagtcaacaattcgagtgtaaactgatggctcagggccttctctgccctttactagccttcatgatctgtcgggtctcagcagctcagggcacaggaggaggtgggtctcctgactggcctgtgcattctcccaaacaagatgtttaagactcttctttatctcgtcacaaatacacagctttgaaataccattagtctttttctctaggatataattagaaaaagccaggcatggagatag

SEQ ID NO: 351459 - DNA, 1018 bp, Homo Sapiens
  misc_feature (21)..(21): n is a, c, g, or t
  misc_feature (27)..(27): n is a, c, g, or t
  misc_feature (57)..(57): n is a, c, g, or t
  misc_feature (63)..(63): n is a, c, g, or t
  misc_feature (69)..(69): n is a, c, g, or t
  misc_feature (77)..(77): n is a, c, g, or t
  misc_feature (106)..(106): n is a, c, g, or t
  misc_feature (120)..(120): n is a, c, g, or t
  misc_feature (781)..(896): n is a, c, g, or t
  misc_feature (913)..(947): n is a, c, g, or t
aaggaaaaattcccttggccnaaaatncccccaaccttaaacctttggaaaaggcangaattncatggngtaaattnaaaaatttggccagcttggttgtaggggnagtacctacacagnccacccacacaaacatttaaaatatactgtgtatatattatcttacaaaaatcgcatgtgtaagggaataaggcctttatttccagagcatcttaacataggattaatatgggtatattcatcttttatattttagacttcaaattctttaacatctcagctattaacattatgcgtagtacctaagacaacatatgagtactggcataacacaatttcaactacagtgcttggttgcattcacatgacgtaccatctagaactgaccaaacagaatttcagaactgcccaatttaaagacctgttaagaaaataaaatgcaaccccgtcatatgagcccagtttgtctctcagagcgttgctatatatactggaagcctgacacttcagagtatgtacttaaatgaagtatttggtaataatgtcagcttcagcctgcaaagtgttctagtcagcatagaaatctgaaagtctaaaattacttctgtatgttaattaaaactaactgctgtttgaatttgagtatgttttgtctggaggctagttggagatttttttctcccttctagcaacaaattggctaagtggtcaacctctgtggctcacagttttgtaaaaaaagcatacagaaaagaaactaggctgggcacagtggctcatnnnnnnnnnnnnnnnnnnnnnnnnnnnnnnnnnnnnnnnnnnnnnnnnnnnnnnnnnnnnnnnnnnnnnnnnnnnnnnnnnnnnnnnnnnnnnnnnnnnnnnnnnnnnnnnnnnnnagacactgtctctcttnnnnnnnnnnnnnnnnnnnnnnnnnnnnnnnnnnntctggaatttggatattattctgatagtgttaagctggaatgggaggagtggtggagtttaggattcttgg

SEQ ID NO: 351460 - DNA, 500 bp, Homo Sapiens
tcatttctgagcagtccccgcagcgcaaacttggccagttatccttttggagattgagttcccccagctccgtttcctcctatcacaatcactgcatttccatgtagattctgctgtgtctaagaatacagtggctgagggctggccatccctgtgcccttctccatggcagccccagaatggtgctggtgactcccgatacacctggaatgctaggtttctgggttctgctcatatcactgccacctgtgagccttgagtgagccactggcagttccggagcttccttctccctggagtaatctgagatactcacactctctgcttctgggagcaagtatgagtattaattaccagcccaccccagaaccagtgaggaggtggctctaggagtgctccatgagagtgtgtgatgggataacacaccccctggaaagaccagaagggactcaggaatgaagtggctggccagagccccacaccttcagctaggtgggaga

SEQ ID NO: 351461 - DNA, 446 bp, Homo Sapiens
acagttcagcgtcactcaacagaggagccatggctaatcatcttataagcaatgctctgcttcgtccgcatggtactaacaatccctataatacattgcttggggaaccggcggtctgtaacaacccttctgtcagcatgtacaacgcacaagagccctacagagagacaagtatgggagtaaagctaaacattgcatatcaaataggggcttctgaacaatgccagggatacaagtgtcatggatactctaccactgaatggtaaccatggcaatagttacagcattgccagcggcgaattacctgagcaactgtgtgcaaatcatagaccgtggctattaaccataacgagaccgccctaggagaaaaaaggttctggaagggaacttcactttcccaactattatccctttctttacctggaccaaccatggaggcggttccc

SEQ ID NO: 351462 - DNA, 696 bp, Homo Sapiens
  misc_feature (17)..(17): n is a, c, g, or t
  misc_feature (26)..(26): n is a, c, g, or t
ctcgttggttatcaaanggtaaaaanctctcactgtggtcttgggggaatccgcccttctggtataatggtgtggctggtggttctcggtggagtatactcttgggggcagcaaaggagcatcagattcctcatgaatgagttccaggcccaaactctcctcgtggttaaacgaggtggcatcatccaggacaatggcatcatcttcccttccactgccaaggttattcaccagcttgttcatcagatccctgttctgttcactggagcgctcatggttgttcaggtaagaagggatatagttggaagtgagttccttcagaatctttttctctagggcggtctcgttatggttatagccacggtctatgatttgcacacagttgctcaggtatttcccgctggcaatgctgtaactattgccatggttaccattcagtggtagagtatccatgacacttgtatccctggcattgttcagaagcccctctgaaaaagattacaagatactatgacatttatatccaacaagccatagaacacacacacaaacacagaagcaaaaacattcattgactatgaaatatgtataaattgctagcatttacttaagtataaaatgtttggaaggaaacagaaaatactattaaatctatatatgtgtataattggaccagtgattgaaaccatataaatg

SEQ ID NO: 351463 - DNA, 406 bp, Homo Sapiens
  misc_feature (12)..(12): n is a, c, g, or t
  misc_feature (23)..(23): n is a, c, g, or t
  misc_feature (50)..(50): n is a, c, g, or t
gttggattatgnggacaataaangaatcagacaacaaaagcgtctaaccnctattaacatatatttatataagtcgattcataggctttttagtttttaaattgtgagatgaactgtttttaataactacatcatctatatgtgatgcaataaaagtgaactaaaaaaaattacatttgatatgcaatgtttagctttactcccatacttgtctctctgtagggctctaaacgacagcatgaagaaaaggaaagaaaaaacaacaagtaagcttacagcgacagtagaagaaacatgagtaaaaagcaaattgatgatatgcagaaaaaagagtcaaaggaaataatttccactgccccaaaattcatgagtctgggttacatgatttaccataattaaaaatact

SEQ ID NO: 351464 - DNA, 693 bp, Homo Sapiens
  misc_feature (24)..(24): n is a, c, g, or t
  misc_feature (73)..(73): n is a, c, g, or t
  misc_feature (478)..(478): n is a, c, g, or t
ccctcaaggaaaagaagttcccgngccccaaaatcctccctcgtggttaaaacgaggtggccaacaacccccngaacaaaggccatcaaccttcccccttccaactgcccaaggttaattcacccagcttgttccatcaagattccctgttctgttccactggagcgccccatggttgttcaggtaagaagggatatagttggaagtgagttccttcagaatctttttctctagggcggtctcgttatggttatagccacggtctatgatttgcacacagttgctcaggtaattcgcgctggcaatgctgtaactattgccatggttaccattcagtggtagagtatccatgacacttgtatccctggcattgttcagaagcccctctctgttgagtgacgctgaactgtttatgtctccagtaataaaggaagactctgactgctttcgaaccgtgtcattccacattctacggatntcgctctgtgagcctgtggagtagcgtccaggagttcgagaaccagatgttttccctgaaccaatggaactctctgtacttttgccactacagcaatgtgttcgcaggcatttcccatactcttttcgtaccttcttctgtaggacacaatggaaaataaatataaacattcctgtagagaattgaaatgtgaagagatagcatgatgctgctca

SEQ ID NO: 351465 - DNA, 568 bp, Homo Sapiens
  misc_feature (24)..(24): n is a, c, g, or t
  misc_feature (94)..(94): n is a, c, g, or t
cgggggtaaaaccaggtggccatnacccccggacaaggccaccaccctccccctccaactgccaagggttaatccacccaccttgttccatcanaatcccctgtccctgttccactggaaccgcctccatggttgttccaggtaaagaagggaataatagttgggaaagtgagttcccttccagaaacctttttcctcctagggcggtcctcgttatggttatagcccacggtcctatgatttgcacacagttgctcaggtaatttcccgctggcaatgctgtaactattgcccatggttaccattcagtggtagagtatcccatgacacttgtatcccctggcattgttcagaagcccctctgaaaaagattacaagatactatgacatttatatccaacaagccatagaacacacacacaaacacagaagcaaaaacattcattgactatgaaatatgtataaattgctagcatttacttaagtataaaatgtttggaaggaaacagaaaatactattaaatctatatatgtgtataattggaccagtgattgaaaccatataaat

SEQ ID NO: 351466 - DNA, 1008 bp, Homo Sapiens
  misc_feature (436)..(555): n is a, c, g, or t
  misc_feature (576)..(600): n is a, c, g, or t
  misc_feature (686)..(695): n is a, c, g, or t
  misc_feature (848)..(957): n is a, c, g, or t
cctatgtgcaacacgaagcttccagaaccataaaatatcccgtcgataaggaaagaaaatgtcgttgttgttgtttttctggaaactgcttgaaatcttgctgtactatagagctcagaaggacacagcccgtcctcccctgcctgcctgattccatggctgttgtgctgattccagtgctttcacgttggttcctggcgtgggaactgctctcctttgcagccccatttcccaagctctgttcaagttaaacttatgtaagctttccgtggcatgcggggcgcgcacccacgtccccgctgcgtaagactctgtatttggatgccaatccacaggcctgaagaaactgcttgttgtgtatcagtaatcattagtggcaatgatgacattctgaaaagctgcaatacttatacaataaattttacaattctttggnnnnnnnnnnnnnnnnnnnnnnnnnnnnnnnnnnnnnnnnnnnnnnnnnnnnnnnnnnnnnnnnnnnnnnnnnnnnnnnnnnnnnnnnnnnnnnnnnnnnnnnnnnnnnnnnnnnnnnnntggggggccccccggcccccnnnnnnnnnnnnnnnnnnnnnnnnnggggcccgggccccaaagggaaagggaactggggtttattttttccaaaagaaatccgggcaaaaaaaaggggttggtttcccccnnnnnnnnnncccccgggggaaccgggggtttttaaaaaaaccccaaggggggttccggggccttttgtggctccctacaagggggcccccggggggctttatttaaaatttggccccgggggcgggagattttcggaaaaggtgggtggaattctttatcannnnnnnnnnnnnnnnnnnnnnnnnnnnnnnnnnnnnnnnnnnnnnnnnnnnnnnnnnnnnnnnnnnnnnnnnnnnnnnnnnnnnnnnnnnnnnnnnnnnnnnnnnnnnnggggaaacaacggggcggcgaaaaaacttgtccctttttggcgcccgtttt

SEQ ID NO: 351467 - DNA, 1542 bp, Homo Sapiens
aagcttggcacgaggcctcgtgccaaaaaatgggggcttgggggactcagagaaggcaggcaaggcctggagtgcatagcagatggcctcgggaagaaggaatgaggaaggacaggatccggagagggtgctcccaggaggagcgatggggcagcgggtcctggaggggcggcacggttcaggcgggtgtcaccgcacctcacacccgagcagccgtggccaccaggtggccgccctggccctgctcccctcaggctggtgttgtccacagggaacaccatgaccgtgtcctacatgtcagggctgacgctggggtccgccgtggcctactgcacctacagcctcacccgcgacgctcacggcagctgcctgcacgcctccaccgccaatggttccatcctcgcaggcctctgagccagccccgcccactgccagggacgccgagggcctgaccaggggccccgaggcctgagggcccctcccctgtccccacctcagtgcctgcggggccctgagcctccccctgtgccagcagccccactccctcagggtccagccatgccccaccctggactgaagttctgcaaagtcctccgaggaccggaacacgtttctgcgacccggggctctggccagcactgtgttctgcgtttggtctcatacctgcgtctaccttccatctgtgtccagcggccccggctccagcccagccagcactctgcagggtcacacgcaccgtgtccccacccaggacagcagacacccgccaaaatgtgcgcccccagtgactccacccccggccctcatcacccacccgcactgatcggggcaccgcctggcccagcctccaccagggacccctcctcatgaactctggagccctgagaagagaggggcaaccccccaccttctcaccctcagagcttccccttctgtcctcattcttaaaaactgcttctcccaaacataaccccttatccatgaaggagtccgaaccctggggtccaaatgaaccaacctgcggtctgcatcaacctctgggaaaccacagcagtgatgccagctgggcacgtcaggacctccccacacacccacacgatgccacaggtcagggggctgtgcctgactagggagccctcccattgccttcctggcccgggatagaagaggggaggtaagtctgggggctacgaagccgggcccccacaccctggctgaagtcagcttgacctaggtcttgaccctcatccagcaagggactcgacagacccaagggtccctggaacgtagggaggggctgggggtcactccagcccgggcctcccagaacaccaggcccgtgtgggtggcaccctgaggtcaggggatcctaagggtgtccttccagagacggtgtttccagggggaggaccgcccccgcttccagatccccggccccggctgtgactgccctgtttcacccctgctgtgtcccatcccccgtctgtccactaactgtaccgcaccggccattaaaagatgaaggcagaccgctaaaaaaaa

SEQ ID NO: 351468 - DNA, 1517 bp, Homo Sapiens
gttgcattagaaaaacatcaataattcatatttaagttttagtagttactactgatttgataatcacttaaattttatatatcttaatgtattttttcagactcctaattaattcccacattcactgtaactaggggcatagtccattctgttaggattatatcctctccttagaaatgttttccatcctgttgtggggatttggtattaatgtttcttcattgattatggaacttttgttccctgaagctagttaactgtgtctaaagttaaataaatacagcagaatgattgttttagcctgctcgaactgatacaaatccctgaaaccatgattggcatatgttagataacaaatgaggatgtctaagaggcatatgctgctttggaggtgtagtgaacgtgtgtacagaagttttcaatcttaactatatagtgttagtgtgatgctatactattggaaaaatagcagcttttttctattttataagttgtatgcataaacataagatttgtaatgtttcatttataaactgccttcttcaacacatgttaatagtgttttctcaaagtattgatagtatgtcttccagaatttcacaatatgcttacagtaaatatttcctagcttgttgaaatgttcaattctttgttggctttcttcttgattctgtgggggtgtataacaagcctgaaggacattgtaatcatttcttacaaggtgaaaattaagaaagattgtgtatgagagcctatatagttgttttatccattatcatctttgattaagactttaaaaaaatgctatttccagttaatgcatttggccctattgaattttcagggaccagaaaacattaaaaagttctgcatcttataatggtaaccaattaagcttgagattgttctgaaagtatcaattgctttaaaactgttgtaagtacagttggcaagatctccaagctgaaacttccacgttaaaacttttgcctgtaagaatttgcacatgaatgttaatggaaaacacaaaacttaagatggcccaaaacaaaagccacaaacagttcatcatttggtgcttagtctttgtaagggctctctgtggtttgacttaccccagctaccgttaaatgaggacaaatcaccttaaaacatgttcatttgattcataacaaggaaaattgggtctatgattttttgccaatcttagcctaaaagaaattgctttagcttctggtcagcactgattaaaatgtgaatagtgaagtggctatcctaaactggtttatctccacccacactatcatagatttcttaggtaaatacaattcttatctagtggtattctacttgtattcagaatactgtattaaaattttactatttcatttttgtattctgtgcttattttttttgctcacgcatgtatgcttagtataaatgtgtcacttctaaagttttgtctctgacttttagaaataaatttcagaaaaattgtttcaaaagattttgaaagc

SEQ ID NO: 351469 - DNA, 2002 bp, Homo Sapiens
cgagcaccaggcggcggcggcggcggcggcggctggagcagcccgggaggaggaggcggcgagaatggcagcggcgtcgtgggcgcggcggagatgagcgcccgcgaccccgggcccagggcggcacagccggagtgggcgggggtcccgatgcaggcccgaggggggccatggggcaggtcctgccggtcttcgcccactgcaaagaagctccgtctacagcctcctcaactcctgattccacagaaggagggaacgacgactctgattttcgagagctgcacacagcccgggaattctcagaggaggacgaggaggagaccacgtcgcaggactggggcaccccccgggagctgaccttctcctacatcgcctttgatggtgtagtgggctccgggggccgcagggattcaactgcccgccgcccccgcccccagggccgctcagtctcggaaccacgagaccagcaccctcagcccagcctgggcgacagcttggagagcatccccagcctgagccaatccccggagcctggacgacggggtgatcctgacaccgcgcctccatccgagcgccctctggaagacctgaggcttcggttggaccatctgggctgggtggcccggggaacgggatccggggaggactcttccaccagcagctccaccccgctggaagacgaagaaccccaagaacccaacagattggagacaggagaagctggggaagaactggacctacgactccgacttgctcagccctcatcgcccgaggtcttgactccccagctcagtccgggctctgggacaccccaggccggtactccgtccccatcccgatcgcgagattcgaactctgggcccgaagagccattgctggaagaggaagaaaagcagtgggggccactggagcgagagccagtaaggggacagtgcctcgatagcacggaccaattagaattcacggtggagccacgccttctagtggcggacctgctgtactggaaggacacgaggacgtcaggagtggtcttcacaggcctgatggtctccctcctctgcctcctgcactttagcatcgtgtccgtggccgcgcacttggctctgttgctgctctgcggcaccatctctctcagggtttaccgcaaagtgctgcaggccgtgcaccggggggatggagccaaccctttccaggcctacctggatgtggacctcaccctgactcgggagcagacggaacgtttgtcccaccagatcacctcccgcgtggtctcggcggccacgcagctgcggcacttcttcctggtagaagacctcgtggattccctcaagctggccctcctcttctacatcttgaccttcgtgggtgccatcttcaatggtttgactcttctcattctgggagtgattggtctattcaccatccccctgctgtaccggcagcaccaggctcagatcgaccaatatgtggggttggtgaccaatcagttgagccacatcaaagctaagatccgagctaaaatcccagggaccggagccctggcctctgcagcagccgcagtctccggatccaaagccaaagccgaatgagaacggtgtctctgcccgcaggacgcctgcccccagcccccgcagccctctggccccctccatctcttgtccgttcccacccacccccctcctcggcccgagccttttcccggtgggtgtcaggatcactcccactagggactctgcgctaattacctgagcgaccaggactacatttcccaagaggctctgctccaggagtccaggaaagacgaggcaccttggccgcggggcctgctgggacttgtagttgcctagacagggcaccaccctgcacttccggacccgccgctggaggcgccgtgaggcgttggtgtctcctggatgctactagccccaacgccggggctttgcatggggcccaggggaggcctgagcttggatttacactgtaataaagactcctgtggaaa

SEQ ID NO: 351470 - DNA, 661 bp, Homo Sapiens
  misc_feature (142)..(194): n is a, c, g, or t
  misc_feature (267)..(380): n is a, c, g, or t
  misc_feature (483)..(483): n is a, c, g, or t
tgcaccttcaaataggcaaaagctcttcaacttctcaactactgtgaaacaactacacgagaaagcaacaggctggggagacggggggctaactattctcacgatttcttgggacaccaatgggcaggagccaggtcagaannnnnnnnnnnnnnnnnnnnnnnnnnnnnnnnnnnnnnnnnnnnnnnnnnnnnagagagaggaaaacatctacatccaggtcagctcacccacacataacagtaccagaatttcctggatatttannnnnnnnnnnnnnnnnnnnnnnnnnnnnnnnnnnnnnnnnnnnnnnnnnnnnnnnnnnnnnnnnnnnnnnnnnnnnnnnnnnnnnnnnnnnnnnnnnnnnnnnnnnnnnnnnngttaacatgccaaaggacacgaagctagtgggagtcttaaagctcaggttttaaaccctactctctcttgtctctttgagtctccaatgtcatcaggatgggnccactgaggttcttcaaacctcagttccacctgttattacataagaatgagggacttacagaaaaaaactatactatgctggtgaaatccacgaaataatgtaaatggggctgtgtctctttcaagagatcaagggaactccctaaagacaggatatcaactttattttaattattaa

SEQ ID NO: 351471 - DNA, 1962 bp, Homo Sapiens
ggtaactggcaacccatctcttaatccgtcagtatctctcccagggtcattaatagccacctcatctaccgctgccacctccacatctctccctcatcccagctcaacggcagctgttctctcagggctttctgcttcagcaccagtctcagcagcacctttccccctcaacctgtccactgctgttccctcacttttctctgttactcaaggacctctgtcatcttcaaatccctcctatccaggcttttctgtctctaataccccaagcgttacccctgctcttccctcattcccggggctgcaggcgccctctacagtcgcagctgtcacaccactacctgtggctgccacagccccatccccagctccagtcctcccaggattcgcctcagcattcagttccaatttcaactccgctcttgttgcacaagccggtttatcatctggacttcaagctgcagggagttctgtttttccaggccttttgtccctcccgggtatccctgggtttcctcagaatccttcacaatcatccttgcaagaattacagcataatgcggctgcgcagtcagcattgttacagcaggtccattcagcttcggctctggaaagctatccagctcagccctgatgggtttcctagttatccttcagcgccaggaacaccattttctttgcaaccaagcctgtcccaaaagtggggtggcagtgaatactttttaacttttattcttccttcagagcaacatcagaattgcctgagaactgcaatgaacaatcgtgacaaatgtgaacgctggccaagaagtcggaaaactgagaatgagggtaatcctggacaaattgtgacaaccaatttgaaaattgtggttgcattttaaagtgtgaacactcccctatgtaaatatgctgacaataaattgtatggagaatggtatttaaaaagtgtttggagacttttcacctgtcctagtaaaattttgaattgtgtatgtgatctacatagaaaagaatattaaagagtaggttgaactctttatagccgaatacagccttaaatatgcttgtatagcatccactggcagaagtaatagttgtgcctcagacttgggggttgcatgtggccctgggggagttcaactacccttggtatgcatgagcggtatcctattagcatcagtgggaactcatgtactctgtatgtatccagcaaaagggaacttgagacccacagttattcttaatttctgatattaacaaccgtacatactgctgacatttaactcaaaatatttcaggtaagtgaaagtcggtgctgacatgtagactatagcaatgcacgtttcaggtgtttctcaactgtaagagtatatatccagaactgcatccttatagaaatacaagtaacgactgacggataatttgccttcaaaacagttttcctaagtctcagcgagtatccagtgagtgaaggaacacttgactgactcttgggccacctctgttacttactgtactatggaagctcctggtgaatgtttacaattatgggatgtagtatttctatttgtactttaagtcaaatgcttatatgaaatatgtgacaacaaatagagaagactggctctgttagtaattatgcagtatgtactctatttaaggatctgtggtagtataacatgagtgaatgtcattaattttgaagtaataactgcccacatgtgggaagtaggggagtaaggagaatgaattaccaattctgtgattaaaagtgtaaactatagactctactgtagtacatttcaggatctagaagttttacttttataaagatggtgtccggaagatgttgctaatgtattttacttcaacatagggaacaaactttttaagtatattaataaacctgtatggttagtttttaacagttttttaaaataaactatggatatgacaaat

SEQ ID NO: 351472 - DNA, 365 bp, Homo Sapiens
  misc_feature (325)..(325): n is a, c, g, or t
gccttgtttccttcagcacatttctgacaaagaaagctggctattatcctaattggaaggtgcctatttggaaggttttctcgtacctcaaactttcctaaaaggatgagatctagcaatggcttaaattagtaacagatccatgtcattaagatttcatgacacattaaaacagagaaaacaattctttgtcacactacataaattgtttaaaagaacccatctggagggcaggatatttttttaattgctatttcggcttaacaaaataccacatttacgaagaaagcacttattatccaataattaaaaaagaaagaaaagnaaagaaagtttttgaaatgggcttttccaacaaactgaag

SEQ ID NO: 351473 - DNA, 383 bp, Homo Sapiens
caccaaaaaaggaaaaagtaatgatgcctgaaaccaaaaagaactactaaagcagtgtccttcagtaggcccctggcctaagaacttaagtttaccccacagcacccaagggaaaggcttagtttatagggcacaatgcaggtaggtgggtcaatgcagtggtggaaacctgtgaaaatcctcatctacttgcctctattttctgagtgaaaccaaaaccaaggttatcagctgagagtaaagatagcaaagatatctgcttaaagagcaagaaagtatgatatcgttctacaggaaactaaagggtgaatataatggaaataaaagtacaattgtcaggtagtactaaggatttacttgatgtgagcctcgtgccaagcttg

SEQ ID NO: 351474 - DNA, 483 bp, Homo Sapiens
  misc_feature (27)..(27): n is a, c, g, or t
  misc_feature (48)..(48): n is a, c, g, or t
  misc_feature (60)..(60): n is a, c, g, or t
  misc_feature (121)..(121): n is a, c, g, or t
  misc_feature (153)..(153): n is a, c, g, or t
tgaagcctcccccccaggcgtttaacnaactcccccgcggcagacggnggaacctacaanggaacggtgccctatatcacaatacccaaactgataataaccctagattcctgtgtccccngccttaaaagacccatgtttgtaagtaggtanagaggaaaacttccctatattcctgaaacagccctaacattttacaaaattttagttttcttttttagagtcttatcctgtagcctatataacagttcatgtctgatttagcatttgttcacgagtaaagctggaacaatgaaaattgaaaattatgagaaatttctgtatgtttacttagtaaccataccttgagaactgaagttgggaagccagtttttcgttatctataggtttggttacttgttttctgtgtctgacaatttaactatgtcccaaattatttactgcactccagcttgggcgacagggcaagactccgtctccaaa

SEQ ID NO: 351475 - DNA, 534 bp, Homo Sapiens
  misc_feature (449)..(449): n is a, c, g, or t
  misc_feature (482)..(482): n is a, c, g, or t
  misc_feature (493)..(493): n is a, c, g, or t
aagcttggcacgaggcatggaaggagactgggataaggcagaaaatgacctgaatgaactaaagcctttagtgcattctcctcatgctattgtggtaagaggcgcacttgaaatctctcaaacgttgttgggaataattgtggcacaaacattttctgaaacttccatcaacttttttcccctgactgctgctttctgtcatgtcagaggatgaagtttttgctgctgcagcagaagtacctagaatacctgggaggatggcaaggtcctgggaggcacttcaagttctacgctgtgaattgacgccgctgaaatacaatacagagcgcattcatgttcttagtgggtatctgatgtgtagccatgcaggaggacctacgtgcaaaagcagaatggggaagggcaaaggggacagcttccccgattctaaactatttgggtaaaacttncagagttaaggagtcttaattttttatggttgnccgtgttttcnctttaggttacaaatgggatacagtgatccattagggagtt

SEQ ID NO: 351476 - DNA, 494 bp, Homo Sapiens
  misc_feature (447)..(447): n is a, c, g, or t
  misc_feature (464)..(464): n is a, c, g, or t
  misc_feature (473)..(473): n is a, c, g, or t
cgtttccatggctgtcagtcttgtgataatttaccagtatgttgtcaggaacatgccagatccccacaaccttccaatagtggctggttggaagaaatacccactcttttttggtactgctgtatttgcttttgaaggcataggagtggtccttccactggaaaaccaaatgaaagaatcaaagcgtttccctcaagcgttgaatattggcatggggattgttacaactttgtatgtaacattagctactttaggatatatgtgtttccatgatgaaatcaaaggcagcataactttaaatcttccccaagatgtatgggttatatcaatcagtgaaaattctatattcctttgggcatttttgtggacatatttcaattccagttctatgttcccggcaggagatccattatccccggggggtccacatcccaaatttccattacntaaatggggaggcgaanctgtggaantttggggggtaagatcccctc

SEQ ID NO: 351477 - DNA, 539 bp, Homo Sapiens
cttggccttcccttttaaaggttaaagtttctaacctaagaattaagtacgcgttcaggaagctgttgtctaggccttccccttgtgaatctgggttcattccaatacggcaagtaagagttggaaactttgagaacacagactataaaggcagcagcccgaacactgtcagactctaattggcgaccctgggaaacagttgccctgctattctttaaagaaagacgtttattctgatgataaaaacagttagccagactgtttttaaagcacctggcgggaagcagaaggttggatccaagcccttgttcagatttggtgcctgataagacaggggtttctctttttgtgacctttattattattattttgttaactgttgtaaccagttagctgttgtgttttaagatagaaaggaacaagactaaaattgtaaatactttgtaaacatcagcatttgtacttgaatagtaggattttaaagggcattgatagcataccaaacaaaaggcaaaataaagtgacctttttatataaaa

SEQ ID NO: 351478 - DNA, 454 bp, Homo Sapiens
  misc_feature (14)..(14): n is a, c, g, or t
ccctatgtgaaaanagtcctgtcaaaaatagtattgccagatatttggaaagtaattggtttcctcaggagtgatatcactgcaccccaaggaaagattttcctttcctaacacgagaagtatatgaatgtcctgaaggaaaccactggcttgatatttctgtgactcgtgttgcctttgaaactagtcccctaccacctcggtaatgagctccattacagaaagtggaacataagagaatgaaggggcagaatatcaaacagtgaaaagggaatgataagatgtattttgaatgaactgttttttctgtagactagctgagaaattgttgacataaaataaagaattgaagaaacacattttaccattttgtgaattgttctgaacttaaatgtccactaaaacaacttagacttctgtttgctaaatctgtttctttttctaatattctaaa

SEQ ID NO: 351479 - DNA, 731 bp, Homo Sapiens
gcccggaaaaatcccaaattacccacggggttgggcttaggatagcccaaagatataaaaaattcttgtgcaaaaatccccttgttgtagatgacaccccacaccaatgagatagagatgtatgccttcaatgcacatccatgcaaaagcagctaaaaagaagtagtgtagcagtccggcaatgattgaacagaagagcttattagtatttgtattgatcccaacaagaaaaacaagttcagcaagaaataggctaccagcaaagatttttgtgaattgttgtcctggtgctttgaatttcactgaagaaccagaaggtaaaaatgcatatggcaagacaaatcagtgaaataattattcctagttgagtgatcccttgtaagaatattataatctttaataccaatggaaggaccagaggacatcaaaattgcaaaatgtgtcaggtgattacagcggcatgaggtgtgggtctcatttgagtatgtcagctcacagccctctgaagaccagctgccattcatggtatcaggtgagtaattccaaaatgcacatagactcctatacctatctgtgacctttcgatgacttaatgtaaatgttattttttcaagttcatataatgtgggtgggtttgagctcattgagactgaaattactgaagatatgactctttcctcctcttcagaattatcataattttgaggtttcaataagaagttgtcagatcc

SEQ ID NO: 351480 - DNA, 205 bp, Homo Sapiens
aagaaatgaggctttcactgagatttgtgtgctattcataattttaggaattactgcttagaacagctgcttgggtgtatttttctacacaggtctgtacttctgccactttctccttttaaaaaaacaaaactatgcatattatgtattaaagttttcttggttttatatatcagagaaataaaaacttttttgacttttgagt

SEQ ID NO: 351481 - DNA, 547 bp, Homo Sapiens
  misc_feature (42)..(42): n is a, c, g, or t
  misc_feature (47)..(47): n is a, c, g, or t
gttccggcccactgacccagccgggtggtgctggccccacanggagnaagccagcggggaggtacgccagctcccgacaaccctagaaaaatatttcctttaccctgtatcctgtatggaaagattcggtcagagttcctcaaagtataaatgtaacattttattcaagcaaaacacattatataaaatttaattgtatcaaataggaatttttaaaattactaaatatataaacgctgctggaagatcaacataaagtgaggatgaatttagtatttgttaaaaatcactaagttccacgtgacttcttatagttaaaagtgagaactgccagtgaccattctagaaatgaaaattagcatgtattgtgacttactaaaagaaacgtctgtttcagaaaacaaagatgagaactcacgtgcaaatgactgcattctcaaagacattgctggacatgtgcgatgcttatccttcatttctgctgaaaacatttccgaaatcgccctcagagtcagtcaacccacaggaaaagcctcgtgccaagctt

SEQ ID NO: 351482 - DNA, 425 bp, Homo Sapiens
tccaaagccccttacccactacagaccagcccacactaagggtgacccagatatcttaagactccccttttgaaacaacaggaacccaaagtgccccgggcagagaacatccctgttgcccaaaatagtggttcctcaacccagggatgacttttgtccttcccggggacatttggcaacgtctggagacattttgggttgtcacaactggaaggatgtactcacatccagtgggtggaggcccaggaatgctgctaagcaccctgcaatgcacagcagcccccatgacaaagaactgtccagaccaaaatgtcaatagtgccgaggttgagaaattccggccaaaagaaatggaatcaaaaaagaaaattgtttgcaacttcatagagataccctcaatgaataaaaccacatatggtttgaaa

SEQ ID NO: 351483 - DNA, 320 bp, Homo Sapiens
aagcttggcacgaggtggcaaagttgctccccaccgggcccagggaaggaagctggctggctgcaggaggggcgtcgttctgcagctgcccaaatgcagccatgatgcatttgttttaaactagctttattttcagggggtgatgtttacctgaccttatccccaaattctttggcacctcacagtggaccccatgtgtacatccccatccctcccaggccactactgactttgtatcttgcgactcttcaaaggactggtgagaatggcactttgtacagaagacacacctgaaatgggagggggggtggacagaactt

SEQ ID NO: 351484 - DNA, 155 bp, Homo Sapiens
atatttcttatttctatagtatctgatttatagtggacaatatactgttggagagcagttttagtctttgttatgtatcatttgttttccaagtttcttactgccaccaccttcattcaggtccttgttctactagtaaaactttatgaactaaa

SEQ ID NO: 351485 - DNA, 535 bp, Homo Sapiens
  misc_feature (11)..(11): n is a, c, g, or t
aagcttgtggngagctggtgtgagccaccacgcccggccaagaactttacttttattaaggtactgctcacatgatagaggctgatgtccttcttccaagtgatggatcagaacacagccagccaattatggcccatccccctgaaacaaacagtgataatactctacaggagtggctgactgaagttatgaaaagcaataaaggcatcaagctggatttcaaaagtctggcagttgtagaaccatccatgatgctcttggaaaatgtgaagaggcatctgaagcgtcctgtatggattaatgccgatattcttcctgggtccaaatggaaatagcaaagtaataaggatgcaaaaccatttttaggacaccgtgtacatccttctttccagacgtgacgttttccctgggttggacaacaggatggcatcctgagaaagtcaatgaagggtacagttggacaatggtgaaagagatggaatatatatgtaatgaactaagtcagcctgtaacgttccctgtcagagcagcatta

SEQ ID NO: 351486 - DNA, 316 bp, Homo Sapiens
cctcaggatggttacaatcagaagattgcaaagtacgcttgccagcctccagccaatggaagattcttaaaatcctccactgagcctttcacttaggaaagcataagacatcagtgcatccaaagattgttctcaggagaaaatctactaaaaatggtcaaataggttgttaatactcgtgaaaccctcttaaaaataatccctttaacagatgacttcttccccaccacaatcaaaggatgggaagttactcaggggaggactggcagatagaattcgcccatatgcccaaaataaatggcattcaatgtccaaa

SEQ ID NO: 351487 - DNA, 2554 bp, Homo Sapiens
  misc_feature (2486)..(2486): n is a, c, g, or t
  misc_feature (2535)..(2535): n is a, c, g, or t
agcgggcttaccctcgctcccgcccccgcctggagtccgacgtggaagttgctggctgactgggcttgcgaggaaaccgcctcggagctgcagccgaaggccaaggaatcactgaagatcggcgagggaggacagggggttcatcatgggtggctttttctcaagtatattttccagtctgtttggaactcgggaaatgagaattttaattttgggattagatggagcaggaaaaaccacaattttgtacagattacaagtgggagaagttgttactactatacctaccattggatttaatgtagagacggtgacgtacaaaaaccttaaattccaagtctgggatttaggaggacagacaagtatcaggccatactggagatgttactattcaaacacagatgcagtcatttatgtagtagacagttgtgaccgagaccgaattggcatttccaaatcagagttagttgccatgttggaggaagaagagctgagaaaagccattttagtggtgtttgcaaataaacaggacatggaacaggccatgacttcctcagagatggcaaattcacttgggttacctgccttgaaggaccgaaaatggcagatattcaaaacgtcagcaaccaaaggcaccggccttgatgaggcaatggaatggttagttgaaacattaaaaagcagacagtaattcagtccattcttctcccctgaaatgaagactacatcacctctctccctttggaaacagtcaagtgtacttcacactactagatgttaaaactatatgattattggcatatactgactgactgcaatatttgtagtaaatagggaaaataagtatttagttggagggataatttgatcgaatcacctgaatgttctatgtaatgtaaaatattcttttcttgctttcttgtgttaaggtatatattctatttgtatggaattcttattcaaatacagttctattaaagagtatactcctattggatgaaaaaaacctatttttgaatagtagttacagcttgtttgtataaatactaaaaaatatcttaacagatctctccccccctaaaatgaattatcttcccaaagattagactcagtatgagagtaggtgaggaacatagtttgtgtaatataatctttatttgcttacctgaccactttttattaagctgttttgtttaaaagcttttggttataggcatgaatattgttttgatggttaacttcactgacttatctgtaagtgtcattttatagtactttacagttgtcaaaaaaaatcttacatatattgatctagttgatcggtagaggaagcttgtgaagtaggtaggacaggttatgatgtcttcactgtatggacgtgaacccagggttctaataggttggcttgcccaaggtcacctgctagcttgtaaggtaggaatagggctcaaagtaaaacttttggttcagaagcttgactcataaactatactatatattcccaaaaatgtcagtattgacaacacagtctaactcttaaataaaattatgctaattagttacattcaaaataatgtttataaatttatttgtctatactagtagaagtgatcagtgacatactataaataatcctaaatggttatatttgatagaattcataacacattaaagagaaaatttcacattaaaggaaggtttaaaaatctattttcagattataaaaggtgtctttactggttttcattccttttatctacatgtaatgggacatgtaaacttgttaaaaatcaaaatcttactgatggtacagggagaaattaagcattctgttttaaaaattaggcttatggctagactgtaagtttaaaaacaattcatgttcaaaggagcttttcaaattacccagtccaccacagaatcagctaatgtgacagaagtaaatatagtgcgtcataattgctaaaaacagggtgaatctctttcacttaagtgggaaaaccagcctctaaaaaattaggtgctggtaatgagagcttaataccatggttccctgcaggtctcagaaacataagtagttcctttcttggccctcactgtccttccagtgttggcctctggcctcttcccctcacatttatgttcattctccgggcttatattcattctctgctgctttctcccttcacccgtgggactctcacccttcttgctcattctccagcacccattcctactttagtctctttgaaatcttttttggagattttccttcagctacaaatgttccagtacaaccaatattactcctgaggggcaaagactttttcatatttatgtccctagtatctggtatggcgcctggcatatggcatttcagaatatgttcatagttgaaacagtaggatagatatttgtcatcttgacaagtagcccttttgcaatttatactttgagtttcactcctgggtcaatgggcacatggnctgggaaaaatgccagaaaagcaaggttcactttaccagcccctgaggncttttataaaggccttgtg

SEQ ID NO: 351488 - DNA, 620 bp, Homo Sapiens
  misc_feature (112)..(112): n is a, c, g, or t
  misc_feature (123)..(123): n is a, c, g, or t
  misc_feature (462)..(470): n is a, c, g, or t
tccgattcttcttctgaaaagtgccgggtttatctgctcataacgctggggctgtggtcaagctgagatctgcaagattgtaagacagcctgtgctccctggctccttcctntgcattgcccntcttctccctctccaaacagagggacttctcctacccccaaggaggtgaaagctgctaccacctctgtgcccccccggcaatgccaccaactggatcctacccgaatttatgattaagattgctgaagagctgccaaacactgctgccaccccctctgttcccttattgctgcttgtcactgcctgacattcacggcagaggcaaggctgctgcagcctcccctggctgtgcacattccctcctgctccccagagactgcctccgccatcccacagatgatggatcttcagtgggttctcttgggctctaggtcccggagaatgttgtgaggggtttannnnnnnnnaatagtgttcataaagaaagacatagtattcttcttctcaagacgtggggggaaattatctcattatcgaggccctgctatgctgtgtgtctgggcgtgttgtatgtcctgctgccgatgccttcattaaaatgatttggaagacccaaa

SEQ ID NO: 351489 - DNA, 577 bp, Homo Sapiens
  misc_feature (473)..(473): n is a, c, g, or t
  misc_feature (478)..(478): n is a, c, g, or t
  misc_feature (484)..(484): n is a, c, g, or t
  misc_feature (494)..(494): n is a, c, g, or t
  misc_feature (531)..(531): n is a, c, g, or t
  misc_feature (540)..(540): n is a, c, g, or t
  misc_feature (550)..(550): n is a, c, g, or t
gggcagctgcttctctgttgggcccaaaggggactatcctccaccagtgcacccaaagaggactgtctttaaggatatgagatagcaccctaagaggataaatggacattttcttgtctacaaaaaggcctaatgcaacagtagaggacatagggaaatttctttggatggatagagacaagtgcatctctttcttacgaaagaatagaaatgtgattaaaaaggaaaagcctagaaacatctgaacgtgtggaaatgggggtgagtgggctagagaaaggatttctgcatcactttcttcctgtagcaattccatccgagatccctgggacagacctggcctgatgaatagcaggaagcacaccagggagggacaaggtcctgcagacaaccttcaccaccaggctgggacagcgccatggggacccagggcctctgcttttggggaaagaccttgctgagggccccattgnaagancaagtnttagaccctnctttggttttttccaattcctcacaaagccacgtttnaggaaactntaggagtggncactcattgtttttgttcccctttgac

SEQ ID NO: 351490 - DNA, 697 bp, Homo Sapiens
  misc_feature (619)..(619): n is a, c, g, or t
  misc_feature (647)..(647): n is a, c, g, or t
ccaaagcgctggtacggtccggaattacgggatatcgtcgacccacgcgctcggaggccctttgaatgtaatgaatgtgggaaatcttttggcaggaagtcacaactcatcctacatacaagaacacacactggagagagaccctatgaatgtactgaatgtgggaaaaccttttctgagaaggcaaccctcacgattcatcagagaactcacacaggggagaaaccctatgaatgtagtgaatgtgggaaaacatttcgtgtaaagatatcccttacccaacaccacagaactcatacaggggagaaaccttatgaatgtggggagtgtggaaaaaacttccgtgcaaagaaatccctaaatcagcatcaaagaattcacacaggtgagaaaccctatgagtgtggtgaatgtgggaaattcttccgaatgaagatgactctcaacaatcatcaaagaactcacacaggtgaaaagccctatcagtagtaatgaatgtgggaaatctttcagggtgcactcacctcttgggatccatcagcagaattcacacaggagagaaaccttacgaatgtaatgagtgtggtaatgctttctatgtgaaagcacgcctaattgnaacatcagaggatgcattcaggagaganaccctacgaatgtagtgaatgtgggaaaatcttcagtttgaagaaatccc

SEQ ID NO: 351491 - DNA, 836 bp, Homo Sapiens
  misc_feature (667)..(693): n is a, c, g, or t
  misc_feature (757)..(757): n is a, c, g, or t
  misc_feature (823)..(823): n is a, c, g, or t
tacgtacggcggatattaacctgttagtttagttatacactgtttttagtccagtttaaatccaaaaggacccctaaacagtatggtgtaaaactcagattttcctagtcccagacaaatgcctcctctataacgatttggcagatcaatggagacatcccgttttaactttactgttcctgtacttactatgtagtcatgtgcagcttatcaacacaaagaatacggatgagggcatttaaatggactacaagtgactctgacttgtaaactagggaagcctcttgtgtttgaccttaaaggccagagaaaaactgaagatagattgacttaactattgccaagcagattatgggttactttatacttcctttcattctcccagaattgctcttagagctaggtgtcgtcattagcatgttgttgctaatgatacaaacaagaacatacatgtaatcagaggtggacaaatcttcagaagttccttaaactggtttaaaaaagaagattgggaaagaagactaaatcaacatgtttctccgctttgaagataaaaccagaaatggtttccattgtagcatcttgacaatagacaaatatgtaaagtttatagcagataagacagtattactagtttttcagggaattgagagttacaggttactcnnnnnnnnnnnnnnnnnnnnnnnnnnnaaatttcccgatttatcactagagtgagtaactaactaactgctttataaagctatcctggtantcatatgccatatactagggaaacaaccaggccaatctccattcgatttcatttctcactttgttnacttgcatattaa

SEQ ID NO: 351492 - DNA, 309 bp, Homo Sapiens
ggtttacaagtcagagtcacttgtagtccatttaaatgccctcatccgtattctttgtgttgataagctgcacatgactacatagtaagtacagaacagtaaagttaaaacggatgtctccattgatctgccaaatcgttatagagagcaatttgtctggactagaaaatctgagttttacaccatactgttaagagtccttttgaattaaactagactaaaacaagtgtataactaaactaacaagattaaatatccagccagtacagtattttttaaggcgaataaaggtggttagctcaccttgag

SEQ ID NO: 351493 - DNA, 427 bp, Homo Sapiens
  misc_feature (16)..(16): n is a, c, g, or t
  misc_feature (44)..(62): n is a, c, g, or t
  misc_feature (67)..(67): n is a, c, g, or t
tttcccacggctttcnacccgggcgttggagacagactcatctnnnnnnnnnnnnnnnnnnngaaanggaatcaagtattgacacattcctacaatgtgaatgaaccttgaaaacattatttgagtgaaagaagcccagatataaaatgccacatattgtatgattccatgcacatgaaatgtctccaatgggcaaatccgtagagccagaaagtagattagtggttcccaggagctatgaggaggagaggactgctaatgcatacagagtttccttctggaatgatgaaagtgttctgaattagatagtagtgatagttgcccagctttgacaatagagtaaaaaccattgaatgctactgtttacagtggtggatttttatgtatattataactcaataaaaagatgatctaatccatggaaaaa

SEQ ID NO: 351494 - DNA, 1096 bp, Homo Sapiens
  misc_feature (900)..(900): n is a, c, g, or t
  misc_feature (968)..(968): n is a, c, g, or t
  misc_feature (1013)..(1013): n is a, c, g, or t
  misc_feature (1029)..(1029): n is a, c, g, or t
  misc_feature (1046)..(1046): n is a, c, g, or t
  misc_feature (1055)..(1055): n is a, c, g, or t
  misc_feature (1073)..(1073): n is a, c, g, or t
gctacatatgacattttatgagctgtttacggcatggaaagaaaatcagtgggaattaagaaagcctcgtcgtgaaagcacttaattttttacagttagcacttcaacatagctcttaacaacttccaggataattcacacaacacttaggcttaaaaatgagctcactcagaatttctattctttctaaaaagagatttatttttaaatcaatgggactctgatataaaggaagaataagtcactgtaaaacagaacttttaaatgaagcttaaattactcaatttaaaattttaaaatcctttaaaacaacttttcaattaatattatcacactattatcagattgtaattagatgcaaatgagagagcagtttagttgttgcatttttcggacactggaaacatttaaatgatcaggagggagtaacagaaagagcaaggctgtttttgaaaatcattacactttcactagaagccccaaacctcagcattctgcaatatgtaaccaacatgtcacaaacaagcagcatgtaacagaatggcacatgtgccagctgaatttaaaatataatacttttaaaaagaaaattattacatcctttacattcagttaagatcaaacctcacaaagagaaatagaatgtttgaaaggctatcccaaaagacttttttgaatctgtcattcacataccctgtgaagacaatactatctacaattttttcaggattattaaaatcttcttctttcactatcgtagcttaaactctgtttggttttgtcatctgtaaatacttacctacatacactgcatgtagatgattaaatgagggcaggccctgtgctcatagctttacgatggagagatgccagtgacctcataataaagactgtgaactncctggtgcagtgtccacatgacaaaggggcaggtagcaccctctctcacccatgctgtggttaaaatngtttctaggcatatgtataatgctatagttaaaaatactattttntcaaaatcatacagantagtacatttaacagcnacctgtganggcttatttactaatttnctgtattattttttgttaaattg

SEQ ID NO: 351495 - DNA, 1122 bp, Homo Sapiens
  misc_feature (9)..(9): n is a, c, g, or t
  misc_feature (23)..(23): n is a, c, g, or t
  misc_feature (28)..(28): n is a, c, g, or t
  misc_feature (31)..(31): n is a, c, g, or t
  misc_feature (35)..(35): n is a, c, g, or t
  misc_feature (43)..(43): n is a, c, g, or t
  misc_feature (49)..(49): n is a, c, g, or t
  misc_feature (51)..(51): n is a, c, g, or t
  misc_feature (57)..(57): n is a, c, g, or t
  misc_feature (75)..(75): n is a, c, g, or t
  misc_feature (97)..(97): n is a, c, g, or t
  misc_feature (107)..(107): n is a, c, g, or t
  misc_feature (122)..(122): n is a, c, g, or t
  misc_feature (138)..(138): n is a, c, g, or t
  misc_feature (170)..(170): n is a, c, g, or t
  misc_feature (174)..(174): n is a, c, g, or t
  misc_feature (192)..(192): n is a, c, g, or t
  misc_feature (209)..(209): n is a, c, g, or t
tggcaaagnccaaccttatttanattanaanccgntactaacncatttngnccattntcgggatatggtttgggntgttggcctgaacactttgtgnaaaacaatancaataatgtttattntgagaaagaacctatnttttatgtgagagaaagtgtgagcaaaactanctanacttttaagctaaaactngacattcatagaggggnggagttttaactgtaaggtgctacaatgcccctggatctaccagcataaatatcttctgatttgtccctatgcatatcagttgagcttcatataccagcaatatatctgaagagctattatataaaaaccccaaactgttgattattagccaggtaatgtgaataaattctataggaacatatgaaaatacaacttaaataataaacagtggaatataaggaaagcaataaatgaatgggctgagctcgcctgtaacttgagagtagatggtttgagcctgagcagagacatgacccagcctgttccatgaaggcagagccatggaccacgcaggaaggcctacagcccatttccccatacgcactggtatgtgtggatgatgctgccagggcgccatcgccaagtaagaaagtgaagcaaatcagaaacttgtgaagtggaaatgttctaaaggtggtgaggcaataaaaatcatagtactctttgtagcaaaattcttaagtatgttattttctgttgaagtttacaatcaaaggaaaatagtaatgttttatactgtttactgaaagaaaaagacctatgagcacataggactctagacggcatccagccggaggccagagctgagcactcagcccgggaggcaggctccaggcctcagcaggtgcggagccgtcactgcaccaagtctcactggctgtcagtatgacatttcacgggagatttcttgttgctcaaaaaatgagctcgcatttgtcaatgacagtttcttttttcttactagacctgtaacttttgtaaatacacatagcatgtaatggtatcttaaagtgtgtttctatgtgacaattttgtacaaatttgttattttccatttttatttcaaaatatacattcaaacttaaaattaaa

SEQ ID NO: 351496 - DNA, 696 bp, Homo Sapiens
  misc_feature (420)..(549): n is a, c, g, or t
  misc_feature (556)..(558): n is a, c, g, or t
  misc_feature (560)..(560): n is a, c, g, or t
  misc_feature (563)..(580): n is a, c, g, or t
  misc_feature (586)..(586): n is a, c, g, or t
  misc_feature (589)..(606): n is a, c, g, or t
ccccggttgaaagtttaccaatccaaaggaaaaataagtaatgttttaatacctgtttacctgaaagaaaaaagaccctatgagccacataggactcctagagggcatcccagccggaggcccagagctgagcccctcagcccgggaggccaggcccccaggcctcagcaggtgcggagcccgtcactgcacccaagtcctcactggctgtcagtatgacatttcacgggagatttcttgttgctcaaaaaatgagctcgcatttgtcaatgacagtttcttttttcttactagacctgtaacttttgtaaatacacatagcatgtaatggtatcttaaagtgtgtttctatgtgacaattttgtacaaatttgttattttccatttttatttcaaaatatacattcaaacttaaaattnnnnnnnnnnnnnnnnnnnnnnnnnnnnnnnnnnnnnnnnnnnnnnnnnnnnnnnnnnnnnnnnnnnnnnnnnnnnnnnnnnnnnnnnnnnnnnnnnnnnnnnnnnnnnnnnnnnnnnnnnnnnnnnnnnaacacannnanacnnnnnnnnnnnnnnnnnncacccncannnnnnnnnnnnnnnnnnaaaaaacttttctcaaacacatctttcctaaaacccagccccatccccctaaatacacttcaaaacccttccccccatcctttttttctt

SEQ ID NO: 351497 - DNA, 1143 bp, Homo Sapiens
  misc_feature (964)..(964): n is a, c, g, or t
  misc_feature (989)..(989): n is a, c, g, or t
  misc_feature (1035)..(1035): n is a, c, g, or t
  misc_feature (1048)..(1048): n is a, c, g, or t
  misc_feature (1060)..(1060): n is a, c, g, or t
  misc_feature (1062)..(1062): n is a, c, g, or t
  misc_feature (1067)..(1067): n is a, c, g, or t
  misc_feature (1069)..(1071): n is a, c, g, or t
  misc_feature (1075)..(1075): n is a, c, g, or t
  misc_feature (1082)..(1082): n is a, c, g, or t
  misc_feature (1091)..(1091): n is a, c, g, or t
  misc_feature (1105)..(1105): n is a, c, g, or t
  misc_feature (1108)..(1108): n is a, c, g, or t
  misc_feature (1111)..(1111): n is a, c, g, or t
  misc_feature (1113)..(1113): n is a, c, g, or t
  misc_feature (1124)..(1124): n is a, c, g, or t
  misc_feature (1130)..(1130): n is a, c, g, or t
atcaggccaaatcggccgagctcgaattcgtcgagagcggacatctcccggcggcgggccgcggaagcagtgcagacgcggctcctagcggatgggtgctattgtgaggcggttgtggaagttaataaaggtatccatggagaacactgaaaactcagtggattcaaaatccattaaaaatttggaaccaaagatcatacatggaagcgaatcaatggactctggaatatccctggacaacagttataaaatggattatcctgagatgggtttatgtataataattaataataagaattttcataaaagcactggaatgacatctcggtctggtacagatgtcgatgcagcaaacctcagggaaacattcagaaacttgaaatatgaagtcaggaataaaaatgatcttacacgtgaagaaattgtggaattgatgcgtgatgtttctaaagaagatcacagcaaaaggagcagttttgtttgtgtgcttctgagccatggtgaagaaggaataatttttggaacaaatggacctgttgacctgaaaaaaataacaaactttttcagaggggatcgttgtagaagtctaactggaaaacccaaacttttcattattcaggcctgccgtggtacagaactggactgtggcattgagacagacagtggtgttgatgatgacatggcgtgtcataaaataccagtggaggccgacttcttgtatgcatactccacagcacctggttattattcttggcgaaattcaaaggatggctcctggttcatccagtcgctttgtgccatgctgaaacagtatgccgacaagcttgaatttatgcacattcttacccgggttaaccgaaaggtggcaacagaatttgagtccttttcctttgacgctacttttcatgcaaagaaacagattccatgtattgtttccatgctcacaaaaagaactctatttttnatcactaaagaaatggttgggtggnggtttttttagtttgttatgccaagtgagaagatggtatatttggnctgtatttccccncatttgacctancncatgngnnnaggnactttanaaatactcntccacaaaagaacncangancnccccaactccngcaggngttgaatgattaa

SEQ ID NO: 351498 - DNA, 884 bp, Homo Sapiens
  misc_feature (40)..(40): n is a, c, g, or t
  misc_feature (59)..(59): n is a, c, g, or t
  misc_feature (83)..(83): n is a, c, g, or t
  misc_feature (125)..(125): n is a, c, g, or t
  misc_feature (152)..(152): n is a, c, g, or t
  misc_feature (258)..(258): n is a, c, g, or t
tggagattttaacatccttcctcggtggtgatgcatttgntctgcacagaggcattgtnctgagggtctaaaagtcatgcttngaatcagcctctctccagtacttgatggcaacagcttatacnagaatttgtgagtagttgggagttganaaagtaggttggcttgtatctgcatcatgttttgtccgcctccctctggagccccatgctgacttgttgaagctgctactgtgacaggtgatcatgtgagactagngtaagtcagggatgctaagctctggccctgccctgtattcctcttccccttggtagcagttccctgaccaagggcaaggtgtgtctcaggaaggtggttctgtgcatgcctgggtgtggttaaggcgtggcccagaaggcttccctggtgctctcagtccaggcaaagcccagagcatctgagcacgtctctgacttccagtggcaacacagtttgaacgtggtgaaacagggtgtagttcttttccacattctgtgtcatctagtcgtgcaggtagggaaaaagttggtctaattgaagattgtgcatttcctagtgacaggtgccaagaggttatgatacgggtttcttgggtctgatgtacagtgtgaataaatgcttgcagctcttagctcttttttgatcgatgaagcacttttttattaatattttcctttgttaaaggaggaaccgtaactctccatagctgtacatataacccttttctcctaaagaggagtcagtcagtgctcctatatttttcattttttgtcaaagcaagaagtaaatactttagaattgttaaatatataaataaagcaaataaagttgagtgttccacatggtagcatttgctaacacttcct

SEQ ID NO: 351499 - DNA, 418 bp, Homo Sapiens
  misc_feature (33)..(33): n is a, c, g, or t
  misc_feature (42)..(42): n is a, c, g, or t
  misc_feature (94)..(94): n is a, c, g, or t
  misc_feature (111)..(111): n is a, c, g, or t
aatgtgggtgaaaacagggtgtaagatcccttncccccacantccgtgtccaccctagtccgtgccaggtagggaaaaaagttgggtcctaaantgaaagaattgtgccanttcccctagtgaacaggtgcccaagaggttatgatacgggtttccttgggtcctgatgtacagtgtgaataaatgcttgcagctcttagctcttttttgatcgatgaagcacttttttattaatattttcctttgttaaaggaggaaccgtaactctccatagctgtacatataacccttttctcctaaagaggagtcagtcagtgctcctatatttttcattttttgtcaaagcaagaagtaaatactttagaattgttaaatatataaataagcaataagtggtgtccacatgtgacgctgccgt

SEQ ID NO: 351500 - DNA, 1347 bp, Homo Sapiens
cggtccggaattcccgggatctcgcgtagccgtgcgccgattgcctctcggcctgggcaatggtcccggctgccggtcgacgaccgccccgcgtcatgcggctcctcggctggtggcaagtattgctgtgggtgctgggacttcccgtccgcggcgtggaggttgcagaggaaagtggtcgcttatggtcagaggagcagcctgctcaccctctccaggtgggggctgtgtacctgggtgaggaggagctcctgcatgacccgatgggccaggacagggcagcagaagaggccaatgcggtgctggggctggacacccaaggcgatcacatggtgatgctgtctgtgattcctggggaagctgaggacaaagtgagttcagagcctagcggcgtcacctgtggtgctggaggagcggaggactcaaggtgcaacgtccgagagagccttttctctctggatggcgctggagcacacttccctgacagagaagaggagtattacacagagccagaagtggcggaatctgacgcagccccgacagaggactccaataacactgaaagtctgaaatccccaaaggtgaactgtgaggagagaaacattacaggattagaaaatttcactctgaaaattttaaatatgtcacaggaccttatggattttctgaacccaaacggtagtgactgtactctagtcctgttttacaccccgtggtgccgcttttctgccagtttggcccctcactttaactctctgccccgggcatttccagctcttcactttttggcactggatgcatctcagcacagcagcctttctaccaggtttggcaccgtagctgttcctaatattttattatttcaaggagctaaaccaatggccagatttaatcatacagatcgaacactggaaacactgaaaatcttcatttttaatcagacaggtatagaagccaagaagaatgtggtggtaactcaagccgaccaaataggccctcttcccagcactttgataaaaagtgtggactggttgcttgtattttccttattctttttaattagttttattatgtatgctaccattcgaactgagagtattcggtggctaattccaggacaagagcaggaacatgtggagtagtgatggtctgaaagaagttggaaagaggaacttcaatccttcgtttcagaaattagtgctacagtttcatacattttctccagtgacgtgttgacttgaaacttcaggcagattaaaagaatcatttgttgaacaactgaatgtataaaaaaattataaactggtgttttaactagtattgcaataagcaaatgcaaaaataaaa

SEQ ID NO: 351501 - DNA, 464 bp, Homo Sapiens
  misc_feature (16)..(16): n is a, c, g, or t
  misc_feature (24)..(24): n is a, c, g, or t
  misc_feature (42)..(42): n is a, c, g, or t
ctaaccccaaggcccnaattaaanccatacggaccgaacacnggaaacactgaaaaaccctccaattttaaatccagacaggtaatagaaagcccaagaagaatgtggtggtaacctcaagcccgacccaaataggcccctccttccccagcactttgaataaaaagtgtggaactggttgacttgtattttcccttattctttttaattagttttattatgtatgcctacccattcgaactgagagtattcggtggctaattcccaggacaagagcaggaacatgtggagtagtgatggtctgaaagaagttggaaagaggaacttcaatccttcgtttcagaaattagtgctacagtttcatacattttctccagtgacgtgttgacttgaaacttcaggcagattaaaagaatcatttgttgaacaactgaatgtataaaaaaattataaactggtgtttt

SEQ ID NO: 351502 - DNA, 386 bp, Homo Sapiens
  misc_feature (21)..(21): n is a, c, g, or t
  misc_feature (43)..(43): n is a, c, g, or t
  misc_feature (50)..(50): n is a, c, g, or t
  misc_feature (75)..(75): n is a, c, g, or t
  misc_feature (86)..(86): n is a, c, g, or t
ccgtgccagtttccctgtggnttgagtgtttgaaaaccgtgtnaggattnaactgtgggttttccccttgtattnagtatacgctnaatttttggcgcattggtcaaacggttgttattattagcttctaactttgcactgagtgtcctcgcccttcctttagctaatcctatacattacagagaattcctaggacagggctggcgacaattcatgtgtaaatgtttactcaaggactctgtgactgcgtttaaaaagtacagtgtatatctctggagaaataacatgtatacctacctttagcagctttttattgtggactaatgcaagaaaattattaccagagtattgcaccatttttccatttggaatataaagttaaagag

SEQ ID NO: 351503 - DNA, 178 bp, Homo Sapiens
aagcttggcacgaggccaaccccctatgaattaggagaattattgtcattttacacatgaggaaagtgaggctgagagaatccaattagcttgtacgatatcactccataagagaagcaaatctgagagtaaaacccttaccccttattcttaagaatagtgcttgtttattcagtac

SEQ ID NO: 351504 - DNA, 536 bp, Homo Sapiens
  misc_feature (448)..(456): n is a, c, g, or t
tgatagttctatattttcaaaatatttgaaaataaaaagtattcccaagtgattttaatttaaaaacaaattggctttgtctcattgatcagacaaaaagaaactagtattaagggaagcgcaaacacatttattttgtactgcagaaaaattgcttttttgtatcactttttgtgtaatggttagtaaatgtcatttaagtccttttatgtataaaactgccaaatgcttacctggtattttattagatgcagaaacagattggaaacagctaaattacaacttttacatatggctctgtcttattgtttcttcatactgtgtctgtatttaatctttttttatggaacctgttgcgcctatttatgaaataataaatataggtgtttgtaagtaaatttgttagtatttgaaagaggtttctttgatgttttaacttttgctggcnnnnnnnnnttcacgcttggtgtgaatactttattatttagtttttacagtaacatgaataaagccaaacctgcttttcatttagcagc

SEQ ID NO: 351505 - DNA, 1436 bp, Homo Sapiens
  misc_feature (564)..(801): n is a, c, g, or t
ggcacgagggcggacatttcctttattatccttcttttgaaattcaagttagtgctttttaaccaaataaaagaagaaccagctcttgggatatgtgactctgcctctgtataaagtgactggaattttgttaaaaccgtgtttccacttctgaaccctgttaccattccccctcacaaatccccacccaacacctggattttaaagatcctccagtgtcaagggaagccacagagtctattaaagaggcagttctgaaccaattaatttttgtccttataatttagagcattaaatagctaatatatttaatggcactaattgttgttcacggctttcatcatacttttaaacagaatccaaagtattcaaaggaaagtaagcgaagttatccaaagccaactttgtttcaggtgtgtcccctgccccaaatagattttagggcagaaatagaaaactgagtttacacagaactatttttggaaaagctgcactggagtagatggattcttcttcagcatacttttttgtttgtttgtttgagatggagtcttgctttgtcannnnnnnnnnnnnnnnnnnnnnnnnnnnnnnnnnnnnnnnnnnnnnnnnnnnnnnnnnnnnnnnnnnnnnnnnnnnnnnnnnnnnnnnnnnnnnnnnnnnnnnnnnnnnnnnnnnnnnnnnnnnnnnnnnnnnnnnnnnnnnnnnnnnnnnnnnnnnnnnnnnnnnnnnnnnnnnnnnnnnnnnnnnnnnnnnnnnnnnnnnnnnnnnnnnnnnnnnnnnnnnnnnnnnnnnnnnnnntgaaccactgcgcccggccagcatgcattttaaaagtggcttagatttagttttaaatattttggggtgaaaggcaggaacagttctgtttttgacatacaggttttctttgggattgttttcattttcaagtatagattcatgtcagaatggccaacttaacgtgggtttctgtattccctggtgttgctcttaacctgaactcataatcagttgccatactgaggcaagagcactcagggtgaacatagtccaagttactttaaaagtgataaaagtgtttttccatggtgaaaccttcagtatttggctgaatgtaaagtatgttgaagtggtatattgatggtaagttgttaatcactaaccttgtttgcacttttgtacaccactgcttgcactaggatcttggtgtgaattttcaattgttttacagtgtatacagattattaaggataatttatataaagatgtttctgtttaactttgtgtgttttacaacaaagagctataatagatggttaaacgtttttgaattgtgtttatatgttagtttgattatgttctattatcttttcacctgccatgaatttgagtgttaggaagggaaaaataaaatactaatctggtcttgaaga

SEQ ID NO: 351506 - DNA, 1190 bp, Homo Sapiens
tgtttgtttgggaattcccttcagccttcccccattggttttctttttataaggataagctgccaaaatattttttcaaaaggatttaaattgagttctggccaagggacctccccaggactctatcccagaatgattattgtaaagctttacaaatcccaccttggccctagcgataattaggaaatcacaggcaaacctcctctctcggagaccaatgaccaggccaatcagtctgcacattggttttgttagatactttgtggagaaaaacaaaggctcgtgatagtgcagctctgtgcctacagagagcctcccttttggttctgaaattgctgatgtgacagagacaaagctgctatgggtctaaaaccttcaataaagtaactaatgacactcaaggtcctgggactctgagacagacggtggtaaaacccacagctgcgattcacatttccaatttattttgagctctttctgaagctgttgcttcctacctgagaattcccatttagagagctgcacagcacagtcacctgctcttccgtattctgtggtaactactaatgttccaggtaaacccctccactaaggactctgccgcagagagagggcccggttgcatgaggcactttgtcaaaatgagcagatacgtatgagcactgaactcttgagtgaatcaaccagaactaagacccagatccacgcactcaggaacttgctctgaatttcagtttgacaacagagaagtagaatatttctaattagctaatatatatacacattttttaatcatccaaaattacaggcaaatcacttaaggtccccagcactttacgatgaaaggtcagagagaaccccacaaaaaaggtgttaaaaggacaggatcactaactgtgagaggttaatttatcaggataactctccggtaggtaactaggcgggcatgctgattttcatactggagtcttcaagagttaacagaatctaccatcctttctccgggtcaggctagggccgcagggggccactttacagcctcactgcagcatcctcactgggtataagcattggcccagagggacaatcataaatgtcctcaaagtgttgcagagaattaagaatccggctttgggggaagaaattaatatgcatttttatcccggagaattcccggaccggtacccagc

SEQ ID NO: 351507 - DNA, 1173 bp, Homo Sapiens
tgcctcatgcaaccgggccctctctctgcggcagagtccttagtggaggggtttacctggaacattagtagttaccacagaatacggaagagcaggtgactgtgctgtgcagctctctaaatgggaattctcaggtaggaagcaacagcttcagaaagagctcaaaataaattggaaatgtgaatcgcagctgtgggttttaccaccgtctgtctcagagtcccaggaccttgagtgtcattagttactttattgaaggttttagacccatagcagctttgtctctgtcacatcagcaatttcagaaccaaaagggaggctctctgtaggcacagagctgcactatcacgagcctttgtttttctccacaaagtatctaacaaaaccaatgtgcagactgattggcctggtcattggtctccgagagaggaggtttgcctgtgatttcctaattatcgctagggccaaggtgggatttgtaaagctttacaataatcattctggatagagtcctgggaggtccttggcacaactcagttaaatctttgaagaatatttgtagttatcttagaagatagcatgggaggtgaggattccaaaaacattttatttttaaaaatatcctgtgtaacacttggctcttggtacctgtgggttagcatcaagttctccccaggggtagaattcaatcagagctccagtttgcatttggatgtgtaaattacagtaatccccatttccccaaacctaaaatctgtttttctcatcagactctgagtaactggttgctgtgtcataacttcatagatgcaggaggctcaggtgatctgtttgaggagagcaccctaggcagcctgcagggaataacatactggccgttctgacctgttgccagcagatacacaggacatggatgaaattcccgtttcctctagtttcttcctgtagtactcctcttttagatcctaagtctcttacaaaagctttgaatactgtgaaaatgttttacattccatttcatttgtgttgtttttttaactgcattttaccagatgttttgatgttatcgcttatgttaatagtaattcccgtacgtgttcattttattttcatgctttttcagccatgtatcaatattcacttgactaaaatcactcaattaatcaaaaaaaa

SEQ ID NO: 351508 - DNA, 2060 bp, Homo Sapiens
ggcagcctcacttgcttgttgctcataggttttagcttgctttgtgtttatggagggttctgtcattactgagtctagtgagcacattctgaaagtccattgttatctaggatttcattgttttgtaggtgtatatcccttcagactgtctggttgggcatcttgccaaagcaggattcagttgcctgagtttagatattgaccaatagagtgatggtgatcatgttagacaccttgcagttctcctgggcatcctctcaatttcattctcaatcactcactcttcagagtcaaatcttgagccttaggcaagtgacagcatcccatggtcggagacgcgtacaacccggaagttggcgcagcgcggttgccaatggtcgctccctgagaggatgccgctcgtggtgttttgcgggctgccgtacagcggcaagagccggcgtgctgaagagttgcgcgtggcgctggctgccgagggccgcgcggtgtacgtggtggacgacgcagctgtcctgggcgcagaggacccagcggtgtacggcgattctgcccgtgagaaggcattgcgtggagctctgcgagcctccgtggaacggcgcctgagtcgccacgacgtggtcatcctggactcgcttaactacatcaaaggtttccgttacgagctctactgcctggcacgggcggcgcgcaccccgctctgcctggtctactgcgtacggcccggcggcccgatcgcgggacctcaggtggcgggcgcgaacgagaaccctggccggaacgtcagtgtgagttggcggccacgcgctgaggaggacgggagagcccaggcggcgggcagcagcgtcctcagggaactgcatactgcggactctgtagtaaatggaagtgcccaggccgacgtacccaaggaactggagcgagaagaatccggggctgcggagtctccagctcttgtgactccggattcagagaaatctgcaaagcatgggtccggtgccttttactctcccgaactcctggaggccctaacgctgcgctttgaggctcccgattctcggaatcgctgggaccggcctttattcactttggtgggcctagaggagccgttgcccctggcggggatccgctctgccctgtttgagaaccgggccccaccaccccatcagtctacgcagtcccagcccctcgcctccggcagctttctgcaccagttggaccaggtcacgagtcaagtactggccggattgatggaagcgcagaagagcgctgttccccggggacttgctcacgcttcctggtactcacagagcacttgcggtttaaccggcccttgaccatggcagaactgagtcgccttcgtcgccagtttatttcgtacactaaaatgcatccgcaacaatgagaacttgccgcaactggccaacatgtttcttcagtatttgagccagagcctgcactgaccagaggaggtaggggggaagccatggcttctgatctccactccactttatttctctgggaaaaataggctgcaggtctccagagcatatcgatgcagtactgtactagagctgttgtgactgattcactcaaactttcctgcatacccctgtgccaggccttgggtttacagcataagttcagactaaagagaatggagaactattgtggtgcaacctggcaaatccctcagaggacagagctaaggtggacagggattacctagattggatcctacttgggctatcacagagcattgaccattggcttccctcatctgaggcgtgggagagcagactggatagatgagaattgttttaaaacaattgtgaacagaaactgaagatggtacagttctacatctgcacctgcccttttttcataccacaaaagtattttttgagtactgtactgactttttgctagtttctattctgggaccgagttcacagataaatccattggtttgtatccttgagaaactttgtttttgtggaagtaagaaagttatctactagattatttcctctaataaaatcttttaaaatagtcaaaaaaaa

SEQ ID NO: 351509 - DNA, 2241 bp, Homo Sapiens
  misc_feature (1612)..(1699): n is a, c, g, or t
  misc_feature (1843)..(1852): n is a, c, g, or t
  misc_feature (2116)..(2116): n is a, c, g, or t
caggctggtaccggtccggaattcccgggatgggattctgggccaagatggcagcaatgaggaaggcgcttccgcggcgactggtgggcttggcgtccctccgggctgtcagcacctcatctatgggcactttaccaaagcgggtgaaaattgtggaagttggtccccgagatggactacaaaatgaaaagaatatcgtatctactccagtgaaaatcaagctgatagacatgctttctgaagcaggactctctgttatagaaaccaccagctttgtgtctcctaagtgggttccccagatgggtgaccacactgaagtcttgaagggcattcagaagtttcctggcatcaactacccagtcctgaccccaaatttgaaaggcttcgaggcagcggttgctgctggagccaaggaagtagtcatctttggagctgcctcagagctcttcaccaagaagaacatcaattgttccatagaggagagttttcagaggtttgacgcaatcctgaaggcagcgcagtcagccaatatttctgtgcgggggtacgtctcctgtgctcttggctgcccttatgaagggaagatctccccagctaaagtagctgaggtcaccaagaagttctactcaatgggctgctacgagatctccctgggggacaccattggtgtgggcaccccagggatcatgaaagacatgctgtctgctgtcatgcaggaagtgcctctggctgccctggctgtccactgccatgacacctatggtcaagccctggccaacaccttgatggccctgcagatgggagtgagtgtcgtggactcttctgtggcaggacttggaggctgtccctacgcacagggggcatcaggaaacttggccacagaagacctggtctacatgctagagggcttgggcattcacacgggtgtgaatctccagaagcttctggaagctggaaactttatctgtcaagccctgaacagaaaaactagctccaaagtggctcaggctacctgtaaactctgagccccttgcccacctgaagccctggggatgatgtggaaataggggcacacacagatgattcatggatggggacatggaaatgagaataggttaaatggtgcaggtacctcatagccagctctacacagaggtctctcctggcagaaagcaggcgaagggcaggaggagctgcttggcagaaggacctcctgcccagacctgaggagtgagaggctttgagggctgaagtctccctttgttacggaccctggcccaggagttgaatgcctgaggacgtgtgggaaccccgttccctacttagcatgatccttgagtctcctctctggatggaatccgcgagctggccacctggccaccctctacacggctccaccctgccatggccgtggggcccttgctctctgacttctcaggacacaggtcatggaggttcttcccaagctggcagaggccatttgtggaaagtggagagctacgtggtggccatctgccaactccagcatctctggaaaatctccacgctgaatgtgatttttgaaaacagcttatgtaattaaaggttgaatggcacatcataattccagccnnnnnnnnnnnnnnnnnnnnnnnnnnnnnnnnnnnnnnnnnnnnnnnnnnnnnnnnnnnnnnnnnnnnnnnnnnnnnnnnnnnnnnnncaacatacatacactcaaacacagcacaaactacccccacccacaccagccacattttcaaatccaccccacccacagagagagagggggcggccctcccaggcccccacagaaaaacctactataaacctccctatccatatnnnnnnnnnnctcaagacaagggtaaaaaccaaacttcacttaattagggggcggcccaaaacctttggcccgttcacacactcggaaaaaaggaacaccgaaaaccgggccacccccggaggcttccaagctggccagaccacgaaaggacaaaaacgcgggggcacgggaccaacataaaacctctgctcctcaaaataaacgcgggcgaacaagcctatgtcaactcataaactcaaaaacggaggccacaccaccgacgggctctacctnacgcgacggcgaagggacagctcacgctgtacacaaaggaactcctacggggcccgcgacttgaggccctctcctagtcatgtcgaatcgggtgtaacataacacatctcacatagcgcgacggg

SEQ ID NO: 351510 - DNA, 651 bp, Homo Sapiens
  misc_feature (449)..(449): n is a, c, g, or t
ataggagcgaccgagcgtcggtgtgccgaggtggcagcaatgatggaaggcgcttccgcggcgacatggtgggcctggctgtccctccgggactgtcagcacctcatctatgggcactttaccaaagcgggtgaaaattgtggaagttggtccccgagatggactacaaaatgaaaagaatatcgtatctactccagtgaaaatcaagctgatagacatgctttctgaagcaggactctctgttatagaaaccaccagctttgtgtctcctaagtgggttccccagatgggtgaccacactgaagtcttgaagggcattcagaagtttcctggccatcaactacccagtcctgaccccaaatttgaaaggcttcgaggcagcggtcaccaagaagttctactcaatgggctgctacgagatctccctgggggacaccattggtgtgggncaccccaggaatcatgaaagacatgctgtctgctgtcatgcaggaagtgcctctggcggccctggctgtccactgccatgacacctatggtcaagccctggccaacaccttgactggccctgcagatgggagtgagtgtcgtggacctcttctgtggcacggacttggaggcctgttccctacgcacagggggcatcaggaa

SEQ ID NO: 351511 - DNA, 372 bp, Homo Sapiens
tagctgggtggctggatatggactctgaagcagaagatgcttcatgaaatatttttggtttatctaataactgtggtccaaatacgtatacaggaactatatactgaggtagcattactgaatttgccatacgaaacatcttcactttcatccatcaggtcagaatttgggagtcaagtcacagactacttaaattgggtctttttcttcttagacaaatttatacgacttttttacatttttggccatcttcctatttaattcttttatgcgatgaatgtatatttcatgaggcaataattaaccttcaccaacttggcaggttgctttgttagtcaattataaggctaacaaaagcctcgtgccaagctt

SEQ ID NO: 351512 - DNA, 1542 bp, Homo Sapiens
  misc_feature (501)..(501): n is a, c, g, or t
  misc_feature (512)..(512): n is a, c, g, or t
aagcttggcacgagggtggaattggtagtttgcttttcatgcccctgtcttccttctcatgaccatttccccctttctgtctggcttgcattattgatttccaggaccaagtcctggcttcctcctgccttcctgagatgatgttctgctcagggagaagtggaggggtgagctgtgtgtgtccactgaggcacggccaggaagaggcagcctttacctgtgaggggctccatgctccagcagcagagcaggttctagtgacaattcaactttttatgctatgaccaggggtggatctaaattttatggggctgaaagcttgaattatttagaaagacttctttaagaaaaacaatgttaatataaaattaggtacagggtcttggaaggggccctgaagattaagcttccttagcgtcacaataagtccgtatctggttgcaattgaaaactgatgctttcagtgagggtatctaaaaaggtaaactggcatatccaggngcaaatgtggngctgccaatgggctcatctctagggtaattttatgtctgaaagtgtatgcagttgggtcagagcatgacctttaagatagcctctctcagctaacatatttatgaagatgaggcctggtgacccagcaggttcattggatacataagaaatgagaaattcctggttcatggggccaacctagggactctgggagtatgcagacttggccattcgtccattgtcgcctgcgggtcgcaccccaggcatactgaaaggccatactcgtggctggctgcctgcgggcctaagccttcccaggatcttcaggacacttgacagacttgtgttttctggtctgagctgcctccacaggtccctccagcaagcctcactgcacctctcccctgctgtttgtgtttggaattttgtcttctttagctgagaccaaattaaaccttggtgcataaagtgagcttaaaacttgccactgtttagtaagttagcccccatagaatgtgaccctgtctgcagagtctcatttacccctctttttctcattgtcatttgttggctttattagggctgtcttacaggatcatgttggcatttactatcatgtctttatcataaaccatgtttgtttgaggtagaagaatcaccatataattcgttgcccaaattgggactattgagagagaaaggggatgctattaattacaccagatcaaaaggcataaaccagacctgtcccaggccgatgtggaaatatgttctttctagttgtgggtaccctgatctaggtggtttgtaattgtgcattactgactgcatatgtttgtgtatgtgtaaatgtgggctccctgttaagtggggctcatggatacgaggcctgaggaagtgtggcttgctagtctgttacgttaacatgcttttctaaaattgcttcacgtgttaattcatttactcctgcattcattgactgtttttgttcttttccattcactttgtacttatttttttcattaaattttgcatttattttgaaaaaaa

SEQ ID NO: 351513 - DNA, 293 bp, Homo Sapiens
ccacaagtaccgcagaagaattggttttctagtacacttcatgcttcaggaccagaaatccagaaaaaaattctgtggtacgttaagtgtttactgtaagttccatttccatgtgaaaaactgtagttagctaaaaagtacatccatgaagaatcctgattaaacttgtttaatcctgagtcaattaatggttgcctaaggctgggggtgggggtgtggaatgggggaaataagggatgactgctaatgggtatatggtttatttgcagagtgatgaaaatattctaaaattg

SEQ ID NO: 351514 - DNA, 518 bp, Homo Sapiens
cctacttttcacagggacagtattactctcccctctgttctgagcctacttgctcctttgtaatgtttccactttctgtcccactccctaatagatgatttgtcctctctgcccagccccctagttctgatatttggattgtctgtgatctgggtagtacttaggaggtagaatcaaagccttgttgattggattgggagtttctaacttcctattaaaggcactgattaagcatctattgtataaagtaaagtaagattatgatccagtaagaaagattccacaagtagcgcaggaagaattggtttctagtacacttcatgcttcaggaccagaaatccagaaaaaaattctgtggtacgttaagtgtttactgtaagtttcatttccatgtgaaaaactgtagttagctaaaaagtacatccatgaagaatcctgattaaacttgtttaatcctggttaaactagctactagctaaacaataagttcacaacaactcaagaaccctgtggaaaag

SEQ ID NO: 351515 - DNA, 250 bp, Homo Sapiens
  misc_feature (239)..(239): n is a, c, g, or t
tttggacaaaacgagtaataaaaattggctttaaatatggaaaaaacagggccctgtaatcccatgctaccctaacactgggaccaggatggccatcacagtctgggaagggccagggctgggacctggggcacaggcacagcctcgccctatccccttcacccacacaggtacacacgcgcgcgcacgcaccccacaggcgcacacaggaaggggcggattattgctgggcacatgtntctattgttat

SEQ ID NO: 351516 - DNA, 324 bp, Homo Sapiens
  misc_feature (285)..(285): n is a, c, g, or t
ccttttaccaatccgaagggatgctttatgtaagatacataatacaatttaatgtatactgccaaaccaaataaatttgttgaaagagagttactagtaaataaggtgtttatttttgcctttaggttacccagcatgtgtttgaagccattcttgttcttctattctgtggaggtaaaatggggactatgggcaaagacagagtgcctatttggaacatcaataatcaacctagttagccctattgagaaagcacgaaaggcctctctttcccattatggcaanaaattcaacatcttagtggtaaagaaagttttcattgat

SEQ ID NO: 351517 - DNA, 427 bp, Homo Sapiens
  misc_feature (239)..(239): n is a, c, g, or t
ctgattgggatcttccctcctcttgttgtataagcagcttctgggtcatcctccaggacacgcgaaagtccgaaatcagaaaccttacacaccaagttactgttgatcaagatgttccgagcagcgaggtctcggtgaacatagcccatgtctgacaggtacttcatgccagatgctatccctcgaagcatccccactagctgaatgacagtaaactgggcatcgtgtttacgtagganaactatccaaggaaccattctccatgtattctgtggacaatcataactggcttacttttggtaacaactccttccagtcgaatgatattggggtggtcaaactgtcccataatgcttgcttctcccaggaagtctctcctctgcttttctgtgtagccaactttcagggtcttaatggccactgaaat

SEQ ID NO: 351518 - DNA, 2882 bp, Homo Sapiens
ttttttttcaaacctgagtaattgtcaaagtcaataaatagggggagagaattaaaatgctaaaatatatcggggtcaaataccctatcgggactaaagcagcaagggtttcttcgaatgcagccctctgttttgagatgcgtccggccttatgcttttaaatgaggacttggggcaaaaccctgggcacaaggtaccgccctgtggccgatctgagccatgccttattccaatgactgtaaacaatcaggaaggagtggggcctgacctccttcaccctctcccccatcacaaaaactcttcccttttgaaagtttctgttaaagggcaaaattatagaagcatcatcgagtggaagtcttatttggttggaggtgcttggctgtcccgcggctccgtgctcccctgcaggcactgcggagtcagatgtgtaagaggtcctcgtcgctgtcgtcatggaaggacaccagcttggtggagctcactgtcttctgctgtgcagagctggacttccctttcctcgccttctcacccctgaccagccccaccctatcgtcctcacgctcctgaagggcattgctctgtgcgtttctcactgggtgggagctctctgccccagctcccctgcccgagtgaactttcacctctgggatggtcagaacctcatcctcactgtcctggtcatccccatgcagggagctgagggctttcactgacttggtggtaatatggccgttctcctgcccttcctttccctgccgtggaggaggcagctggatctcttccatcagccactctgtttcattctcatctgtctcttcttccttattcacctttgagtatttgtaggacacgttggaacttctcctacagcaagtggtcagcttacttatcactgtttccctcctctccttcttgtagagcaacagggccagcaggcagcaggtgagcgccaccagcagcaggctgagcaccgcgccgactgcctggctccgttctgacagccccttgtgcatctgcccgtcgtccccgggattctcgctgtcaaagcccacccccagaggacacacggctgaggtgtaccaagagaagaggtactggcagtcggcagtctcgtgactgaactcggggatcccgtcctccaccagagggtcacagtggaagaagatggtggaagaaacagacttggtcttatcctttccgcacttagaggaagaggcaaacacgacatcaagatcgccgtcttgaaggtagtacttggtcttgtcagaggttccaactttccgactgaagtgctgatcgttgggcttcacctggcatatgttggctccagagcacgccgggtttctggagcttgtgatggaggaaagttggatctcatacaggtagttgtccccattggtcctcatgtccccagaggctctgaacagcttaaaataaatatctccgaggctgaagctcttgccatttatagggttggtgatggtcccattcaccatctgcacctcctgaggcttcacggcgcaggcagcccgggagtcccagctgaagtagtaagcgcagctgtcgatatcaaacctcttgaatgcaggtctgcccaccgtctttgtacaggtcaattctactcacggaggatgcggtcttatttccaccacacggataacctttggagtacgtgacaacaactttgtcacctatgacacccagcttctgcgtgtgaaacgaatcccaggacctggacgtcaaccagttgtggtccttctgcaaatgctggccctttcagaagcaacccaggggccctttatatattttctggcacagatttatatagtacgagactccgttgtggaccagggaccaggacccggtgagagaggagagcagccgcaggtcgtaggttttgtgtttctggacgaatttgcactccaacttctttggagggcagacaacttttgttttccactcaaatgtcacatcacacccacgcacttcactgaagacttgtggcctcccaatgtcctcatcttcatcacacttaaatatgatgctggatgtccggtagctgtttgagtgtctgcagaagccccactcgtggtctctgtcgtagtccgcagttgtgctacaccacagcttcgccctgctctctatgatgcactcctcgtagctcttcccattgaatatgaaggggaagacacaggggacgccgtcatcggtttctggagggcaacgatcagccattcacgtaaacttaaaacgaccgcttcatcctgggtgccgtgtaatccagtttcagtggattgcagccgtccaaaggatggcccccttggtgcctgagagcagacagactcctccggtccttacagcctccttgttctggcccgagctgcaaaggtgcacagccccaacgctgtaggtgcgcgagtcgcgagtcaccttaaaggtgctcgtggaaaggctggacaagttgaagctgtagaggagctgctcatctgtcagggtacagccatgccatcctcacttcatcaggacagacgacaggagtctcccattcgaacacaaagtcgcactcgctggtccttaacagcttaggcgttcccatgctcacacctctcttacagtgaaacgcgatgagcgaggtgtagttgaaatgcttgtccgctaagcaaggagtactgctttcaaaattcaagtaaatctcatttgctattggattgagtacttggtggtcctgctacccggccgatatctatggggggaccatcaataggaactttgcacacagcggctccggcaggacagggcactccgtgcatgggatttagtggctgacaaatattgatgtagaaatcagggttggtatcggaggcatcatcctcactctc

SEQ ID NO: 351519 - DNA, 977 bp, Homo Sapiens
taaaagccttccttcccatgcacctgcccataagactgcagtatcaggataatactgtatattagaaaccagaagcttctcacttcaaaactgacttaactaccgcacgccctgtcagtgttaggaagcagcctctggcctgtggaaagcctctcaagatggcaagcagaacttgtgtcttcttagtctgggatggatctttataagcttcatctgtggcagttttcatcttctcattgacccaactcttgagctcatcagaatcacggaaaaactgctgcagatggaaagaatcggctagctgggcccggcgacgcatggctctctcgtgaagggcattgcggcggctcaacagagcatctcggcgagtggccacatcttccattgcatagtggttgttctgaattagcttggttgcaaattcatctaatgctgtaatcttttcctcctgggcactaagggatttctcaaagtcttcgtgcttcttaagaagcgcttccacactatccaaggaatctcccaagtcttcattcaacaggaacgcctcctgcttgctcatccagttgtccacctgctcagtgtcccggtagaagagctgcaggtccatgcactgctcgtactgctgcctgcgcagctcccacagctccagcagcgccgctctctcctcggaaaggacggtcagcttctccctcacttcatctgaggcatagtgaccagcagcaagcagtgcctgtccagattcatctgcagatttgaagctgtcttcatgggcatcaatttcacccttgtgctcttggtgtctatctagcagggcttcagccccagccacatcactggcaagctcatctgcattgatgagggctttcatctcagtcacccagctggtgaggtcacggaagtcagcaaggaagcgttgaagcctgtatgaatcattgagccgtgcatgtctctctgccgccaaggtgcggatctgctcc

SEQ ID NO: 351520 - DNA, 997 bp, Homo Sapiens
  misc_feature (878)..(878): n is a, c, g, or t
  misc_feature (933)..(933): n is a, c, g, or t
  misc_feature (952)..(952): n is a, c, g, or t
ggaccggtccggaattcccgggatcgactcggccggtagtggagatgtccggccggtctaagcgggagtctcgcggttccactcgcgggaagcgagagtctgagtcgcggggcagctccggtcgcgtcaagcgggagcgagatcgggagcgggagcctgaggcggcgagctcccggggcagccctgtgcgcgtgaagcgggagttcgagccggcgagcgcgcgcgaggccccggcttctgttgtcccgtttgtgcgggtgaagcgggagcgcgaggtcgatgaggactcggagcctgagcgggaggtgcgagcaaagaatggccgagtggattctgaggaccggaggagccgccactgcccgtacctggacaccattaacaggagtgtgctggactttgactttgagaaactgtgttctatctccctctcacacatcaatgcttatgcctgtctggtgtgtggcaagtactttcaaggccggggtttgaagtctcacgcctacattcacagtgtccagtttagccaccatgttttcctcaacctccacaccctcaagttttactgccttccagacaactatgagatcatcgattcctcattggaggatatcacgtatgtgttgaagcccactttcacaaagcagcaaattgcaaacttggacaagcaagccaaattgtcccgggcatatgatggtaccacttacctgccgggtattgtgggactgaataacataaaggccaatgattatgccaacgctgtccttcaggctctatctaatgttcctcctctccggaactactttctggaagaagaccattataagaaacttcaaacgtcctccaggggatatcatggttcttgttggtccagcgtttgngagagcctgatgagaaagctctggaaccctcgaaatttcaaggcacatgtgtctncccatgagatgcttcaggnagttgtactttgcagtaagaagtcttttcagatcaccaaacaagg

SEQ ID NO: 351521 - DNA, 875 bp, Homo Sapiens
  misc_feature (52)..(88): n is a, c, g, or t
ggaatgatagactcactatagggcgaactcggagcttacgcggtggcggcgnnnnnnnnnnnnnnnnnnnnnnnnnnnnnnnnnnnnnatcaggccaaatcggccgagctcgaattcgtcgagagcggggtagtggagatgtccggccggtctaagcgggagtctcgcggttccactcgcgggaagcgagagtctgagtcgcggggcagctccggtcgcgtcaagcgggagcgagatcgggagcgggagcctgaggcggcgagctcccggggcagccctgtgcgcgtgaagcgggagttcgagccggcgagcgcgcgcgaggccccggcttctgttgtcccgtttgtgcgggtgaagcgggagcgcgaggtcgatgaggactcggagcctgagcgggagcaaagaatggccgagtggattctgaggaccggaggagccgccactgcccgtacctggacaccattaacaggagtgtgctggactttgactttgagaaactgtgttctatctccctctcacacatcaatgcttatgcctgtctggtgtgtggcaagtactttcaagcttttcacccttccctacaggccggggtttgaagtctcacgcctacattcacagtgtccagtttagccaccatgttttcctcaacctccacaccctcaagttttactgccttccagacaactatgagatcatcgattcctcattggaggatatcacgtatgtgtcgaagcccactttcacaaagcagcaaattgcaaacttggacaagcaagccaaattgtcccgggcatatgatggtaccacttacctgccgggtattgtgggactgaataacataaaggcaatgattatgccaacgctgtccttcacgg

SEQ ID NO: 351522 - DNA, 449 bp, Homo Sapiens
tgcttgagggctgggccgcatgccctctacctgctctgtaaatcccggaattcactttcctccagccgggcggacttttgcccgcagccagctagtagatttgctgactgacccccttccaagcaggagcttgaagagctgttacaggtaggagctgtcacactcattcctcagaattcttccatgcctgccctgccttccactgtgaatctacattccaatgttattttgcatagacatagtaccatatgtttgacaggtctccccatcttttcatttctgtcccccaagtatcttggatagtgttcattaaataagctgaataaatgctgtttgattgaacgaaggaaggtggctccagtagcccacttgtaccaaagtatgtgcaggagaattagttcatagaaatttccatcggagctctctgaaaatggagatgggtactgtag

SEQ ID NO: 351523 - DNA, 616 bp, Homo Sapiens
  misc_feature (55)..(55): n is a, c, g, or t
cagctatgagtctttgggagaaagggatgtatactggaaagacagaggaaccacnccacagacaccagtaaaaacgggatggggaagaggaggaaagccactcacttgtagaaggcagagaggcgtttcagagtggctgccagattatatacctcatcctcatctaggaaggacgactgagaaggaaagaagatccacaatagcatttcccccagaactcatcagtccacatcccccgtcttgcagcccctcccacccttgtttggggtgtcccattgtccagccccagctcctacctgtaacagctcttcaagctcctgctggaagcggtcagtcagcaaatctactagctggctgcgggcaaagtccgcccggctgaagaaagtgaattcgggattacagagcaggtagaggcatgcgccccagcctcaagcaccgctggctctgcatgcttcaccaccacctcctggagttgctgcaggaacagctccaggtgctgagaagaaaaggcagaagatggtgtgctgtggggatgggaggaggacactcttctggcgggaagtggaacggggttaaaagcattaaacttcaaggataagatgcctaagaaaaaaaa

SEQ ID NO: 351524 - DNA, 2003 bp, Homo Sapiens
gggtccggaattcccgggatgggcaagaagagggccacaggtgacgtcattcgggaaagccgccctgattggagggaaggaggcggagtctagtttccctggtgacggattgtccggtggtcgcctggtaaccggtcgtggctgtactggcggcggcagggctggcggcttaggccgcagaggtctgtgggcctgagcccacgctggactctgtccgttctgcgatgactgctgctctggccgtcgtcacgacgtcgggtttggaagatggggtgcctaggtcccgtggcgaagggaccggggaagtggtcttggagcgggggcccggcgcggcctaccacatgttcgtggtgatggaggacttggtggagaagctgaagctgctccgctacgaggaggagttcctccggaagagcaacctgaaggccccgtccagacactattttgcactgcctaccaaccctggcgaacagttctacatgttttgtactcttgctgcttggttgattaataaagcgggacgtccctttgagcagcctcaagaatatgatgaccctaatgcaacaatatctaacatactatccgagcttcggtcatttggaagaactgcagattttcctccttcaaaattaaagtcaggttatggagaacatgtatgctatgttcttgattgcttcgctgaagaagcattgaaatatattggtttcacctggaaaaggccaatatacccagtagaagaattagaagaagaaagcgttgcagaagatgatgcagaattaacattaaataaagtggatgaagaatttgtggaagaagagacagataatgaagaaaactttattgatctcaacgttttaaaggcccagacatatcacttggatatgaacgagactgccaaacaagaagatattttggaatccacaacagatgctgcagaatggagcctagaagtggaacgtgtactaccgcaactgaaagtcacgattaggactgacaataaggattggagaatccatgttgaccaaatgcaccagcacagaagtggaattgaatctgctctaaaggagaccaagggatttttggacaaactccataatgaaattactaggactttggaaaagatcagcagccgagaaaagtacatcaacaatcagcttgagaatttggttcaagaatatcgtgcagctcaagcccagctgagtgaggcaaaggagcgataccagcagggaaatggaggagtgacggaaagaaccagactcctctctgaggttatggaagaattagaaaaggtaaaacaagaaatggaagaaaagggcagcagcatgactgatggtgctcctttggtgaagattaaacagagcttaacaaaactgaagcaagaaactgtagagatggacattagaattggcattgtggaacacacactactccaatcaaagctgaaggagaagtccaacatgactaggaacatgcatgccacagttattccagaaccagcaacaggcttttattaaaacatactggttttcatgtttctgattagttgggttttttatatcaaactatatttcatgttgcatagatttcaaaacataattttatgttcaatgggtatttttttacatatacatactcacatattatatcatggtgattatgatggttaaagcctttacactgaatgtaatgtttaataaagaaattacaaattctcactttctaagaagctttcactaatcattacctatgttaaagctcccacctggtggctcatttttcatagcattccttgtgtaagccaaggtatatgacctgcgttttctgcagatgctgctgctgtcacaacatgaactgctgacacagtcctttaccttgctccacctctggcagtgatcataagtggctttgtggcccagagggccactgaaggatgggtagggcagggattcttttccaaggaaccccaaactggcctttggccttcagcttttatggggttaacc

SEQ ID NO: 351525 - DNA, 446 bp, Homo Sapiens
tgtcccccgaaagcttgtatactgacccagggcggaaaaagggcaagcaagaacctggagggcagctgacattgcccactgcatgcccatctccaggcctcccctcctcctgggagaagtctccccatttgtggagaacttcactattgggacagggctcactaccagcctgtgagacctcccttagagagtgagcagccattttaaatggtgccatgtgctttctgtgaggggactgggaaatttacagaacagtggcaaatgatgagcagagaagttgggcaaatgtggagtctctagccatgtgctgcattaggtattgccggattaccagtcttaggaaagtaatatggcttttctatatcgtgtgcaggccacttcagcttccttttccatatagagtctctcatatgaaaggagggaaggaaggaaagtaagaggaaaga

SEQ ID NO: 351526 - DNA, 622 bp, Homo Sapiens
  misc_feature (251)..(263): n is a, c, g, or t
tttgtgaatatctaagtttgtgaaactactagggcatgatacagtaaggtgtaattacagaatttacgaaatgtaaatggcctctacagagttttatggaatacctggtactaacgtaggcagttgcaaaaccacactgagttacagctgtcagccctcctcattcctaaataacttgccttacatatcagccctcccacttctgaagttcaaattagtgcctcggaaatgtagaatttattatttgtcannnnnnnnnnnnnagcatagattgagaacagttgaactcttaaatcctcagatgccaggggtctgctctagcatcagtaagtatttagcagaaactaactccgtaatgaatggaattcaattccacacatggtttgttcaagcacacttaataagtagcctattttttaaatgtctttttaaaatgtaaatatttggatgaagtttttctttgttttgatatattcatttgctacaccaactatgttttcagaattcatcttttgaacaacttggtttcagaatatgtaaaatgactttaaggatcttgtgtatcaaacctatccccggatgtgtgagaataatgtgttcataaagcatggatctcgcagaa

SEQ ID NO: 351527 - DNA, 363 bp, Homo Sapiens
  misc_feature (40)..(40): n is a, c, g, or t
  misc_feature (59)..(59): n is a, c, g, or t
ctgaatgggtagtaggaaagagggaatgggatgagagtcnaagatggggaggagctaancacagaaccagcctgctgatgtctctactccccagcagagcttagagaggggagggactgtttgaagaaccagatttatccccattataggcgtggcccacagtaaaagaagctcaagctttttaggaaatttggagctctagtgttggtccagggcctactccatcccttactcatgtaccttccttacatttaattttggaatagattgcctaggctcctccaaagcaccttagattcataattgtagaatatccattaaaagggttatctagtattcaaacaggacaattatgcctcctat

SEQ ID NO: 351528 - DNA, 296 bp, Homo Sapiens
  misc_feature (272)..(272): n is a, c, g, or t
attttttaaatcagagacactgagtaccacctaaagggacttaaattatgcaattggaatgaaactaaagtgaattgaacatttagtttcacttagattttatttttcctgccaactgtcatatgagagtttgagagggagcccagattagacttagagaaaaataaataaattacattttatctgcacacatgaattctagagtgagttaaatttaccacagcggggcatatatatgtatatatatgataccctgtttttatatagctccntatagttttaaaagcactttgtac

SEQ ID NO: 351529 - DNA, 411 bp, Homo Sapiens
atcctacacgctggttgaccctctgaggcgactgccaagaggtgccagctgttccccctaaactactactcactgttgaatgtcccccccaatacttcaacagaactgaaaaatttgctcaaaatatattcaaaacttaccgaattttctttttggactcctgtctttcctggagcatctggtggccctggttgatctgttcatctgtaggagtaagcactaagaagtcgattggaagtcctgtgtgtgggcaggtcttacttactgtaccttgttgtacatagtctctttctctgggactgtgtccctgcaggccattttttgggtggattgtttttgattcttccagtctccttgctaggggttctataggagaagggggcagggctttcactctttataagggtacag

SEQ ID NO: 351530 - DNA, 1870 bp, Homo Sapiens
  misc_feature (388)..(388): n is a, c, g, or t
caattatttataaaactttaatgagggagaggccctaactcttcctcagctctaccaactactgaaaggaaaagctggtgctggggagccctccacaccactgactgatgaatttcagcacgtcctggcacactgggctgtgggaggtcttgatggccataaggaatttattccagttgtccttgttagcagccttccctggccgcttaaattcaattttgttcctcagaatggggtatcctgtaataaggcagggcagggctcgaacaccagtgctcgctgccactagggaggcctcgtaggcgccacgctcatcccgaggcagaacctgctccagccgctggtccatggagactgtaagcacccagtctcgaacctcttctctctncagcctccggtacatgctgcttagctgggagtggcacctcaaagggaatgtctgtatcctgaaaatcagagtggtcaaggccatctagagtcccttcctcgatggcatcggtcaggtccaaaaagcgattgagggaagatgaatgccatgttatcccagccaactgccttggcagcaatgcctgcttcatagaaggctttgtctacaggtagtagctgggtgtgacgcaagagtgaaacagaaagcctggcagccacggtttccagctgtttgacactctgggctgcagagcgcgtggcatagtaatgagcgatcagcagcatcgtcttgaactcctcatgggctggagagtttgcctcactggacttcaccaggttttcacacaggttgaagaggacatctcgaagatcagcccagctatgataggcctcggcacagttggttccaggagagctcaccatgtcagtgaagatccttttgtagatattgaagttctgtgggttagcaggggctccgtgctgtacatacagggccaatgcctgggcagagctaccctcccggatcaagtgagttgcatacaaagccacatacttgtgcagaatcttgtagttctgcttggtagctgtttcaatgcacttgtcccactggccctgctccacatacaggtccaaagcagctatcacatccacacccaccagcgagtccactttgccctgattcttgaggaactctttataatgctggtccacatagtcttcatacctgggatctaactccttagctacaaccttcgccttgttccactcctcaccctcgatgaaagcatcgattgcttccttgacaaggtccagattcagatagagctctgcagctgcactgtgctttccaattccaatcagctggggtcctacagccagaacgacttccatattacgttggggaggcagaaacttgatggagagttcagctgccttcatccagcacttctccgccaggccgctgtttcctgagtctcgcactttgaggtagcagtccacggcacggctgtactctccagcctgctcccagtgtcgagcttgttccacaatccctccacaccctggcccccttcttagtagcttcccgctcatattcttcctgcagagcctccagctggctgggcacatagtccttgcagatgcgcagagcgtcactccataatccagcctccttataataattgagggccaggcctggtctctgggcccggagcagcagcccttctgctttctgaaagtccttctcctccaggccccccgggcctgtcccacagcacctcggcgacactgtcagggtcgtgagcctcagccacacgctgagctgcctcccatcccggacgcgtggtcgacgatatcccgggaattccggaccgggtaccgcctgctttttaaacgacgtttctatagcctaatgccctcaccccctcgggttgtgtgttgggtt

SEQ ID NO: 351531 - DNA, 514 bp, Homo Sapiens
cattgtagcaatcgatgctttcatcgagggtgaggagtggaacaaggcgaagcgtgtagctaaggagttagatcccaggtaagcttgtaaccccttcttactgcgaaattctcttttacttccttttgtaaagactgggagaaagtcttaccgggagggttggtattctggaacatgaagatggagctctctgaacatcttcacaggtatgaagactatgtggaccagcattataaagagttcctcaagaatcagggcaaagtggactcggtgagacttggagagttagcaggaggcagaatgcagggagagactcacaagactctctccctcttctttccctcatgtcatctcttttctcttgtaactctgtcttccattgacccagctggtgggggtggatgtgatagctgctttggacctgtatgtggagcagggccagtgggacaggtgcattgaaacagctaccaagcaggtactgctctcttcccattcccacttttcaactagcagt

SEQ ID NO: 351532 - DNA, 384 bp, Homo Sapiens
  misc_feature (147)..(147): n is a, c, g, or t
  misc_feature (299)..(299): n is a, c, g, or t
aggtctgtgctggtctcgcctgtccaggagtaccaccttcttgttgagcctgtcctggaacttctcgtaccagtccatgtataccttgctctgccagggcctccatgggggtgatgtacacacagcgcccctccgagctctgcagcnagcattcgcaggatggcaaactctgcacaaatagtcttcccgctgcccgtgggggcccccacaaacacgttgtcgtcactgttgtatacagtgttaaacacctgggtctggatgggattgaagaaaggaaatttatcttggtaaagactctnaaaggcactgtttctcagagcagacacgggcaagggctgcaggtccaaaagttcggttggaggggggtacttctccggcaagacc

SEQ ID NO: 351533 - DNA, 2104 bp, Homo Sapiens
  misc_feature (52)..(52): n is a, c, g, or t
  misc_feature (71)..(71): n is a, c, g, or t
  misc_feature (80)..(80): n is a, c, g, or t
  misc_feature (94)..(216): n is a, c, g, or t
  misc_feature (233)..(233): n is a, c, g, or t
acttggctcactgcaacctccgcctcccgggttcaagcgattctactgcctnagccttccaagtagctggnattacaggngcacaccaccacgnnnnnnnnnnnnnnnnnnnnnnnnnnnnnnnnnnnnnnnnnnnnnnnnnnnnnnnnnnnnnnnnnnnnnnnnnnnnnnnnnnnnnnnnnnnnnnnnnnnnnnnnnnnnnnnnnnnnnnnnnnntgagcaccacgcttggntggggcagcttttctttaatacacaaactgaggaaatgaccctgcaaatttcagggcttagaaagccttcatacggaaacacagaagaaatgcttcttgggaaattcacatgacacagcgccacgtcatacctgctctgccagggcctccatgggggtgatgtacacacagcgcccctccgagctctgcagcagcattcgcaggatggcaaactctgcacaaatagtcttcccgctgcccgtgggggcccccacaaacacgttgtcgtcactgttgtatacagtgttaaacacctgggtctggatgggattgaagaaaggaaatttatcttggtaaagactctcaaaggcactgtttctcagagcagacacgggcaagggctgcaggtccaaaagttcggttggaggggggtacttctccggcaagatcaggtgccggaaggagacaggcagctgggtctcacaagagagccagcggtcagacaccactcggatgaagtactgagggggcagcggttcaaagacaggcacgaagaatgtaatgaggtgctcgtcctgggcgtacttggccttgaggagaaaatactcatggtgcagaatcacctcgctgtccacatcctccaccagaatccaaaaagcctcggatgaaccatgcaccttttcatcccactggaagtctggcgtgatggtcagctccaccttcagggtggagcgtgtgataggctgcaggtgcactgacaactccaacttgggaaacagatggacatatttgtggatggtcttccccatctttggcatgcggataagctccccaatctcattatgattcaggtcgtacagacgctcaaaggggaaattcttcttctcaatcttcttcactacttcctcagggagtttccggaactggcgcagaggacacatggactgccacatgcgtttgtcgatcatcttgcagaggttcagggtcttgtctgtaagctgtgcccaacctcggttcaggacaatttcaaatatcgctcgcatcaaccggccagccgactgtgtgacatacaccatgtcagccatcagtgcaaagccctccaatttcagctgtgagatgaaggcttgcagaagaacgttgatcttagcactgggttcctcaatgctctcctttacagggataggcaccctctccagcaacttctgcagctccagcttctcctcctctctcactgtgatgttcttgaactcagaggacaatgagaagaccctgaaaagctcaatctcactcagggtgggcttcagcagctggttgtaagtctgcactgtatcattggtgatgtagtagtggctggctatacggccccagttctgtcacctggaagttgcccgtcttcttgtcgtacttgaccagattgttcttgtccagcatcagggcagctgtatgaaccagatctagtcggcgctggtccagcaggggatctcccttgaggtcatcatgagagatgccatagagggttggggatcgcagcattcggatatagaggtaggcatagcccagccagttcaccgcatccttggcattctggacatttcctagcacgatttctgcattgagcatgtcaggaagctttgaaaccatctggctttcaataggaagttgttgattgaggagggacaggtagtactgtagctccccatgagatgtgatgagtatgccttcacccttggtgtcatactggggtcttccggcacgtcccagcatctgcagaatgtccagtgctcccagttctgtccaacgccccttctctggactgtacacctgggtgcctttgatgatgactgtatgtgcagggagattcacaccccaagctagagttgctgtggaaacta

SEQ ID NO: 351534 - DNA, 900 bp, Homo Sapiens
  misc_feature (662)..(662): n is a, c, g, or t
aggctggaccggtccggattcccgggatcacgaggggacgcggccgaggagggtcgctgtccacccgggggcgtgggagtgaggtaccagattcagcccatttggccccgacgcctctgttctcggaatccgggtgctgcggattgaggtcccggttcctaacgaatctctgctggattggccgtaaccctgtccccgagcgggctcacagggtctgaaggccacgcatgaggcaaaggtaaagttctgagccacccggtgcctccttcccaggactgcaagatggaggaaggcgggaacctaggaggcctgattaagatggtccatctactggtcttgtcaggtgcctggggcatgcaaatgtgggtgaccttcgtctcaggcttcctgcttttccgaagccttccccgacataccttcggactagtgcagagcaaactcttccccttctacttccacatctccatgggctgtgccttcatcaacctctgcatcttggcttcacagcatgcttgggctcagctcacattctgggaggccagccagctttacctgctgttcctgagccttacgctggccactgtcaacgcccgctggctggaaccccgcaccacagctcccatgtgggccctgcaaaccgtggagaaagaacgaggcctggngtgggggaggtaccaggcagcccacaggggtcccgatccctaccgccagctgcgagagaaagaccccaagtacagtgcttctccgccagaatttcttcccgctacatggggctgtcctctctttggcaatctgggctgcgtcctgaacaatgggcttctggtctcgctggccctgcccctggaaaataaggaacccttctacatgggcccctgcaggcttataaatgcctccttccgg

SEQ ID NO: 351535 - DNA, 1055 bp, Homo Sapiens
cacatggcaacttggtcgggttccagccacgggcgtggacagttggccagcgtaaggctccaggaacagcaaggtaaagctgccttggcctcccagaatgtgagctgagcccaagcatgcttgtgaagccaagatgcagaggttgatgaaggcacagcccatggagatgtggaagtagaagggaaagagtttgctctgcactagtccgaaggtatgtcgggaaaggcttcggaaaagcaggaagccttgcagggtatgggggaccacaggggtgttagggcacttcccggttcccctcttatttccatccccaccccaggtacccatgacatccaagctgagggtccctacctgagacgaaggtcacccacatttgcatgccccaggcacctgacaagaccagtagatggaccatcttaatcaggcctcctaggttcccgccttcctccatcttgcagtcctgggaaggaggcaccgggtggctcagaactttacctttgcctcatgcgtggccttcagaccctgtgagcccgctcggggacagggttacggccaatccagcagagattctggcaaagcatcccgggaatgagagtgagaaaggcccaaagcagtcaaggcccaaagacaaccctcgaccccatctctccaaatgtcagccctcaagatctcaggctctctggacctcaatctccatgccacttcagaggccccaaatttcagccacagcagctccagatcatagccctaggtcttcagagatcactccactaattcccaaatatcaccccagggatccagttctgacagccaagaccactcctctcataaaataataccggatattaggtgaagatcccgaaagccccgaggaaaccctaaatctcatcctgaggacaccgatcccaccaagccccgaggaaacgccaaatctcatcccgaggacaccgatcccaccgttaggaaccgggacctcaatccgcagcacccggattccgagaacagaggcgtcacgccgctctcgacgaattcgagctcggccgatttggcctgat

SEQ ID NO: 351536 - DNA, 845 bp, Homo Sapiens
agcggattattggttgggggaaacccacgaggggacgcggccgaggagggtcgctgtccacccgggggcgtgggagtgaggtaccagattcagcccatttggccccgacgcctctgttctcggaatccgggtgctgcggattgaggtcccggttcctaacggtgggatcggtgtcctcgggatgagatttggcgtttcctcggggctttggtgggatcggtgtcctcaggatgagatttagggtttcctcggggctttcgggatcttcacctaatatccgaatctctgctggattggccgtaaccctgtccccgagcgggctcacagggtctgaaggccacgcatgaggcaaaggtaaagttctgagccacccggtgcctccttcccaggactgcaagatggaggaaggcgggaacctaggaggcctgattaagatggtccatctactggtcttgtcaggtgcctggggcatgcaaatgtgggtgaccttcgtctcaggcttcctgcttttccgaagccttcccccgacataccttcggactagtgcagagcaaactcttccccttctacttccacatctccatgggctgtgccttcatcaacctctgcatcttggcttcacagcatgcttgggctcagctcacattctgggaggccagccagctttacctgctgttcctgagccttacgctggccactgtcaacgccccgctggctgggaaaccccgcaccacagctgccatgtgggccctgcaaaccgtggagaaggagcgaggctgggtggggaggtaccaggcagccaccagggtcccgaatcctaccgcaagtgcgagagaaggacccaa

SEQ ID NO: 351537 - DNA, 956 bp, Homo Sapiens
gggggctgggaggcgggacgaattattggttgggggaaacccacgaggggacgcggccgaggagggtcgctgtccacccgggggcgtgggagtgaggtaccagattcagcccatttggccccgacgcctctgttctcggaatccgggtgctgcggattgaggtcccggttcctaacggactgcaagatggaggaaggcgggaacctaggaggcctgattaagatggtccatctactggtcttgtcaggtgcctggggcatgcaaatgtgggtgaccttcgtctcaggcttcctgcttttccgaagccttccccgacataccttcggactagtgcagagcaaactcttccccttctacttccacatctccatgggctgtgccttcatcaacctctgcatcttggcttcacagcatgcttgggctcagctcacattctgggaggccagccagctttacctgctgttcctgagccttacgctggccactgtcaacgcccgctggctggaaccccgcaccacagctgccatgtgggccctgcaaaccgtggagaaggagcgaggcctgggtggggaggtaccaggcagccaccagggtcccgatccctaccgccagctgcgagagaaggaccccaagtacagtgctctccgccagaatttcttccgctaccatgggctgtcctctctttgcaatctgggctgcgtcctgagcaatgggctctgtctcgctggccttgccctggaaataaggagcctctagcatgggccctgcatgctaataaatgcttcttcagaaaaaagaacgaacaacaacgcaaaaacggggggaaaccaagagaggggggcaacacagcggcaccgacagtggccaggggcacaagaggtcccagaccaaggttgtgcacaaggggcacactcggggcacccaaagggggcgcaaaatgcgaaacccggtaccgt

SEQ ID NO: 351538 - DNA, 781 bp, Homo Sapiens
aagcgggcacgaacttctggctaggtacgaggctgggtgttgaattcggcacgaggccgaggagggtcgctgtccacccgggggcgtgggagtgaggtaccagattcagcccatttggccccgacgcctctgttctcggaatccgggtgctgcggattgaggtcccggttcctaacgaatctctgctggattggccgtaaccctgtccccgagcgggctcacagggtctgaaggccacgcatgaggcaaaggtaaagttctgagccacccggtgcctccttcccaggactgcaagatggaggaaggcgggaacctaggaggcctgattaagatggtccatctactggtcttgtcaggtgcctggggcatgcaaatgtgggtgaccttcgtctcaggcttcctgcttttccgaagccttccccgacataccttcggactagtgcagagcaaactcttccccttctacttccacatctccatgggctgtgccttcatcaacctctgcatcttggcttcacagcatgcttgggctcagctcacattctgggaggccagccagctttacctgctgttcctgagccttacgctggccactgtcaacgcccgcttggctggaacccccgcaccacagctgccatgtgggccctgcaaaccgtggagaaggagcgagggctggtgggaggtaccaggcaggcaccaggtccgatcctacggcagtgcgagagaggcccatccgtggtcccggcaaattcttcgtacatggcgccctcttgcaccgggg

SEQ ID NO: 351539 - DNA, 3588 bp, Homo Sapiens
gtactgattggcaacctcctccccacatacatgtcagtgcacctcaaggttcactgagttctgagtgcaaccctcatggtggtcagtgcctgtgcaagcctggagtggttgggcgccgctgtgacctctgtgcccctggctactatggctttggccccacaggctgtcaagcctgccagtgcagccacgagggggcactcagcagtctctgtgaaaagaccagtgggcaatgtctctgtcgaactggtgcctttgggcttcgctgtgaccgctgccagcgtggccagtggggattccctagctgccggccatgtgtctgcaatgggcatgcagatgagtgcaacacccacacaggcgcttgcctgggctgccgtgatcacacagggggtgagcactgtgaaaggtgcattgctggtttccacggggacccacggctgccatatgggggccagtgccggccctgtccctgtcctgaaggccctgggagccaacggcactttgctacttcttgccaccaggatgaatattcccagcagattgtgtgccactgccgggcaggctatacggggctgcgatgtgaagcttgtgcccctgggcactttggggacccatcaaggccaggtggccggtgccaactgtgtgagtgcagtgggaacattgacccaatggatcctgatgcctgtgacccccacacggggcaatgcctgcgctgtttacaccacacagagggtccacactgtgcccactgcaagcctggcttccatgggcaggctgcccgacagagctgtcaccgctgcacatgcaacctgctgggcacaaatccgcagcagtgcccattctcctgaccagtgccactgtgatccaagcagtgggcagtgcccatgcctccccaatgtccagggccctagctgtgaccgctgtgcccccaacttctggaacctcaccagtggccatggttgccagccttgtgcctgccacccaagccgggccagaggccccacctgcaacgagttcacagggcagtgccactgccgtgccggctttggagggcggacttgttctgagtgccaagagctccactggggagaccctgggttgcagtgccatgcctgtgattgtgactctcgtggaatagatacacctcagtgtcaccgcttcacaggtcactgcagctgccgcccaggggtgtctggtgtgcgctgtgaccagtgtgcccgtggcttctcaggaatctttcctgcctgccatccctgccatgcatgcttcggggattgggaccgagtggtgcaggacttggcagcccgtacacagcgcctagagcagcgggcgcaggagttgcaacagacgggtgtgctgggtgcctttgagagcagcttctggcacatgcaggagaagctgggcattgtgcagggcatcgtaggtgcccgcaacacctcagccgcctccactgcacagcttgtggaggccacagaggagctgcggcgtgaaattggggaggccactgagcacctgactcagctcgaggcagacctgacagatgtgcaagatgagaacttcaatgccaaccatgcactaagtggtctggagcgagataggcttgcacttaatctcacactgcggcagctcgaccagcatcttgacttgctcaaacattcaaacttcctgggtgcctatgacagcatccggcatgcccatagccagtctgcagaggcagaacgtcgtgccaatacctcagccctggcagtacctagccctgtgagcaactcggcaagtgctcggcatcggacagaggcactgatggatgctcagaaggaggacttcaacagcaaacacatggccaaccagcgggcacttggcaagctctctgcccatacccacaccctgagcctgacagacataaatgagctggtgtgtggggcaccaggggatgcaccctgtgctacaagcccttgtgggggtgccggctgtcgagatgaggatgggcagccgcgctgtgggggcctcagctgcaatggggcagcggctacagcagacctagcactgggccgggcccggcacacacaggcagagctgcagcgggcactggcagaaggtggtagcatcctcagcagagtggctgagactcgtcggcaggcaagcgaggcacagcagcgggcccaggcagccctggacaaggctaatgcttccaggggacaggtggaacaggccaaccaggaacttcaagaacttatccagagtgtgaaggacttcctcaaccgtgagcctcccacgtgtcccaggccatgtggttgtcccctttggcaactcccggtgtctgtatctcccttggttcatacttgagcctcagggactacactggattagtgtttatgatcccttgactggctcctgagttattgcccatatgtggtcccaggtccatgttcttgagtctgagccccttgtatagtccctgtccttgtgattatatccttatgcctggtaacaaacccctatcccatgtacatgtcctgagtccataccccaaaactgtatcctcatgcccatgctggagaatctatgttcttaagttcttgctgtgtccctatagaggagggggctgatcctgatagcattgaaatggtggccacacgggtgctagagctctccatcccagcttcagctgagcagatccagcacctggcgggtgcgattgcagagcgagtccggagcctggcagatgtggatgcgatcctggcacgtactgtaggagatgtgcgtcgtgccgagcagctactgcaggatgcacggcgggcaaggagctgggctgaggatgagaaacagaaggcagagacagtacaggcagcactggaggaggcccagcgggcacagggtattgcccagggtgccatccggggggcagtggctgacacacgggacacagagcagaccctgtaccaggagaggatggcaggtgcagagcgggcactgagctctgcaggtgaaagggctcggcagttggatgctctcctggaggctctgaaattgaaacgggcaggaaatagtctggcagcctctacagcagaagaaacggcaggcagtgcccagggtcgtgcccaggaggctgagcagctgctacgcggtcctctgggtgatcagtaccagacggtgaaggccctagctgagcgcaaggcccaaggtgtgctggctgcacaggcaagggcagaacaactgcgggatgaggctcgggacctgttgcaagccgtcaggacaagctgcagcggctacagggtaagaaatggggcaccagagacacaagactgcgggaaaccccccctaaactgacacctgcccttcctagaattggaaggcacctatgaggaaaatgagcgggcactggagagtaaggcagcccagttggacgggttggaggccaggatgcgcagcgtgcttcaagccatcaacttgcaggtgcagatctacaacacctgccagtgacccctgcccaaggcctaccccagttcctagcactgccccacatgcatgtctgcctatgcactgaagagctcttggcccgccagggcccccaataaaccagtgtgaccccaa

SEQ ID NO: 351540 - DNA, 678 bp, Homo Sapiens
  misc_feature (55)..(55): n is a, c, g, or t
  misc_feature (67)..(67): n is a, c, g, or t
gaaggaggcccagcgggcacagggtattgccagggtcccatccgggggccagtgnctgacacacggnacacagagcagaccctgtaccaggtacaggagaggatggcaggtgcagagcgggcactgagctctgcaggtgaaagggctcggcagttggatgctctcctggaggctctgaaattgaaacgggcaggaaatagtctggcagcctctacagcagaagaaacggcaggcagtgcccagggtcgtgcccaggaggctgagcagctgctacgcggtcctctgggtgatcagtaccagacggtgaaggccctagctgagcgcaaggcccaaggtgtgctggctgcacaggcaagggcagaacaactgcgggatgaggctcgggacctgttgcaagccgctcaggacaagctgcagcggctacaggaattggaaggcacctatgaggaaaatgagcgggcactggagagtaaggcagcccagttggacgggttggaggccaggatgcgcagcgtgcttcaagccatcaacttgcaggtgcagatctacaacacctgccagtgacccctgcccaaggcctaccccagttcctagcactgccccacatgcatgtctgcctatgcactgaagagctcttggcccggcagggcccccaataaaccagtgtgaacccccaaa

SEQ ID NO: 351541 - DNA, 628 bp, Homo Sapiens
caggatccttaattgaggtccgggtgggggagggtctcatagggagtgtgagtagtgggagtctaggtgggaaggtcaggaaatggaagagaactacaactgacccaggttgagagtagagggtccaagacttagtttgaggaaaccagcagcaggtccagaaggaggagagagaacagtaatgggaaggagagagaagcataggagggaacaaggggcagaagagtaccttgacagcctgtggggccaaagccatagtagccaggggcacagaggtcacagcggcgcccataccactccaggcttgcacaggcactgaccaccatgagggttgcactccagaactcagtgaaccttgagggttgcactgacatggcagggcaccattgtagatgagggtggacaggctgatgaggaggggtgcgcaggcctcagagggagaagtcttgctgggcaccagaccctcctcatggcattggtagcgttcaaaggtgggctggcgctccacggcagaagaatatatccccactaaaaatatctagcaccaggacacggggcagcagcaccagagagtcaatgagcaggccacgtccagaagtaggagtccaaagctgggacttcccctgtc

SEQ ID NO: 351542 - DNA, 1174 bp, Homo Sapiens
  misc_feature (6)..(6): n is a, c, g, or t
  misc_feature (15)..(15): n is a, c, g, or t
  misc_feature (20)..(20): n is a, c, g, or t
  misc_feature (27)..(27): n is a, c, g, or t
  misc_feature (29)..(29): n is a, c, g, or t
  misc_feature (45)..(45): n is a, c, g, or t
  misc_feature (47)..(47): n is a, c, g, or t
  misc_feature (50)..(50): n is a, c, g, or t
  misc_feature (52)..(55): n is a, c, g, or t
  misc_feature (58)..(59): n is a, c, g, or t
  misc_feature (61)..(62): n is a, c, g, or t
  misc_feature (65)..(65): n is a, c, g, or t
  misc_feature (78)..(78): n is a, c, g, or t
  misc_feature (81)..(81): n is a, c, g, or t
  misc_feature (91)..(91): n is a, c, g, or t
  misc_feature (143)..(143): n is a, c, g, or t
  misc_feature (905)..(905): n is a, c, g, or t
gggccnctgctaaanacccncccgccnancttttttaaaataccnanaantnnnnatnnannccnccgctcacccccnggntcagttttcnagcccctcagcctccttggccccctcggccactgagccacccagccttggtngtcaatgtgggcagcctcatggtgcctgtctttgtggtgctgttgggtgtggtctggtacttccgaatcaattaccgccaattcttcacagcacctgccactgtctccctggtgggagtcaccgtcttcttcagcttcctagtatttgggatgtatggacgataaggacataggaagaaaatgaaaggcatggtctttctcctttatggcctccccacttttcctggccagagctgggcccaagggccggggagggaggggtggaaaggatgtgatggaaatctcctccataggacacaggaggcaagtatgcggcctccccttctcatccacaggagtacagatgtccctcccgtgcgagcacaactcaggtagaaatgaggatgtcatcttccttcacttttagggtcctctgaaggagttcaaagctgctggccaagctcagtggggagcctgggctctgagattccctcccacctgtggttctgactcttcccagtgtcctgcatgtctgcccccagcacccagggctgcctgcaagggcagctcagcatggccccagcacaactccgtagggagcctggagtatccttccatttctcagccaaatactcatcttttgagactgaaatcacactggcgggaatgaagattgtgccagccttctcttatgggcacctagccgccttcaccttcttcctctaccccttagcaggaatagggtgtcctcccttctttcaaagcactttgcttgcattttantttatttttttaagagtccttcatagagctcagtcaggaaggggatggggcaccaagccaagcccccagcattgggagcggccaggccacagctgctgctcccgtagtcctcaggctgtaagcaagagacagcactggcccttggccagcgtcctaccctgcccaactccaaggactgggtatggattgctgggccctaggctcttgcttctggggctattggagggtcagtgtctgtgactgaataaagttccattttgtggtcctgc

SEQ ID NO: 351543 - DNA, 1078 bp, Homo Sapiens
  misc_feature (3)..(3): n is a, c, g, or t
  misc_feature (25)..(26): n is a, c, g, or t
  misc_feature (31)..(32): n is a, c, g, or t
  misc_feature (35)..(35): n is a, c, g, or t
  misc_feature (47)..(47): n is a, c, g, or t
  misc_feature (52)..(52): n is a, c, g, or t
  misc_feature (66)..(66): n is a, c, g, or t
agncggtacccccccagggagacanngcagnnttngaagattggcgntattnattcgaagtaccanccacacccaacagcaccacaaagacaggcaccatgaggctgcccacattgaccaccaaggctgggtggctcagtggccgaagggggccaaggaggctgagggacctggaacagctgaccctgggggtgagcggtggcagtgaatcacacagttgtcggtaatgttcagagaacgcagtgtgcgggctgggtcttgtagcaggcggccctggtagatcagtttcatctggctttcttgtccagggaagtatttgctcttcagggcacccacggtatcctctggcctagccacagccagctcctcggtatcattgaggaatttgagccgcacagtgatgaggccagggctgggagggaggcaggtgctatcctcagatctcaggggggcctctggactgctgctgcctgcacctgcttgtcttttgggcaggccttggatgtcaaggagatgctcaaggctgggctcaacaccacccccagctccagcctccccagtggagtctccccgaccttcacccgcctcttcagccttctcatcattaccctctgatggatgggggagttcagttggctcggggttgccttggcctgccaccaggtggtccacatgccccaggtggaggacggatgtgtcgcctgctgacacaatagcgcccaggagctggttgctaccgctgtctgctacgtaggtagagagccaagctaggaccaaggctagaatcagcaccaccacacctgccaccaccatcacctcattacccacaccctcaatgagggtgacatcagagagctccatggcctggctgctggcagggtccacgctcatgaggttgttttgaagatgacgtgaaatcatcgaagcaaaatacttggcacagtgcctggcacactgaaaagaccagactaaatgttttgacctcgccaggacggcccctggactcgtctttccgtaggggtcgggaaaagggctggcaatctgcgattctgttcagggtccggtctcttccgccgct

SEQ ID NO: 351544 - DNA, 1391 bp, Homo Sapiens
  misc_feature (120)..(120): n is a, c, g, or t
  misc_feature (1357)..(1357): n is a, c, g, or t
  misc_feature (1367)..(1367): n is a, c, g, or t
  misc_feature (1376)..(1376): n is a, c, g, or t
ccgggatctggtcttatcacggaggctggggccaggcagcccttcggttcgggtgggcccatggaccccagtccaacgccgagggaataggaccatccaaaagcggaaccttcgcctcanaaaaagggtgcgggacccctcctcaccgtgcggtcacggtacggacagggtagatcacaggctgagggacagagcaaagacccctgaggccggacacctggaggtcctgccgggcccctccccacgagagttccctgtgtctgtgccaatcgttttcgtctttctttgccgcagtttcttttcctgtaaatcatggttaatgacattaaccttcttaccatcaggggttagttgtggttgtgataaataattactaccgttattaagcaattgcaatttgcagtgtgccaggcactgtgccaagtattttgcttcgatgatttcacgtcatcttcaaaacaacctcatgagataattctttgagcaactactggggcattatattggacacttcagtaccaagagaaatacatacgatccttgtctaccaggagtctaatagaaagatggacagggctgggtcagttagaacctaaacaaactagagacctggttgcaacccctcaggctctgctgatgctgtccccctttgttcctgcagcgtggaccctgccagcagccaggccatggagctctctgatgtcaccctcattgagggtgtgggtaatgaggtgatggtggtggcaggtgtggtggtgctgattctagccttggtcctagcttggctctctacctacgtagcagacagcggtagcaaccagctcctgggcgctattgtgtcagcaggcgacacatccgtcctccacctggggcatgtggaccacctggtggcaggccaaggcaaccccgagccaactgaactcccccatccatcagaggcaaatacttccctggacaagaaagccagatgaaactgatctaccagggccgcctgctacaagacccagcccgcacactgcgttctctgaacattaccgacaactgtgtgattcactgccaccgctcacccccagggtcagctgttccaggcccctcagcctccttggccccctcggccactgagccacccagccttggtgtcaatgtgggcagcctcatggtgcctgtctttgtggtgctgttgggtgtggtctggtacttccgaatcaattaccgccaattctttccagcacctgccactgtctccccggtgggagtccaccgtcttctttcagcttcctagtaatttggggaatgaatgggacggataaagggacatagggaaggaaaatggaaagggcatgggtcttttcttccntttattgggncttccccantttttcccgggggca

SEQ ID NO: 351545 - DNA, 1058 bp, Homo Sapiens
  misc_feature (726)..(726): n is a, c, g, or t
cggtccggaattcccgggatcgaagtttgaggggtgtggacggtttgtgacccccttagccgaccctactcctcactggccgggacaactggtcttatcacggaggctggggccaggcagcccttcggttcgggtgggcccatggaccccagtccaacgccgagggaataggaccatccaaaagcggaaccttcgcctcagaaaaagggtgcgggacccctcctcaccgtgcggtcacggtacggacagggtagatcacaggctgagggacagagcaaagacccctgaggccggacacctggggtcctgccgggcccctccccacgagagttccctgtgtctgtgccaatcgttttcgtctttctttgccgcagtttcttttcctgtaaatcatggttaatgacattaaccttcttaccatcaggggttagttgtggttgtgataaataattactaccgttattaagcaattgcaatttgcagtgtgccaggcactgtgccaagtattttgcttcgatgatttcacgtcatcttcaaaacaacctcatgagggctgggtcagttagaacctaaacaaactagagacctggttgcaacccctcaggctctgctgatgctgtccccctttgttcctgcagcgtggaccctgccagcagccaggccatggagctctctgatgtcaccctcattgagggtgtgggtaatgaggtgatggtgggggcaagntgtggtggtgctgattctagccttgggcctagcttggctctctacctacctaacaaacagcggtagcaaccaccttcctggggctattgtgtcagcaggggacacatccgtcctcaccctgggggatgggggaccacctgggggcaagccaaggcaaccccccaagccactggacttcccccatccatcaaaagggtaatggatgataaaggcttaaaaaagccgctgaaaggcccggggaaattctacctggggaagctggaaactcggggggggtgtgtttaaaccctaacatagagaaatctccttgaaaaataccaggagtttgccca

SEQ ID NO: 351546 - DNA, 615 bp, Homo Sapiens
  misc_feature (510)..(510): n is a, c, g, or t
  misc_feature (568)..(568): n is a, c, g, or t
ggatcacttctctgtctttgccaatagtttcatcttccgaggccaataaagtgctcacgagagcgcccatcttacaatcaacacctgtcacacccccaccactctcgccagcctttggaggcaccagtaaaatagaccagtattctcgaattctcttcccagttgcatttgcaggattcaaccttgtgtactgggtagtttatctttccaaagatacaatggaagtgagtagcagtgttgaatagcttgcggccaggacaacctgaattctataagttcttgttttctgtttcctatgttttcttaaaaaatagcattgagacttgtgtagatgcttctcagaacatgaaatcaaattggaaatctgtaacgcagcttctgtaagcatgtgtgggcaaaaaagcaataatcctactcctcaaaatagaaagttgaagattgctgaaaaatatgacttttctgtatgttaagaggaaaaactttatgaggggtggaatgggggttccaggntggaatttgtccaactttttgtcttcccattgtttcaggtatttttaaattggtcacnggttaaataaccatttacccccagggccaggattaaaattagggttg

SEQ ID NO: 351547 - DNA, 1374 bp, Homo Sapiens
  misc_feature (58)..(58): n is a, c, g, or t
  misc_feature (74)..(74): n is a, c, g, or t
  misc_feature (1014)..(1071): n is a, c, g, or t
cctttaagcctctttcaatgataaggcattactattgaaagcaaataaacattgaacncagtttgagatttgtntcacattgaaatgtgtgcaagtttacagtactaataaaaaagcagaaacctatactgcatcctagtccttgcttcttattttgtgaagtgcttcaatttaaaagtgctaggaacagaaactaacaatagtgactgtgacatccacctgaagatacttttaatttctcattttacgtacaaaaggctgaaaaataaaataaaatgaactttttacagtatttatattttcttagaaaactctaaccatatattttaaacagatttaagcagcttgcaacatgtttgtacagtcgggcttttcatcattgagtgttcaattaaggttggaagaataaaaagcaagaagctcttccttgtttgctgcaacctattgcttaatgacatgaagaatgaggtcttggtagaacaatttgcttcactttaccactgatatatggcttcccatattagacttctgaacagtggaaggaataagatacagcagcataggcaagataaacatgcagcagtgacagcttcaaactataatggaaccaattacatcatattacctgttgaaagcttgcaaactatacttactgtggtacatatttgatgcaataagtagtgtgcttaaatcatcatttttgtttgctcaaacatgcaccactgggtaaaattactatttacaaagcagacttttattttttaaattgacatatactatgtcaaccttaccaagagcagaagatggctaaacaatactgcaggataaagcagaatcaactttataaagtggtggtggggatgttttttggtcaattcaggcttcttagaaaggactgataggatatttttattttatgccaaaggacacttatcaaaaatgtgatagtcatgctgctgggactgtgaatgacaatgtaatggtatgtgtatatctctgtgtgtgcatgtgtgnnnnnnnnnnnnnnnnnnnnnnnnnnnnnnnnnnnnnnnnnnnnnnnnnnnnnnnnnntaatgggttatgtaaaaataaaacaactctttaatgcttgtgattctatggaacatttacaggcacattaaattttttctggatgagacaccttaaaaatacgaatagctatttaagcacctcaaaaatctaaaaacatcctgaaacaagaagtaaactcttcccttttgtgatgtgatttttttatgtgtgaatgagaattgcagcatgcctccatttaaaatatatccagttatacatacatagagaaatgtagaattccctccctttaatccctctccccaacacaacccatttacaaaa

SEQ ID NO: 351548 - DNA, 719 bp, Homo Sapiens
  misc_feature (332)..(332): n is a, c, g, or t
  misc_feature (337)..(410): n is a, c, g, or t
ctggtacatatgtgatgcaataagtagtgtgcttaagtcaatcatttttgtttgctcaaacatgcaccactgggtaaaattactatttacaaagcagacttttattttgtaaattgacatatactatgtcaaccttgaccaagagcagaagatggctaaacaatactgcaggataaagcagaatcaactttataaagtggtggtggggatgttttttggtcaattcaggcttcttagaaaggactgataggatatttttattttatgccaaaggacacttatcaaaaatgtgatagtcatgctgctgggactgtgaatgacaatgtaatggntatgnnnnnnnnnnnnnnnnnnnnnnnnnnnnnnnnnnnnnnnnnnnnnnnnnnnnnnnnnnnnnnnnnnnnnnnnnncatgtacatttaatgggttatgtaaaaataaaacaactctttaatgcttgtgattctatggaacatttacaggcacattaaattttttctggatgagacaccttaaaaatacgaatagctatttaagcacctcaaaaatctaaaaacatcctgaaacaagaagtaaactcttcccttttgtgatgtgatttttttatgtgtgaatgagaattgcagcatgcctccatttaaatatatccagttatacatacatagagaatgtagaattccctccctttaatccctctccccaacacaacccattacaaa

SEQ ID NO: 351549 - DNA, 1035 bp, Homo Sapiens
agcggaggctctttcttctggggccgggaaaaccgaggaatacacatgcgcagttggacccctcaggcccttcgtgtcccttcccacccatctccccgccccggccctctgggcggggctgggccgacagtccagctgcagctcgctggagattcagtgacttccttgttgtgagccccggcccggcagtgtcccgactcgtagccccgctgttcttaatccgggccgctagcctgagtctaggtcgcagccgcagccccaccccgtcggtcaccttttcagcgcaggtcctttccccgcacgccctgcgctccctaacatgcccaaccccagcagcacctcctctccctaccccctccctgaggaaattaggaacctgttggcagatgttgaaacatttgtagcagatatactgaaaggagaaaatttatccaagaaagcaaaggaaaagagagaatcccttattaagaagataaaagatgtaaagtctatctatcttcaggaatttcaagacaaaggtgatgcagaagatggggaagaatatgatgacccttttgctgggcctccagacactatttcattagcctcagaacgatatgataaagacgatgaagccccctctgatggagcccagtttcctccaattgcagcacaagaccttccttttgttctaaaggctggctaccttgaaaaacgcagaaaagatcacagctttctgggatttgaatggcagaaacggtggtgtgctctcagtaaaacggtattctattattatggaagtgataaagacaaacaacagaaaggtgaatttgcaatagatggctacagtgtcagaatgaataacactctaagaacaggcatggacaagaaagatggctgcctctgacaatctctgctcctgataaaacgtactatatcaagatataaagcagcttctcccaaagatgctgaacgaatgggtaccagcagctgaaacttgtattgaagatatggaatctgactatcattcctgaaggatactgactgagagaggag

SEQ ID NO: 351550 - DNA, 623 bp, Homo Sapiens
  misc_feature (338)..(338): n is a, c, g, or t
  misc_feature (353)..(353): n is a, c, g, or t
  misc_feature (358)..(358): n is a, c, g, or t
taggagccttgaaggatcaccagccaccgaccctccatcagggccaactgggcaggaaagggaacattgcagacctgatttcccgacgatgtcaccctgtcctccctccttgcttcttgctctgctaactcaactctgccttcctctttttcattcttctactctgccctatatggaggacaaatggacaccaggggtgctaaccttattggtgcctgccccagcctaccccaggtgccagcagactctcgtgcacaggaggctcccacagttatggagccaggaaaagaatttctctgcactggatggactgtatatttgagattaaaaattatatnccttataatcctgcntatancaatgctctctctgtaaaacctcttcctagcctcatttctctcaactgatcttgtttaggcgttgtattccttttatttactctttgcttgactgcttcctcctaaccctctacccactagcactctacttcctaaagctgttgtgtcattaactctgttggatcaactctctgggaaaagattctgttaatgtaagtgcacttactccctggatgttgtcactagtctagtggcttttgctaaataaacctttcttatttctag

SEQ ID NO: 351551 - DNA, 1279 bp, Homo Sapiens
  misc_feature (724)..(724): n is a, c, g, or t
gagggaggcgggaggatgaagttgattgactatggtctctccggctaccaggaagagtctgccgaaggtgaaggccatggacttcatcacctccacagccatcctgcccctgctgttcggctgcctgggcgtcttcggcctcttccggctgctgcagtgggtgcgcgggaaggcctacctgcggaatgctgtggtggtgatcacaggcgccacctcagggctgggcaaagaatgtgcaaaagtcttctatgctgcgggtgctaaactggtgctctgtggccggaatggtggggccctagaagagctcatcagagaactcaccgcttctcatgccaccaaggtgcagacacacaagccttacttggtgaccttcgacctcacagactctggggccatagttgcagcagcagctgagatcctgcagtgctttggctatgtcgacatacttgtcaacaatgctgggatcagctaccgtggtaccatcatggacaccacagtggatgtggacaagagggtcatggagacaaactactttggcccagttgctctaacgaaagcactcctgccctccatgatcaagaggaggcaaggccacattgtcgccatcagcagcatccagggcaagatgagcattccttttcgatcagcatatgcagcctccaagcacgcaacccaagctttctttgactgtctgcgtgccgagatggaacagtatgaaattgangtgaccgtcatcagccccggctacatccacaccaacctctctgtaaatgccatcaccgcggatggatctaggtatggagttatggacaccaccacagcccagggccgaagcccctgtggaggtggcccaggatgttcttgctgctgtggggaagaagaagaaagatgtgatcctggctgacttactgccttcccttggctgtttatcttcgaactctggctcctgggctcttcttcagcctcatggcctccagggccagaaaagagcggaaatccaagaactcctagtactctgaccagccagggccagggcagagaagcagcactcttaggcttgcttactctacaagggacagttgcatttgttgagactttaatggagatttgtctcacaagtgggaaagactgaagaaacacatctcgtgcagatctgctggcagaggacaatcaaaaacgacaacaagcttcttcccagggtgaggggaaacacttaaggaataaatatggagctggggtttaacactaaaaactagaaataaacatctcaaacagtaaa

SEQ ID NO: 351552 - DNA, 702 bp, Homo Sapiens
  misc_feature (451)..(451): n is a, c, g, or t
  misc_feature (571)..(571): n is a, c, g, or t
  misc_feature (576)..(576): n is a, c, g, or t
  misc_feature (598)..(598): n is a, c, g, or t
  misc_feature (646)..(646): n is a, c, g, or t
ggagggacagggtagggcagcatctgttatgggccctgagaagcccagagatggagctgaaactgtccagtatgcaaggatgccaggagaagggcaattcacacccagggtccatccatactacggagggtccaggaggtctcccagccacccatccttggcaaccagatgttactggggccaagctaggatgggagctgagggggaaggaagtaggggaatggaagtggaaggatgcagcccccccagacctgccgagaggcctcatgcatgtgcatgagtgtgcccatgggcagacatgtgcctgtcccagcacagcgggcagaatgagattgtccacactggccccaccctccaagtcgacctctaccccatgtacaactttgaccccacggaggaacaagatgagttggagcaggagctgctggagcatgggcgggacgcgcctctntacaggctgctacttctgtgcaggccatgcagggcaagactactctgccctcccagggcccactgcagagacccagccggctggtgtttaccgatgtggccaatgccatccatgcgtgantgggnctggggacaagcctgggacttnttgattagaggacccattcaagggtggcctacagaggttccccaattnccttgattgtcaagacctaatctgaagatcttccctgccaagacaaaagaggggtt

SEQ ID NO: 351553 - DNA, 1586 bp, Homo Sapiens
  misc_feature (1329)..(1329): n is a, c, g, or t
  misc_feature (1495)..(1495): n is a, c, g, or t
  misc_feature (1526)..(1526): n is a, c, g, or t
  misc_feature (1562)..(1562): n is a, c, g, or t
gggggcgcggagcgtgcagggaggcaaggcgctgtagcttcggggatcccccgaggctgctcggcccggccccacctgcgccgtgggtcccggccctacccaccctagctcaggccggcagagccagcgctcgcggatgcggctggtgcgcagtagcgggcctggccagcggctcggggcttgcagggagggcggatctcgggtcggacccgcagccccagacgccgggcttgggggttccccccgccccggcctcctgccagtcactaccacccctagcctctccaactgagctcggcgccgggagaggattaacacccaggaaggcagggggctccctttatccaaggaggtggctgtgcaggtggccaccacaggtggcaggaaccacaggctggggcactccggagtcaggagtgagtgggcaggttgactggcatcaggcagcctctcagccagggccctctccgcatcagcatgaactccaggaccgcatctgctaggggctggttcagcagccagccagcgctcgcggatgcggctggtgcgcagtagcgggcctggccagcggctcggggcttgcagggagggcggatctcgggtcggacccgcagccccagacgccgggcttgggggttccccccgccccggcctcctgccagtcactaccacccctagcctctccaactgagctcggcgccgggagaggattaagttttgtacatcaggaagaagaagaggctggagaagctacgccaccagctcatgcccatgtacaacttcgaccccacggaggaacaagatgagttggagcaggagctgctggagcatgggcgggacgccgcctctgtacaggctgctacttctgtgcaggccatgcagggcaagactactctgccctcccagggcccactgcagagacccagccggctggtgtttacccgatgtggccaatgccatccatgtgtgagtggcctgggacaagcctggacttctgatagagacccatcacggtgcctacagagctccccactccctgattgtcaagacctactctgaagatcttccctgccaagacacaagagggctgagccaggtcctagctgttctccagacccacctgctgactttagactctaagagagggccctagccaggctggacttctgaccactgacttctcctgacctgagggccctggcacagagggcatccctcatgctgaggaaggtcaagagcctctgctggctttcctcatccccttgttccagatccctcacatcagggtctgccccgctaatgttggaaggaaatgaggggagatacggnagtggggagggatttggggggaggaaaggggaagtttccctcttttagggagagacctgttttttggaatctggagcctcctctggggtggggagaggaaaccacccaagttatagggacagggtagggcagcatctgttatgggccctggagaagcccagagatnggagctgaaactgtccagtattgcaaggatnccagggagtaagggcaatttcacacccagggttccntccttattacggagggttccagga

SEQ ID NO: 351554 - DNA, 1169 bp, Homo Sapiens
  misc_feature (184)..(196): n is a, c, g, or t
gatcatgcacaagtcttaatttaatgggtaaaaacattaaattattacaacattttttccaataaagcataataaatagaatccatttcttttaaaacgctgtacaagagactggaaaacaagcttccaacagaatatgaataactcataactcattctaccttcttattgatttgggacgctnnnnnnnnnnnnnatgcctgaagcaacgtgcacacttcaggtctctgagcacagccggccaaggccaccagcttctaggctccctggaggtcatgacttcactcttaaatgctctgcccttgggtctcgtctgaggccccagcagcctgaggcgcagaagaaactgaaccgtttaggtggctgtggcctgcaggagcccttctctgtccaacacaccaaaaggagtgagaaaaacaaatgagaaacgtcccccaaacactcacacccccaaaaccaacacctataagccacaaactgtgctcctcccctactgcagcagtgggcaggagaaacaagaagagaaagtgtttcttcccctctcttctgatacataaccccacggggttctcttgctggagagggtgaccccagatcacagcggggccaccatgtggccctgcaggatgtccacgaggtcctgagcccctctctgcagtgccagctccaagggtgtgagacccctggcgtccctgcgatggagatcagattcagctgccagaaagctgaccacagcagtgtgaccctcttgaactgccagatggattggaagtgccccggtgccatcaggcacgttgacatcagccccgtgctccactaggaccttcagggtgtccaggaatccagtgcgggctgcgtcatggactggactggtaccggaggtgtcctggacattggggctggcaccttgcttcagcagctccagggcgatggcggtgctgccaaacatcatgacctgcagcgccgtcttgccgaagcggttgagggcgtcgggatgcaccagctcgcggtgcagaaggcggcgcacctcctgcacgtcgccccgggccgccgccccactcagccggtcgccggcgcgaacctcctccagcagcatgtcgacactggcggccctccctcctcctcgccgggcggggtctgctatccggagaattccggaccggtccagc

SEQ ID NO: 351555 - DNA, 664 bp, Homo Sapiens
agcgggggggtctcgggctgaggagccgggacgggagagcagcgcagccgggtgcaccacggccgcgccccgggagggctgttcgggccagcgcccgccggctgctccgcgctgacagcgccgggctggggcggggcggggggctttgcaggccgccagtgtcgacatgctgctggaggaggttcgcgccggcgaccggctgagtggggcggcggcccggggcgacgtgcaggaggtgcgccgccttctgcaccgcgagctggtgcatcccgacgccctcaaccgcttcggcaagacggcgctgcaggtcatgatgtttggcagcaccgccatcgccctggagctgctgaagcaaggtgccagccccaatgtccaggacacctccggtaccagtccagtccatgacgcagcccgcactggattcctggacaccctgaaggtcctagtggagcacggggctgatgtcaacgtgcctgatggcaccggggcacttccaatccatctggcagttcaagagggtcacactgctgtggtcagctttctggcagctgaatctgatctccatcgcagggacgccaggggtctcacacccttggagctggcactgcagagaggggctcaggacctcgtggacatcctgcagggccacatggtggccccgctg

SEQ ID NO: 351556 - DNA, 2061 bp, Homo Sapiens
  misc_feature (1233)..(1233): n is a, c, g, or t
  misc_feature (1380)..(1380): n is a, c, g, or t
  misc_feature (1488)..(1488): n is a, c, g, or t
  misc_feature (1522)..(1522): n is a, c, g, or t
  misc_feature (1546)..(1546): n is a, c, g, or t
  misc_feature (1564)..(1564): n is a, c, g, or t
  misc_feature (1620)..(1620): n is a, c, g, or t
tcacgggagggccaggacgaaggtgacaaaggctaggtgtcccccacggagacgcgccaaggtagccccgcgcgtgtccgtaggcgcgctctctggaagacgcggtggggggtgcgcagggctgcaccctcacaccaattgccccggcgaaggccgagcccagaaagtgagtgcgcgtgagtgtgcgcgcgcccgcatgcgggggcgtggcagtcaacagcaacaacccacacgccggcagggccagaaactcccatctccctcaccagccggaaagtacgagtcggctcagcctggagggacccaaccagagcctggcctgggagccaggatggccatccacaaagccttggtgatgtgcctgggactgcctctcttcctgttcccaggggcctgggcccagggccatgtcccacccggctgcagccaaggcctcaaccccctgtactacaacctgtgtgaccgctctggggcgtggggcatcgtcctggaggccgtggctggggcgggcattgtcaccacgtttgtgctcaccatcatcctggtggccagcctcccctttgtgcaggacaccaagaaacggagcctgctggggacccaggtattcttccttctggggaccctgggcctcttctgcctcgtgtttgcctgtgtggtgaagcccgacttctccacctgtgcctctcggcgcttcctctttggggttctgttcgccatctgcttctcttgtctggcggctcacgtctttgccctcaacttcctggcccggaagaaccacgggccccggggctgggtgatcttcactgtggctctgctgctgaccctggtagaggtcatcatcaatacagagtggctgatcatcaccctggttcggggcagtggcgagggcggccctcagggcaacagcagcgcaggctgggccgtggcctccccctgtgccatcgccaacatggactttgtcatggcactcatctacgtcatgctgctgctgctgggtgccttcctgggggcctggcccgccctgtgtggccgctacaagcgctggcgtaagcatggggtctttgtgctcctcaccacagccacctccgttgccatatgggtggtgtggatcgtcatgtatacttacggcaacaagcagcacaacagtcccacctgggatgaccccacgctggccatcgccctcgccgccaatgcctgggccttcgtcctcttctacgtcatccccgagatctncccaggtgaccaagtccagcccagagcaaagctaccagggggaccatgtaccccacccggggcgtgggctatgagaccatcctgaaagagcagaagggtcagagcatgttcgtggagaacaaggccttttccatggatgagccggtngcagctaagaggccggtgtcaccatacagcgggtacaatgggcggctgctgaccagtgtgtaccagcccactgagatggccctgatgcacaaagttccgtccgaaggngctaacgacatcatcctcccacgggccaccgccnacagccaggtgatgggcagtgccnactcgacctgcgggctgnagacatgtactcggcccagagccaccaggcggccacaccgccgaaagacggcaagnactctcaggtctttagaaacccctacgtgtgggactgagtcagcggtggcgaggagaggcggtcggatttggggagggccctgaggacctggccccgggcaagggactctccaggctcctcctccccctggcaggcccagcgacatgtgccccagatgtggaagggcctccctctctgccagtgtttgggtgggtgtcatgggtgtccccacccactcctcagtgtttgtggagtcgaggagccaaccccagcctcctgccaggatcacctcggcggtcacactccagccaaatagtgttctcggggtggtggctgggcagcgcctatgtttctctggagattcctgcaacctcaagagacttcccaggcgctcaggcctggatcttgctcctctgtgaggaacaagggtgcctaataaatacatttctgctttattaaaa

SEQ ID NO: 351557 - DNA, 925 bp, Homo Sapiens
  misc_feature (746)..(800): n is a, c, g, or t
ctcggctggatttaaggttgccgctagccgcctgggaatttaagggacccacactaccttcccgaagttgaaggcaagcggtgattgtttgtagacggcgctttgtcatgggacctgtgcggttgggaatattgcttttcctttttttggccgtgcacgaggcttgggctgggatgttgaaggaggaggacgatgacacagaacgcttgcccagcaaatgcgaagtgtgtaagctgctgagcacagagctacaggcggaactgagtcgcaccggtcgatctcgagaggtgctggagctggggcaggtgctggatacaggcaagaggaagagacacgtgccttacagcgtttcagagacaaggctggaagaggccttagagaatttatgtgagcggatcctggactatagtgttcacgctgagcgcaagggctcactgagatatgccaagggtcagagtcagaccatggcaacactgaaaggcctagtgcagaagggggtgaaggtggatctggggatccctctggagctttgggatgagcccagcgtggaggtcacatacctcaagaagcagtgtgagaccatgttggaggagtttgaagacattgtgggagactggtacttccaccatcaggagcagcccctacaaaattttctctgtgaaggtcatgtgctcccagctgctgaaactgcatgtctacaggaaacttggactggaaaggagatcacagatggggaagagaaaacnnnnnnnnnnnnnnnnnnnnnnnnnnnnnnnnnnnnnnnnnnnnnnnnnnnnnnnagacaggatgaccaagacaggaaggcaccccaaaattgaccgagaagaatcttttgacccttgcctttgaagcccccaggagggggacggggatcatggaaagccctctaaaggctgtatctccg

SEQ ID NO: 351558 - DNA, 288 bp, Homo Sapiens
  misc_feature (38)..(38): n is a, c, g, or t
  misc_feature (91)..(91): n is a, c, g, or t
cacagggaaggaggcgcctggggagggtcctgaacatnaacagggaaggaggcgcctggggagggtcctgaacgtcacggggaaggaggcncctggggagggccctggggaggggtcctgaacgtcacggggaaggaggcgcctggggagggtcctgaacgtcacggagaaggaggcgcctggggagggtcctggggagggtctctctcaccaacgggcatcttggtatttggtcccccagtgactttgtcacctagccaatgacatcctgcttgtaccaactcaatt

SEQ ID NO: 351559 - DNA, 2067 bp, Homo Sapiens
  misc_feature (38)..(38): n is a, c, g, or t
  misc_feature (1233)..(1242): n is a, c, g, or t
  misc_feature (1403)..(1403): n is a, c, g, or t
  misc_feature (1405)..(1405): n is a, c, g, or t
  misc_feature (1407)..(1408): n is a, c, g, or t
  misc_feature (1414)..(1414): n is a, c, g, or t
  misc_feature (1416)..(1416): n is a, c, g, or t
  misc_feature (1422)..(1422): n is a, c, g, or t
  misc_feature (1424)..(1424): n is a, c, g, or t
  misc_feature (1426)..(1426): n is a, c, g, or t
  misc_feature (1428)..(1428): n is a, c, g, or t
  misc_feature (1430)..(1430): n is a, c, g, or t
  misc_feature (1432)..(1432): n is a, c, g, or t
ggatggacggggaaggacggagccgagccgcggctgcntccctcgctcactccctcgcgcactcgtccgccccctccctccctcttatcccttccccggccccggctctggccccggcccattcgctgttgggtcttctgctagggaggatgtcgggttcgtcgctgcccagcgccctggccctctcgctgttgctggtctctggctccctcctcccagggccaggcgccgctcagaacgagccaaggattgtcaccagtgaagaggtcattattcgagacagccctgttctccctgtcaccctgcagtgtaacctcacctccagctctcacacccttacatacagctactggacaaagaatggggtggaactgagtgccactcgtaagaatgccagcaacatggagtacaggatcaataagccgagagctgaggattcaggcgaataccactgcgtatatcactttgtcagcgctcctaaagcaaacgccaccattgaagtgaaagccgctcctgacatcactggccataaacggagtaagaacaagaatgaagggcaggatgccactatgtattgcaagtcagttggctacccccacccagactggatatggcgcaagaaggagaacgggatgcccatggacattgtcaatacctctggccgcttcttcatcatcaacaaggaaaattacactgagttgaacattgtgaacctgcagatcacggaagaccctggcgagtatgaatgtaatgccaccaacgccattggctccgcctctgttgtcactgtcctcagggtgcggagcacctggccccactctggcctttcttgggaattctggctgaaattatcatccttgtggtgatcattgttgtgtatgagaagaggaagaggccagatgaggttcctgacgatgatgaaccagctggaccaatgaaaaccaactctaccaacaatcacaaagataaaaacttgcgccagagaaacacaaattaagtactgcttacaatatctttaggttcctgaaactggtggcaacatgacctgctaaaattttctgcttggacctctttggttctctcccctttcaagtgagcaacaccacaatgactgtctaaagcatgccttatttagcctctcctgtaagggtgatctagccaggtacattttaaacaatgcttcagtgtagaaggtgtaaactattttgggcttgatgtgctgtgaatgttgcnnnnnnnnnncctttgttaaaatatttaaatagaagtgaaaaggtcctctgaggatcagatcatgcatgcgccattttttacttaatgcagctgttaaattggcaaagctctaaaatgcactgctgccatctagtgatacacttttgtaaagtacagcaaaacctacaganananncgggananaaagananananananatatttatatttttgggggtgggagaaatccaaaataaagtaaatgcttgtttcatttttaagctgctgatattcattccttattgtatgttgtcagatgaggaaattgtgcagttctggtacataaagatgagtaatataaactgaaatctataattttaagggcttaacctgtgactttaataagctggaacagtccactgaatgggtataatgaattgcagtatatacgtatgattgctttttaagtgattatcttttcttctgttaagtcatgtaaattcataaatccttttgcactgatgtgttgaaccttattcttgtacattcattcaatcaaggcaaacttttataatttttcttttgtttccaatgaccttgaaatgttatagcatggtaatattctatgcaactatagttatactttttggtttgacactgtattttttcacattgatttactggttgatgatagattttataacctaacggttctcatgcggtgcgtaattgtagatgcatgtacttgtgtgttttgtgtaattattgaagtgcaatgatgtataaaaaagtggattcacctgtttttaaaaataaaacattgataaaaaaacccttgcgttacccactttcgt

SEQ ID NO: 351560 - DNA, 1645 bp, Homo Sapiens
  misc_feature (33)..(33): n is a, c, g, or t
  misc_feature (47)..(47): n is a, c, g, or t
  misc_feature (62)..(63): n is a, c, g, or t
  misc_feature (66)..(68): n is a, c, g, or t
  misc_feature (76)..(77): n is a, c, g, or t
  misc_feature (80)..(80): n is a, c, g, or t
  misc_feature (82)..(82): n is a, c, g, or t
  misc_feature (134)..(134): n is a, c, g, or t
  misc_feature (1219)..(1228): n is a, c, g, or t
  misc_feature (1390)..(1430): n is a, c, g, or t
ggatcggggaaggacggagccgagccgcggctncctccctcgctcantccctcgcgcactcnnccnnnccctcccnnccnanactcccttccccggccccggctctggccccggcccattcgctgttgggtctntctgctagggaggatgtcgggttcgtcgctgcccagcgccctggccctctcgctgttgctggtctctggctccctcctcccagggccaggcgccgctcagaacgagccaaggattgtcaccagtgaagaggtcattattcgagacagccctgttctccctgtcaccctgcagtgtaacctcacctccagctctcacacccttacatacagctactggacaaagaatggggtggaactgagtgccactcgtaagaatgccagcaacatggagtacaggatcaataagccgagagctgaggattcaggcgaataccactgcgtatatcactttgtcagcgctcctaaagcaaacgccaccattgaagtgaaagccgctcctgacatcactggccataaacggagtgagaacaagaatgaagggcaggatgccactatgtattgcaagtcagttggctacccccacccagactggatatggcgcaagaaggagaacgggatgcccatggacattgtcaatacctctggccgcttcttcatcatcaacaaggaaaattacactgagttgaacattgtgaacctgcagatcacggaagaccctggcgagtatgaatgtaatgccaccaacgccattggctccgcctctgttgtcactgtcctcagggtgcggagccactggccccactctggcctttcttgggaattctggctgaaattatcatccttgtggtgatcattgttgtgtatgagaagaggaagaggccagatgaggttcctgacgctggaccaatgaaaaccaactctaccaacaatcacaaagataaaaacttgcgccagagaaacacaaattaagtactgcttacaatatctttaggttcctgaaactggtggcaacatgacctgctaaaattttctgcttggacctctttggttctctcccctttcaagtgagcaacaccacaatgactgtctaaagcatgccttatttagcctctcctgtaagggtgatctagccaggtacattttaaacaatgcttcagtgtagaaggtgtaaactattttgggcttgatgtgctgtgaatgttgcnnnnnnnnnncctttgttaaaatatttaaatagaagtgaaaaggtcctctgaggatcagatcatgcatgcgccattttttacttaatggcagctgttaaattgggcaaagctctaaaatgcactgctgccatctagtgatacacttttgtaaagtacagcaaaacctacagnnnnnnnnnnnnnnnnnnnnnnnnnnnnnnnnnnnnnnnnnttttgggggtggggagaaatccaaaataaagtaaatgcttgtttcatttttaagctgctgatattcattccttattgtatgttgtcagatgaagaaattgtgcagttctggttacctaaagatggagtaatataaacctgaaatctataatttttaaggggcttaaacctgtggacttttaaataagccgtggaaacagttcccacctgggaatg

SEQ ID NO: 351561 - DNA, 1138 bp, Homo Sapiens
  misc_feature (84)..(84): n is a, c, g, or t
  misc_feature (90)..(90): n is a, c, g, or t
  misc_feature (103)..(104): n is a, c, g, or t
  misc_feature (908)..(908): n is a, c, g, or t
tgggcgctgcggcggcaggaggaggacggggaaggacggagccgagccgcggctgcctccctcgctcactccctcgcgcactcncccgcnccctccctccctnncctcccttccccggccccggctctggccccggcccattcgctgttgggtcttctgctagggaggatgtcgggttcgtcgctgcccagcgccctggccctctcgctgttgctggtctctggctccctcctcccagggccaggcgccgctcagaacgctgggtttgtcaagtcgcccatgtcagaaactaagctcacgggggacgcctttgagctgtactgtgacgtggtcgggagccccacgccaaaaatccagtggtggtacgcagaagtcaaccgggcagaatctttcagacagctgtgggacggtgctcggaagcgccgtgtcaccgtaaacaccgcctacgggtcaaacggcgtgagtgtgctgagaataacccggctcaccttggaggactctgggacttacgagtgcagggccagcaacgaccccaagaggaatgacttgaggcaaaacccctccataacatggattcgagcccaggccaccataagcgtccttcagaagccaaggattgtcaccagtgaagaggtcattattcgagacagccctgttctccctgtcaccctgcagtgtaacctcacctccagctctcacacccttacatacagctactggacaaagaatggggtggaactgagtgccactcgtaagaatgccagcaacatggagtacaggatcaataagccgagagctgaggattcaggcgaataccactgcgtatatcactttgtcagcgctcctaaagcaaacgccaccattgaagtgaaagccgctcctgacatcactggccataaacggagtangaacaagaatgaagggcaggatgcactatgtattgcaagtcagttggctacccccacccagactggatatggcgcaagaaggagaacgggatgcccatggacattgtcaatacctctggccgcttcttcatcatcaacaagggaaaattacactgagtttgaacattgttgaaccttgcaggttcacgggaaggccctggggcgagtattgaatgttattgccacctggg

SEQ ID NO: 351562 - DNA, 350 bp, Homo Sapiens
  misc_feature (235)..(298): n is a, c, g, or t
ggacaccttcaggagaaggtgaaaatcacaatatgactcattccagacgtgaagaacatgctgtagacatgatgatattatcattcattatactttttataatattattattaagtacaattatttgatctgcttgcttaaaaaatcaccagaggctgccccggcagaagctcctccagcagtggctccaccaccggccccagaaataaagccagaagcagcagaagtggccacnnnnnnnnnnnnnnnnnnnnnnnnnnnnnnnnnnnnnnnnnnnnnnnnnnnnnnnnnnnnnnnntcagattcctaaggttagaaatagggagattgaagccaagtatattcaaact

SEQ ID NO: 351563 - DNA, 3342 bp, Homo Sapiens
  misc_feature (1580)..(1603): n is a, c, g, or t
  misc_feature (2366)..(2396): n is a, c, g, or t
  misc_feature (2421)..(2436): n is a, c, g, or t
  misc_feature (2580)..(2589): n is a, c, g, or t
  misc_feature (3224)..(3224): n is a, c, g, or t
tggaccggtccggaattcccgggatccagcaccctcggaacccagaggcccgcgctctgaaggtgacccccctggggaggaaggcgatggcccctgcgaggacgatggcccgcgcccgcctcgccccggccggcatccctgccgtcgccttgtggcttctgtgcacgctcggcctccagggcacccaggccgggccaccgcccgcgccccctgggctgcccgcgggagccgactgcctgaacagctttaccgccggggtgcctggcttcgtgctggacaccaacgcctcggtcagcaacggagctaccttcctggagtcccccaccgtgcgccggggctgggactgcgtgcgcgcctgctgcaccacccagaactgcaacttggcgctagtggagctgcagcccgaccgcggggaggacgccatcgccgcctgcttcctcatcaactgcctctacgagcagaacttcgtgtgcaagttcgcgcccagggagggcttcatcaactacctcacgagggaagtgtaccgctcctaccgccagctgcggacccagggctttggagggtctgggatccccaaggcctgggcaggcatagacttgaaggtacaaccccaggaacccctggtgctgaaggatgtggaaaacacagattggcgcctactgcggggtgacacggatgtcagggtagagaggaaagacccaaaccaggtggaactgtggggactcaaggaaggcacctacctgttccagctgacagtgactagctcagaccacccagaggacacggccaacgtcacagtcactgtgctgtccaccaagcagacagaagactactgcctcgcatccaacaaggtgggtcgctgccggggctctttcccacgctggtactatgaccccacggagcagatctgcaagagtttcgtttatggaggctgcttgggcaacaagaacaactaccttcgggaagaagagtgcattctagccctgtcgggggtgtgcaaggtgggcctttgagaggcagctctggggctcaggcgactttcccccagggcccctccatggaaaggcgccatccagtgtgctctggcacctgtcagcccacccagttccgctgcagcaatggctgctgcatcgacagtttcctggagtgtgacgacacccccaactgccccgacgcctccgacgaggctgcctgtgaaaaatacacgagtggctttgacgagctccagcgcatccatttccccagtgacaaagggcactgcgtggacctgccagacacaggactctgcaaggagagcatcccgcgctggtactacaaccccttcagcgaacactgcgcccgctttacctatggtggttgttatggcaacaagaacaactttgaggaagagcagcagtgcctcgagtcttgtcgcggcatctccaagaaggatgtgtttggcctgaggcgggaaatccccattcccagcacaggctctgtggagatggctgtcgcagtgttcctggtcatctgcattgtggtggtggtagccatcttgggttactgcttcttcaagaaccagagaaaggacttccacggannnnnnnnnnnnnnnnnnnnnnnncctgccagctccactgtctccactaccgaggacacggagcacctggtctataaccacaccacccggcccctcttgagcctgggtctcaccggctctcacctggccctgcttcctgcttgccaaggcagaggcctgggctgggaaaaactttgggaaccagactcttgcctgtttcccaggcccactgtgcctcagagaccagggctccagcccctcttggagaagtctcagctaagctcacgtcctgagaaagctcaaaggtttggaaggagcagaaaacccttgggccagaagtaccagactagatggacctgcctgcataggagtttggaggaagttggagttttgtttcctctgttcaaagctgcctgtccctaccccatggtgctaggaagaggagtggggtggtgtcagaccctggaaggccccaaccctgtcctcccgagctcctcttccatgctgtgcgccacagggctgggaggaaggacttccctgtgtagtttgtgctgtaaagagttgcgtttttgttatatttaatagctgtgggcatgggtgaagaggaggggaagaggcctgtttggcctctctatcctctcttcctcttcccccaagattgagctctctgcccttgatcagccccaccctggcctagaccagcagacagagccaggagaggctcagctgcattccgcagcccccacccccaaggttctccaacatcacagcccaggcccacccactgggtaataaaagtggtttgtgnnnnnnnnnnnnnnnnnnnnnnnnnnnnnnncgacacagtgacctcagaaagaatnnnnnnnnnnnnnnnnccttgtccgcccccctcggccctctaaaaatctttcaagaccatttcctttggggcgcgggccccataggtaatgaaccagcgccctgactatttcccgagaaaacaccgcgccacaaaaaagggattggaatttccccccccnnnnnnnnnncccgccggcgagcaacaccggatcgcttcctaggaaaaaagtcccagaaggggatgctcctcatagtgccttttctcggggatttatttccacacaggtgaatttccccaacccgcacccccccagacaactcaaaataattcgaccaactacagtcggcatagacaccaataattaacccgcacctctaccctctgatacgtacaagaagctcccattctattaaagaaccacatttcttctgatcggacgaatatactagattaggtaaatataaatatctatatttctaaagaggatgtctgatcggagatataaatagtaaaaatctcggacaaaccccagacataacaacaccgccacccaccgatatacagggtgtctcaaattttgtatgtactccgccactatctacatttacctatcctacccatgcgaggcgcgcctcaaacacaatacttattttttcagatgaacccactgagccgcgtactatagaaataaatacatgtgggggcggcgcataaaaacacaagacatatatactacgcctctcttgttattgggagagctaactcctgttttttataatcatcatgcacaatcacacattctcgggtgtacaaacaaacctncacactctatcgaaggatgatattataatgggccttcgtgaatcactcatacacaaagacattttctaatcttgcatctgtataacactctcattctaattgggtgcattatataaaa

SEQ ID NO: 351564 - DNA, 416 bp, Homo Sapiens
ctattttcaccatagtatatgaatgtttatgcacaaagttggtgtatctgacacagacagaagaatattggttttgagtatgttgagtttgaggtaacttgtgggatatcaaagagtaattgtgcaatgggcagtgtgtaataggaatttaggagagatttttaggctagaaatagatacttaggatgattattttcataggtcattgtaacaattgtaagaataagatagaaggagaaagtgtagagtatgaagaggactgtaaaagggaaataaatcttgggacccccaaaatcactaagataaagggaaaagtcaatctgggaactgcttagtgcaaacctgcctcccattctattgaaagtcattcctctgaggctcatccgagacaaatgaatctctgattgcttcaacgc

SEQ ID NO: 351565 - DNA, 1007 bp, Homo Sapiens
  misc_feature (762)..(765): n is a, c, g, or t
gctgctaaaaatgagctttcctaataacctaaaacctaccccatctaggaataaactgtcctagccatgagagaccagaccagagactcactgtcttctaaaatgctttctccaaaatatttttaaaagaaaagggggaaatttgaaaggaaaataaatcttgaggcccccaaatcactaagctaaagggaaaagtcaagctgggaactgcttagggcaaacctgcctcccattctattcaaagtcatccctccgctcactgagataaatgcatatctgattgcctcctttggaaaggctaatcagaaactcaaaagaatgcaaccatttgtctctcacctacctgtgacctggaagctccctcctggcttcgagttgacccgcttttgcttcaggatgtcccggatcaaaccattgttcatcttacatatattgattgatgtctcatgtctccctaaaatgtataaaccaagctgtgccctgaccaccttggggacatgttgtcaggacttcctgaggctgtgtcacaggcatgcatccttaaccttggcaaaataaatggtctaaattaactgagacctgtctcaaacagcgttcacattttggtaaccccaaagggattctgagtagagatgcccctgcctttgacaaatctccaatcggtgcctggtaccagcatgagctaactttatgtctcaaaccaataggacaatttgctgaggtctgagagcacgccctccagaaagtccctgatcttttttnnnnggagttttacttgcttccaacacaaggaaggcaagtttttcctgcctccatgacgatgtaagacaaataactcctttatggaatttgagcgcgcatccaacagggaagatcagtttactttttcctgcttctaggttggtagagagcagtcctcagcctgagacccatccctaggtaagtaactgaattggtgtttgtcttggctaaagttaagattaacaaacagctggtctaaatttcct

SEQ ID NO: 351566 - DNA, 568 bp, Homo Sapiens
ggagcagcttggcaccacgtggcacacatcccctatacacacactggatctcattccagcaccgcggagacctgggcaatgtccgtgctgatgctgacggccgcgccatcttcagaatggaggatgagcagctgaaggtgtgggatgtgattggccgcagcctgattattgatgagggagaagatgacctgggccggggaggccatcccttatccaagatcacagggaactccggggagaggttggcctgtggcatcattgcacgctccgctggccttttccagaaccccaagcagatctgctcttgcgatggcctcaccatctgggaggagcgaggccggcccatcgctggcaagggccgaaaggagtcagcgcagccccctgcccacctttgagcaggacctcaccttggctctgttgctgtcctccagggcgagcactttccacttccagagggggccagagggactttgcctgcccagtctttggagagctcagtacagggcaggagctgctgtggtgttcccttggcaaatgaaagttttattttcgttttgggacttggtgt

SEQ ID NO: 351567 - DNA, 1022 bp, Homo Sapiens
tttagaggctcagtccccgcgacgccgcgctggttggtgctcctgcgccggaggagttctgcgtctcggggtggtgactgggtccagaatggcttcggattcggggaaccaggggaccctctgcacgttggagttcgcggtgcagatgacctgtcagagctgtgtggacgcggtgcgcaaatccctgcaaggggtggcaggtgtccaggatgtggaggtgcacttggaggaccagatggtcttggtacacaccactctacccagccaggaggtgcaggctctcctggaaggcacggggcggcaggcggtactcaagggcatgggcagcggccagttgcgtgagtgaccactgtggccttggcccctctcggagggaggtggctcagagctggtacaaatctaatcataggattctcaggctctgggttggagtggctttgaggaaggtgtgaaaattatgtgagactccctgcccttcccgagctgctgaagaggtgtgctgggtgaggtggcaagccagcccaagtgtctaataccttgcagagaatctgggggcagcagtggccatcctgggggggcctggcaccgtgcagggggtggtgcgcttcctacagctgacccctgagcgctgcctcatcgagggaactattgacggcctggagcctgggctgcatggactccacgtccatcagtacggggaccttacaaacaactgcaacagctgtgggaatcactttaaaccctgatggagcatctcatggggggcccccaggactctgaccggacagggccaagaggaaccttgcctgcccagtcctcgggggagctcagattcttacgagaactggtacgcacagggagggcactgggtactttaggggaaccaggacgaaggcgtcgaatcagggaatcagaagaatgcggcttcgcaccacgtggcacccttccctataacacctggagttcatcaccaccgcgggaaccgggcaggcgggaaagtgacaggcggccactcagaaggt

SEQ ID NO: 351568 - DNA, 1246 bp, Homo Sapiens
  misc_feature (1084)..(1179): n is a, c, g, or t
agcggagtccccgcgacgccgcgctggttggtgctcctgcgccggaggagttctgcgtctcggggtggtgactgggtccagaatggcttcggattcggggaaccaggggaccctctgcacgttggagttcgcggtgcagatgacctgtcagagctgtgtggacgcggtgcgcaaatccctgcaaggggtggcaggtgtccaggatgtggaggtgcacttggaggaccagatggtcttggtacacaccactctacccagccaggaggtgcaggctctcctggaaggcacggggcggcaggcggtactcaagggcatgggcagcggccagttgcagaatctgggggcagcagtggccatcctgggggggcctggcaccgtgcagggggtggtgcgcttcctacagctgacccctgagcgctgcctcatcgagggaactattgacggcctggagcctgggctgcatggactccacgtccatcagtacggggaccttacaaacaactgcaacagctgtgggaatcactttaaccctgatggagcatctcatgggggcccccaggactctgaccggcaccgcggagacctgggcaatgtccgtgctgatgctgacggccgcgccatcttcagaatggaggatgagcagctgaaggtgtgggatgtgattggccgcagcctgattattgatgagggagaagatgacctgggccggggaggccatcccttatccaagatcacagggaactccggggaagaggttggcctgtggcatcattgcacgctccgctggccttttccagaaccccaagcagatctgctcttgcgatggcctcaccatctgggagagagcgaggccggcccatcgctggcaagggccgaaaggagtcagcgcagacccctgcccacctttgagcaggacctcaccttggctctgttgctgtcctccagggcgagcactttccacttccagagggggccagagggactttgcctgcccagtctttggagaagctcagtacagggccagggagcttgctagtgggtggtccccttggcacaatgacacgttcagtcaagcggcgggggnnnnnnnnnnnnnnnnnnnnnnnnnnnnnnnnnnnnnnnnnnnnnnnnnnnnnnnnnnnnnnnnnnnnnnnnnnnnnnnnnnnnnnnnnnnnnnnncagaagacacccgacgacgcgcacgccccgaaaagcggccagggggacgaccagacaacgccacggt

SEQ ID NO: 351569 - DNA, 749 bp, Homo Sapiens
  misc_feature (131)..(131): n is a, c, g, or t
  misc_feature (140)..(140): n is a, c, g, or t
actttgggcatgtagagcattcccagggacaccgaggcgctcagactcaccgagaccgtcagcgtcgtcgtctggatgtacagcttgtcggccgactgcgaggtgccaaagaagatggggatgaaggccanccagacgangcaagtggtgtacatggtgaagccaatgggcttggcctcattgaaggtctcgggcacgccgcgtgtcttgatggcatacacggtgcacgtgaccatgagcagcatgctgtagcccagcaggcagatgagcgacaggtccgagatgtcacacttgagcacaccccctgcgaagcgggggtcgagtgtccgctggtcctggaagtccaccaccgagtgggaggggtccaccacaaaccacacacagatgcccagcagctgcagcgagatgaggctgaaggtgatggccagctgtgaggcggggctgatgaagcgtggggcactgaccgagcgcttgccctgctcgaagatgcggtagatgcggttggtcttggtgagcagggctgcatagctgatgctcatccctagtcccaggaagattcggcgcagcgagcaggtgccaaggtcgggctcagcgatcatgaggaaggtggtggcatagcacaggaagatgcctgccagcagcacgtagctcagttcacggcccgaggccttgacgatgggcgtgtcgttgtagcgcacaaaggtgatcaccacgaacaacgtggcagcgatgcccaccacggccaggaa

SEQ ID NO: 351570 - DNA, 2550 bp, Homo Sapiens
  misc_feature (78)..(78): n is a, c, g, or t
  misc_feature (100)..(100): n is a, c, g, or t
  misc_feature (1153)..(1183): n is a, c, g, or t
  misc_feature (1802)..(1802): n is a, c, g, or t
  misc_feature (1825)..(1825): n is a, c, g, or t
  misc_feature (1986)..(1986): n is a, c, g, or t
  misc_feature (2035)..(2035): n is a, c, g, or t
  misc_feature (2055)..(2055): n is a, c, g, or t
  misc_feature (2094)..(2094): n is a, c, g, or t
  misc_feature (2107)..(2107): n is a, c, g, or t
  misc_feature (2149)..(2157): n is a, c, g, or t
  misc_feature (2166)..(2166): n is a, c, g, or t
  misc_feature (2224)..(2224): n is a, c, g, or t
  misc_feature (2294)..(2294): n is a, c, g, or t
  misc_feature (2321)..(2321): n is a, c, g, or t
  misc_feature (2382)..(2382): n is a, c, g, or t
  misc_feature (2407)..(2408): n is a, c, g, or t
  misc_feature (2448)..(2448): n is a, c, g, or t
  misc_feature (2481)..(2496): n is a, c, g, or t
  misc_feature (2498)..(2498): n is a, c, g, or t
  misc_feature (2507)..(2507): n is a, c, g, or t
gaaaccgttgggcagagtacatgaaaggaggcccgagtcagggtccagaggagactttgggccagaaggggagcgcanttggcaccccctgatgccagcntcctcatcagcaatgtgtgcagcatcggggaccatgtggcccaggagctttttcagggctcagatttgggcatggcagaagaggcagagaggcctggggagaaagccggccagcacagccccctgcgagaggagcatgtgacctgcgtacagagcatcttggacgaattccttcaaacgtatggcagcctcatacccctcagcactgatgaggtagtagagaagctggaggacattttccagcaggagttttccaccccttccaggaagggcctggtgttgcagctgatccagtcttaccagcggatgccaggcaatgccatggtgaggggcttccgagtggcttataagcggcacgtgctgaccatggatgacttggggaccttgtatggacagaactggctcaatgaccaggtgatgaacatgtatggagacctggtcatggacacagtccctgaaaaggtggacatcttcaataaggagctactgctaatccccatccacctggaggtgcattggtccctcatctctgttgatgtgaggcgacgcaccatcacctattttgactcgcagcgtaccctaaaccgccgctgccctaagcatattgccaagtatctacaggcagaggcggtaaagaaagaccgactggatttccaccagggctggaaaggttacttcaaaatgaatgtggccaggcagaataatgacagtgactgtggtgcttttgtgttgcagtactgcaagcatctggccctgtctcagccattcagcttcacccagcaggacatgcccaaacttcgtcggcagatctacaaggagctgtgtcactgcaaactcactgtgtgagcctcgtaccccagaccccaagcccataaatgggaagggagacatgggagtcccttcccaagaaactccagttcctttcctctcttgcctcttcccactcacttcccctttgggttttcatattttaaatgtttcaatttctggatttttttctctccgccaccaaacttgctcactactcatccccacgccgacgcctccgcctcgnnnnnnnnnnnnnnnnnnnnnnnnnnnnnnnagcgacacccacacgctcccgtccaaaccgcacctaacaccccccccaaactcccatcccaatcaatccgccacccccatactcccattcccctcataaccacccccacaacaacgatacaacaattcccctaccacccaacacatcgctcaccgcaccacccacaatccgcatcataacccaaacatggtccatcacactacacatctccccacaatattaccacaaagcaactactcccccagcacctctcgcatacccacacgaactcacccccgagcacccccgacaccctcctccacaaaccgctccacactacctccatcccccaaacacccccccttacccactcaccttcctcccatgaccaaaccccacccacgtaccactaccgccacccgacaacgaatcccgctacacagcgattcacgacacacccaaatacgaaacacaacacgcacaaaatcattgaaccatacctcgtgaacgcgtcgatactatacgatgacccgcgtagacacccaagatgcagttacgcagaaagagcccgtcaacgcccacgtccgcacgctccgtcacgaacgtatgcacattcacatgccatatcacgagcactccnccctaccatccacacaacatctnccccatttttggccaaacgcgaccccacgctgctttcgaacgcggcctgcaactaaggccgaaccggaccataacatcatcttcaacgtaatacgacgcgctcaaatcaatcgatcacgctaaaccacgcccccacccatacaattgttaatcccctctanatcaacctatctccgctacaagacccgccccattaatcttacatccacntacccccaccctgcaccagnccgcctcactcctacgccgaacggccgctcatccacacncataccacttctnacaacaactgccggcggcaatcagcacgtctaccttggcgannnnnnnnnacactgctnatccagaccccatcattgcagtaatcgacggtgcacgcctggtccagaatggaaactncctggtgtcgcggtcatgccggactgccatgccttgaagtccggagaaacccgcgttcccgcccatgttnttttcctccgtgcctcccctaccattntgttcggcgggcacggccggcctgaccagtggtacaacattagtggtgcgatccgcttcanacgcctattacttccccactctggnncccactcttcacttttcacccgccacccaccagtcactanctaactcccgcggcgtatcacaaccgtttacannnnnnnnnnnnnnnntncgtccaacntaccccggtactcatctactccgcaacacccttacttagatga

SEQ ID NO: 351571 - DNA, 1153 bp, Homo Sapiens
  misc_feature (450)..(450): n is a, c, g, or t
  misc_feature (467)..(467): n is a, c, g, or t
  misc_feature (699)..(699): n is a, c, g, or t
  misc_feature (1051)..(1051): n is a, c, g, or t
  misc_feature (1088)..(1088): n is a, c, g, or t
  misc_feature (1118)..(1118): n is a, c, g, or t
aagctgaagctgaagcagagccagaggcggcgcggcggggtgctcggcggcgcggcacgcggcccagaagcgttggaatcctgaattgagacggctgcgcctaaagacagcaggagtggcggggccgccgccgtcgccggagagatgagccgggaagcttgaggccggagacgcccgccttcgggcccgtccgcccggcttccccgctcccgggtactggaagatgaaagagactatacaagggaccgggtcctgggggcctgagcctcctggacccggcatacccccagcttactcaagtcccaggcgggagcgtcttcgttggcccccacctcccaaaccccgactcaagtcaggtgggagggtttgggccagatcctgggtcagggaccacagtgccagccagacgcctccctgtcccccgaccctcttttgatgcctcagcaagtnaagaagaggaagaagangaggaggaggaggatgaagatgaagaggaggaagtggcagcttggaggctgcccccaagatggagtcagctgggaacctcccagcggccccgcccttcccgccccactcatcgaaaaacctgctcacagcgccgccgccgagccatgagaaccttccggatgctgctctactcaaaaagcacctcgctgacattccactggaagctttgggggcgccaccggggccggcggnggggcctcgcacaccccaagaaccatctttcaccccagcaagggggtgcgacgccacaggtgccatccccctgttgtcgttttgactccccccgggggccacctccaccccggctgggtctgctaggtgctctcatggctgaggatggggtgagagggtctccaccagtgccctctgggccccccatggaggaagatggactcaggtggactccaaagtctcctctggaccctgactcgggcctcctttcatgtactctgcccaacggttttgggggacaatctgggccagaaggggagcgcattgggcaccccctgatgccagcatcctcatcagcaatgtgtgcagcatnggggaccatgtggcccaggagctttttcagggctcanatttgggcatggcagaagaggcagagaggnctgggggagaaaagccggccagcacagccccctgt

SEQ ID NO: 351572 - DNA, 534 bp, Homo Sapiens
gtttagggtacgctgcgagtcaaaataggtgatggtgcgtcgcctcacatcaacagagatgagggaccaatgtacctccaggtggatggggattagcagtagctcccttaatgaaaatgtcccacgtttttggcccaccttttcaccccatcaataacccttggtacggagtttatcaatagaagaaactattgaagaaatgcacctttttcagggactgtgtccatgaccaggtctccatacatgttcatcacctggtcattgagccagttctgtccatacaaggtccccaagtcatccatggtcagcacgtgccgcttataagccactcggaagcccctcaccatggcattgcctggcatccgctggtaagactggatcagctgcaacaccaggcccttcctggaaggggtggaaaactcctgctggaaaatgtcctccagcttctctactacctcatcagtgctgaggggtatgaggctgccataccgtttgaaggaattcgtccaagatgctctgtacgcaggtcacatg

SEQ ID NO: 351573 - DNA, 392 bp, Homo Sapiens
  misc_feature (234)..(234): n is a, c, g, or t
  misc_feature (352)..(352): n is a, c, g, or t
attactgagcatgtgtcaaagacctcccaagcctcaggaggacaggcaaccctccccagttccttccttcagggtggcctggacagagaagaatgatggccagagggctccccttgccaataacctcctgcccacctcccaactccagtctgggaagacagacctgtcatctgtggaacccattgtgacgatgagttagaagaggttgggaagagggagtgggaggggtctgtntccacctgaggcagggaaagagagcctattctcacacatgatcttcagagtgctggaaacacactcctgcagaagctgtaggactctttgaattcctaggaaactgtccagcctcctngccccatgtgaatgtgaaaacttaaaaggcaccaccaact

SEQ ID NO: 351574 - DNA, 1372 bp, Homo Sapiens
cgtcactgggcgcgggatttggccgccgctggggctccggagccgctcgctcccgacacggctcacgatgctgcggcgagcagggcgcgggcgggggcccgcgtgctccagttcactaactgccggatcctgcgcggagggaaactgctcagggaggatctgtgggtgcgcggaggccgcatcttggacccagagaagctgttctttgaggagcggcgcgtggccgacgagcggcgggactgcgggggccgcatcttggctcccggattcatcgacgtgcagatcaacggtggatttggtgttgacttctctcaagccacggaggacgtgggttcgggggttgccctcgtggcccggaggatcctgtcgcacggcgtcacctccttctgccccaccctggtcacttccccaccggaggtttatcacaagggctgcacctggagggccccttcatcagccgggagaagcggggcgcgcaccccgaggcccacctccgctccttcgaggccgatgccttccaggacttgctggccacctacgggcccctggacaatgtccgcatcgtgacgctggccccagagttgggccgtagccacgaagtgatccgggcgctgacggcccgtggcatctgcgtgtccctagggcactcagtggctgacctgcgggcggcagaggatgctgtgtggagcggagccaccttcatcacccacctcttcaacgccatgctgcctttccaccaccgcgacccaggcatcgtggggctcctgaccagcgaccggctgcccgcaggccgctgcatcttctatgggatgattgcagatggcacgcacaccaaccccgccgccctgcggatcgcccaccgtgcccatccccaggggctggtgctggtcaccgatgccatccctgccttgggcctgggcaacggccggcacacgctgggacagcaggaagtggaagtggacggtctgacggcctacgtggcaggcaccaagacgctgagtggcagcatagccccaatggacgtctgtgtccggcacttcctgcaggccacaggctgcagcatggagtcggccctggaggctgcatccctgcaccccgcccagttgctggggctggagaagagtaaggggaccctggactttggtgctgacgcagacttcgtggtgctcgacgactcccttcacgtccaggccacctacatctcgggtgagctggtgtggcaggcggacgcagctaggcagtgacaaggacctcggctgagaggacacctggccgcagcgggatgccatcagggccgggtggttggggagctggtctccagggagtgagtcgggagccctgctggattgatgcccagggcctgtgcggccgc

SEQ ID NO: 351575 - DNA, 1627 bp, Homo Sapiens
cgggatttggccgccgcggggctccggagccgctcgctcccgacacggctcacgatgcgcggcgagcagggcgcggcgggggcccgcgtgctccagttcactaactgccggatcctgcgcggagggaaactgctcaggtggatttggtgttgacttctctcaagccacggaggacgtgggttcgggggttgccctcgtggcccggaggatcctgtcgcacggcgtcacctccttctgccccaccctggtcacttccccaccggaggtttatcacaaggttgttcctcagatccctgtgaagagtggtggtccccatggggcaggggtcctcgggctgcacctggagggccccttcatcagccgggagaagcggggcgcgcaccccgaggcccacctccgctccttcgaggccgatgccttccaggacttgctggccacctacgggcccctggacaatgtccgcatcgtgacgctggccccagagttgggccgtagccacgaagtgatccgggcgctgacggcccgtggcatctgcgtgtccctagggcacctcagtggctgacctgcgggcggcagaggatgctgtgtgaagcggagccaccttcatcacccaactcttcaacgccatgctgcctttccaccaccgcgacccaggcatcgtggggctcctgacctagcgaccggctgcccgcgaggccggctgcatcttctatgggatgattgcagatggcacgcacaccaaccccgccgccctgcggatcgcccaccgtgcccatccccaggggctggtgctggtcaccgatgccatccctgccttgggcctgggcaacggccggcacacgctgggacagcaggaagtggaagtggacggtctgacggcctacgtggcaggtgagcgccctgacccactgggtcccaggtcccagcccgcatgccaggtggcccacgacccccccagagcctgccctctctgctctcaaggcaccaagacgctgagtggcagcatagccccaatggacgtctgtgtccggcacttcctgcaggccacaggtcagtgagcagcacgggtgcgggtttaggtggtctgtgagtggtgggtccccaaggggctggaccgggtgcccggactgtagcccaagctctgcccacaggagctcctgggcattgggtaccaggtgacccaggcccacatgacaggcagaccaccacccccccagttagcctgccctcacagtccctcaagacaccaagaacgctgagtggcagcatagccccaatggacgtctgtgtccggcacttcctgcaggcccacaggctgcagcatggagtcggccctggaggctgcatccctgcaccccgcccagttgctggggctggagaagagtaaggggaccctggactttggtgctgacgcagacttcgtggtgctcgacgactcccttcacgtccaggccacctacatctcgggtgagctggtgtggcaggcggacgcagctaggcagtgacaaggacctcggctgagaggacacctggccgcagcgggatgccatcagggccgggtggttggggagctggtctccagggagtgagtcgggagccctgcttggattggtgcccaggccttgtt

SEQ ID NO: 351576 - DNA, 821 bp, Homo Sapiens
gtctcagctctcggctggggttcgtcactgggcgcgggatttggccgccgcggggctccggagccgctcgctcccgacacggctcacgatgcgcggcgagcagggcgcggcgggggcccgcgtgctccagttcactaactgccggatcctgcgcggagggaaactgctcagggaggatctgtgggtgcgcggaggccgcatcttggacccagagaagctgttctttgaggagcggcgcgtggccgacgagcggcgggactgcgggggccgcatcttggctcccggattcatcgacgtgcagatcaacggtggatttggtgttgacttctctcaagccacggaggacgtgggttcgggggttgccctcgtggcccggaggatcctgtcgcacggcgtcacctccttctgccccaccctggtcacttccccaccggaggtttatcacaaggttgttcctcagatccctgtgaagagtggtggtccccatggggcaggggtcctcgggctgcacctggagggccccttcatcagccgggagaagcggggcgcgcaccccgaggcccacctccgctccttcgaggccgatgccttccaggacttgctggccacctacgggcccctggacaatgtccgcatcgtgacgctggccccagagttgggccgtagccacgaagtgatccgggcgctgacggcccgtggcatctgcgtgtccctagggcactcagtggctgacctgcgggcggcagaggatgctgtgtggagcggagccaccttcatcacccaactcttcaacgccatgctgctttccacaccggacccaa

SEQ ID NO: 351577 - DNA, 734 bp, Homo Sapiens
  misc_feature (50)..(50): n is a, c, g, or t
  misc_feature (661)..(661): n is a, c, g, or t
ccaacccaaaaaaattccaagcccttccccaaccccttcttccttgttgnctaaaccttccccaacccctaaccccaatacggttgcctggtttcaaccttctgaacggtgcctggcctgaaaatcccgtgaatgctggctttccctcaacaggaaagaaagcctgcagggtaacgctgaggcttgtcccatctgggctcctgtgggggcctgtccaggctcacctgcgccacctgtccctgatcagcattgaagcaggaagctggggtgggggaaccggaggagcagaggccgcaaagtagtgcagatcttccttcttgccaaaccttgccctgatcctagggctgcaggcaggaacagatgcagcaggtggctgggagggtaactgggggtgggtgggtggaaaggcctggtctggagatgccacagctctactcttctcttaaacttgggtgtttggcacagggtcccatgcaaagaggtgggataggagccagagggagtctctctcctgcctctgctgtttctggggcaagagagggcagaaaaaagttgtcaggggctggattcttgtgcttgaaaaacttgggtcctcagagagggaagatgaggaagccagagaaacttgagtatttccaaccacccagtagattcccccgangcaggcgcagagacactcggtccccagggtccaagggcagtagcacagagctggtggctgcctcccgggtcac

SEQ ID NO: 351578 - DNA, 834 bp, Homo Sapiens
  misc_feature (764)..(788): n is a, c, g, or t
  misc_feature (818)..(818): n is a, c, g, or t
gagctcggtacccgctccacccgacggggtggtcagaggtctgtgaagagcgggcaggaggcatgagcaggcgaggagctggcctgtcccgggaagcagcccagcctgtggctgcccccgacaccaggaggagggccaggagagttccagggggctgaggcacacagagaggccaacttcctccctgcccagccttccttgtatctctccagactcggacaatcaaagggagagagggtgtatcgggtcctgttccagccggcatcgccgggtggcttccaggcctcagagctgtgtggcagggccccctgctggggctggacatcactgcagtccagtgcaaagccgcccccagagcccaggtgtccccccaacctaaccagacctggtgccttgacgcccccaccccagctgggacggtacagagaagggtcttggtttcctctcctactcccttccttaggctcctgaactcgtttgctcctaaatcttgttaattctttttctctggattttggtttcttttggctttcccttgccttcccctttctctgtctccaacactctttccccatgtctttctggctgtctctatgttcctcttctcttatcctcaactttctgtccattcgggcctcctccccacctcccacgccccagcccctccctccttggtctccttttcgatatgccaaaccaattttgggtcgagtgcatttaacgagaacaaaacaaaaggctcataacaacaagaacgtttcagnnnnnnnnnnnnnnnnnnnnnnnnnttgttgagtcaaaaagtcaaacaataaagnaattaagatttcttgg

SEQ ID NO: 351579 - DNA, 1517 bp, Homo Sapiens
  misc_feature (18)..(18): n is a, c, g, or t
  misc_feature (203)..(203): n is a, c, g, or t
  misc_feature (968)..(968): n is a, c, g, or t
  misc_feature (1143)..(1143): n is a, c, g, or t
  misc_feature (1412)..(1412): n is a, c, g, or t
  misc_feature (1445)..(1446): n is a, c, g, or t
cccgggctttctccggancagagcagcgctgctggcctggcagcccaggacttctccgtgtacgtgcatccccagtcaccgccggggcgggcgggccgccagagcagctttttacaatccagagacagaaaacaaaatctagatgcaacagcgaaacaaagaacccatttccttcctggcacccgtttctgtcccctcctttncctgctccgcctgcccggcatcatcagcccttctggggcgtgtacctctcactgcctgccccaggaccagaggcctgtctcccccttccctccccaccggcccgggggagacctcttcacacccaaagatgctttgtcaagatggctgcgctgtccctttgagttcctgcttcttgtatattgctctggggactctcgccggggaagatggggctgatttcccacctagagaggttgatggcagaaggaaaatggggaggcactggggttgtggagggcatgggtatggctgaggagggtgctgggaacggcaaggcggtctgggggatggggaggggcaaaggtgagagatcaccttccctatcctccaccttcccgcagggaaccgaagccaggtgccagggctggggtcgggacacccatgttctgggcggcttgaccccaaatcccagaccccggaagctccaggctcgggatgtgtcctgagcacctgtcccggccccctcctctccagcctgtcaggccagcctccccagcccccttccctcaactctaggggcagcatagccccaggccaccctagcccagcccctgcattgccgtttccccagaggtggcccctccacctctgctctgacctctccccatctctctgcccctccttttctcacaagtgccatgagttttcaaacatcttcgggtctcagcctgctgctgccatgaactttgttgggttaagggggaggggctctaggaaggaactgnggggaaggggacaggtaggtggctggagggaccctttttgctgctagaaagcccctcccttctcccggggagctggggctggcttgtccccatcaattaggggagaaggggtcagaccaaagatggtggtttgtcccgtgtaagggaacaggtgtggggaagaggtggggttggnttccaactctggctttttctggtagaaaggcctaacccattacaccagaagaccatgggtgaagtctagatggggaggagaagtgaggccagggacagtcttgccagacgactctaaggagggcaagggacagttccatggcccttcccggactgcactaggctgggagctctgttgtgtggaggggtggtcagaggtctgtgaagagcgggcaggaggcatgagcaggcgaggagctggcctgtcccgggaagcagcccagcctgtgntgcccccgaccaccaggaggagggccaggaganntccagggggctgaggcacacagagaggccaacttcctccctgcccagccttccttgtatcctctccagact

SEQ ID NO: 351580 - DNA, 963 bp, Homo Sapiens
  misc_feature (344)..(345): n is a, c, g, or t
  misc_feature (353)..(353): n is a, c, g, or t
  misc_feature (355)..(358): n is a, c, g, or t
  misc_feature (365)..(376): n is a, c, g, or t
  misc_feature (381)..(381): n is a, c, g, or t
  misc_feature (383)..(385): n is a, c, g, or t
  misc_feature (412)..(414): n is a, c, g, or t
  misc_feature (447)..(447): n is a, c, g, or t
  misc_feature (461)..(461): n is a, c, g, or t
  misc_feature (464)..(464): n is a, c, g, or t
  misc_feature (467)..(467): n is a, c, g, or t
  misc_feature (482)..(482): n is a, c, g, or t
  misc_feature (484)..(484): n is a, c, g, or t
  misc_feature (488)..(488): n is a, c, g, or t
  misc_feature (493)..(493): n is a, c, g, or t
  misc_feature (497)..(497): n is a, c, g, or t
  misc_feature (500)..(500): n is a, c, g, or t
  misc_feature (502)..(502): n is a, c, g, or t
  misc_feature (506)..(545): n is a, c, g, or t
  misc_feature (554)..(565): n is a, c, g, or t
  misc_feature (580)..(580): n is a, c, g, or t
  misc_feature (582)..(582): n is a, c, g, or t
  misc_feature (663)..(665): n is a, c, g, or t
  misc_feature (674)..(674): n is a, c, g, or t
  misc_feature (704)..(704): n is a, c, g, or t
  misc_feature (709)..(709): n is a, c, g, or t
  misc_feature (728)..(728): n is a, c, g, or t
  misc_feature (730)..(730): n is a, c, g, or t
  misc_feature (734)..(734): n is a, c, g, or t
  misc_feature (750)..(752): n is a, c, g, or t
  misc_feature (754)..(754): n is a, c, g, or t
  misc_feature (905)..(905): n is a, c, g, or t
aagataaactataggatagatagaatggttattttatgcaagaaatattgtaccgcaagggtggtttggatgaagtctgactactttttttcaaacaaactattatattaaaactgtcatattttggctaagtttggacctataactacactttcattgtttgcatctctctatgaagatacgtctgtccaaacttttaaaaggcataactgtattttatgtgtttattctttatatagatagtattttatattttattctcacccgaagtattcacacaatctttttaaaaaaaatcagaaatggcatgatgtatggccacagaggtaggatgagccatagannagggaaangnnnnaccacgnnnnnnnnnnnnggaanannngccatcaatagtacctctcaactaacnnnctagaggacaagaaacaatctgaagattggccnccaaacagggaagnccnccncccaacgcaacgccncnaaanaacangcgnaananagannnnnnnnnnnnnnnnnnnnnnnnnnnnnnnnnnnnnnnngacgaagcnnnnnnnnnnnnatcgggaaagggagnangggcaagggaaacatggtcaacacaattattttgggataaagttataactttggtattacattgtgtaacaaatataaggnnnacgagctangagaagtggggctatcaccaatagcgattngctgnaatgtcaagaaaatggtcncnagangcaagaatgtaccttnnngntttagaaaaccaaatggactttagacatgaatgcaactatttaaagaatagcttcatcaatgttattccttacatgtcataagattcttacttaaacttggtcttctttcaaattgtttgtatgaagatgctgtacctacttgaacagtcntcaggtgttaacaaaaaaactatgttttacagttttcatattttaaaatattaataaa

SEQ ID NO: 351581 - DNA, 745 bp, Homo Sapiens
gaagcggctgggttgagagctgtccccggttctccgttctgctctcgggggcaccttccggggttcctaagccgcggggcccctcgctgcccctcgaggccctttccctgacctaggctttggcctgggctactcgttccggagccgccatgtcgtccgacttcgaaggttacgagcaggacttcgcggtgctcactgcagagatcaccagcaagattgcgagggtcccacgactcccgcctgatgaaaagaaacagatggttgcaaatgtggagaaacagcttgaagaagcgaaagaactgcttgaacagatggatttggaagtccgagagataccaccccaaagtcgagggatgtacagcaacagaatgagaagctacaaacaagaaatgggaaaactcgaaacagattttaaaaggtcacggatcgcctacagtgacgaagtacggaatgagctcctgggggatgatgggaattcctcagagaaccagagggcacatctgctcgataacacagagaggctggaaaggtcatctcggagactagaggctggataccaaatagcagtggaaaccgagcaaatggtcaggagatgtcggaaaaccttagtcatgaccagagaaaagatacagcgagcacgtgacagacttcgggaaacagatgctaattcgggaaaaagctccaggattctgacagggatgtgcgaagggccggggatcctgcactgaaagcaaatttatcctca

SEQ ID NO: 351582 - DNA, 425 bp, Homo Sapiens
taccgtattacaccaagctctgctgctcagagattttgtgcaaagtggctgatggcctcatctcttcatgatacatcacctcgcctctcctcttgttcccttacttggactcataaacctctttaagacatcatccatctcctccagaactaactggggacttcaggagatgagtggggtataagttcagagatcctggcttcaagcaaatatcccaggcgggagtcgtgggaccctcgcaatcttgctggtgatctctgcagtgagcaccgcgaagtcctgctcgtaaccttcgaaatcggacgacatggcggctccggaacgagtagcccaggccaaagcctaggtcagggaaagggcctcgaggggcagcgaggggccccgcggcttaggaaccccggaaggtgcccccacagagagagcgt

SEQ ID NO: 351583 - DNA, 1349 bp, Homo Sapiens
gggggtactttgacagcattcaaaacagcatcggccataacaacagaaatggccagtcagtcccaaggtatccagcagcttctgcaagctgagaagcgggcagctgagaaggtggcagatgccagaaagaggaaggcccggcgactgaagcaggcaaaggaggaggcacagatggaggtggagcaataccgcagagagcgagagcacgaattccagagcaagcagcaggcggccatgggctcccaggggaacctgtctgctgaggtggagcaggctacaaggcgccaggtgcagggcatgcagagctcccagcagagaaaccgagagcgtgtcctggcccagcttcttggcatggtctgcgacgtcaggccccaggtccaccccaactaccggatttctgcctagggccaccgtagggcctgactccttctgccagttccctccctcaaagaaatcctccaatcaaaatcacctcccaccataatccctgtcttctttccatcccctagaaatcctgggaggcaggatccaataattttcctgtgacacttataaatatcctgctcacatctgaatctccttgttgttctttaaccctcactgggactttgtaaacttccaagtcattctcacctaaaccctctgtgaaatttgtaatatggggaagtaggaatgtggaaaacatcctgacttcagtgtctggccgatgtgggtccctctcttgaccctgtcacttgctggctgtgaaaccaggacaagctacttaacttggtagcctcgatgtcctcctctgtgaaactgggatgataataatgcctaccttgtgagggttgcttcaatgattaggaatcattctgtaaagtctagcacagttccttgcatgttgtagcagtgattcagtaagtagcaaccctgtgatactattaccaccacctgctcactggtcaaaacctacacagctgtttcctcacgtccatcactggctctctaattccacttgttcattctgtgaccctagttattttctgaaaaattggttcttctcttttcccagagaccttctgatctccaaaaagaggagatgactacatttagcccctctcttataattccaggtagataactgcattttgtagcctctctttgtttttcttttgctgatctttgtctttattagattttcctcctttcctatttccccaaagacttatcagatgctcattgctttctaagatctaaaatgatactgtgttccctcatatgcatgcccttcctttctatatccttgacaccttactttcccattgtaacaataaaaaaagtatcaataaaataattattggcaaaat

SEQ ID NO: 351584 - DNA, 927 bp, Homo Sapiens
  misc_feature (35)..(35): n is a, c, g, or t
  misc_feature (49)..(49): n is a, c, g, or t
  misc_feature (79)..(79): n is a, c, g, or t
  misc_feature (81)..(81): n is a, c, g, or t
  misc_feature (164)..(164): n is a, c, g, or t
aagaggaggaaccccctggtgcctttctgagcctncgtggaagaacccnaattctagcactcccaggaaactgtggganantgtggggcaggctccgtcctccctgggagacccctccagccaccgggtgccacttaatgccaacagcccttaccaaagctggnagccccattgccccggcagctctggcctgtggttccagaagctgagaaaactccactggggcttgcagaatccagggttcacctaagctgcacagttcctgcagctttgccagccccctgaaagtcttgtgtaccccacctctgaagatgctgggggaggcagctgggatgggagccagccccatgcctgtctgtgaccccacagtgggtgagagcccgtcacagtcctgggtgtggctgctctggaagaattaggaggcagccataataagagtcttcagagagatgatgggaggggccagtgaggacaggaacagagagtagatgtcctataataaaggggcttctgggaggtgcctgggcacagatgtctgttcagcaggtgtgtgggcctagaggagagagcagagcccagaaatgtcttttgcaggcccacgttctgacttgaagctttcgtgggcatgttgccattgggttttgcccttgcaaaggcttcctaggtctccagtggcccctcaggacccagggtcccagctgctgcttggggatgtgcactgctggccgccggccttgcagtctctctaccctggggaggaacagtggcttctcagagcctggggcatacagaagaaggcaggagttgatttttgtgttgggtttggggtttctttgtcctcaaggtactgttctgtttctctttacccctctgctttatttattgtaagcattcccacgttaaataaactttggctgttgtctacca

SEQ ID NO: 351585 - DNA, 338 bp, Homo Sapiens
ctcaaatgactccagaactgttcggtgacccttccatctggtctcttctcattaatggtttaggaggaatcattcccaggatgaatgggtggaatatccatagcaggtcttcctgacatcattcgaggaaccatgtaggactgcatcatgagccaccttggatcaaaacccatagaagccaaatgctgaggatgaggctgcataggctgataaagaggtctgtgtggtggaggagggacagtactactggacggttgtgaaggaacagtctgtggaagtacaccttgctgttgctgctgctgccactgctgctgtttcatctgttcctgctgccgctg

SEQ ID NO: 351586 - DNA, 1944 bp, Homo Sapiens
  misc_feature (1539)..(1643): n is a, c, g, or t
  misc_feature (1704)..(1704): n is a, c, g, or t
ctttactcagttcacagagggtctctgcgtgccgtagcggccggggctgcggtagccactttagatttgggcaaggactttagattcgggctctgttctgtttccgccgtcctgcttcctgccgaggctggcccaggcagccgcgcttcgaaggacgccgccgggagctgcggagcatgcgtggagtggcagtgctaacggctggtgtctcgcactgttggcctgtgaaggtacgtgaagctgaaagcctggaatggctggaaaggggtcatcaggcaggcggcccctgctgctggggctgctggtggccgtagccactgtccacctggtcatctgtccctacaccaaagtggaggagagcttcaacctgcaggccacacatgacctgctctaccactggcaagacctggagcagtacgaccatcttgagttccccggagtcgtccccaggacgttcctcgggccagtggtgatcgcagtgttctccagccccgcggtttacgtgctttcgctgttagaaaatgtccaagttttactctcagctaatagttagaggagtgcttggactcggcgtgatttttggactctggacgttacaaaaggaaggtgagacggcacttcggggccatggtggccaccatgttctgctgggtgacggccatgcagttccacctgatgttctactgcacgcggacactgcccaatgtgctggccctgcctgtagtcctgctggccctcgcggcctggctgcggccacgagtgggcccgcttcatctggctgtcagccttcgccatcatcgtgtacagggtggagctgtgcctgttcctgggcctcctgctgctgctggccttgggcaaccgaaaggtttctgtagtcagagcccttcgccacgccgtcccggcagggatcctctgtttaggactgacggttgctatagactcttatttttggcggcagctcacttggccggaagagaaaggtgctttggtacaacactgtcctgaacaaaagctccaactgggggacctccccgctgctgtggtacttctactcagccctgccccgcggcctgggctgcagcctgctcttcatccccctgggcttggtagacagaaggacgcacgcgccgacggtgctggcactgggcttcatggcactctactccctcctgccacacaaggagctacgcttcatcatctatgccttccccatgctcaacatcacggctgccagaggctgctcctacctgctgaataactataaaaagtcttggctgtacaaagcggggtctctgcttgtgatcggacacctcgtggtgaatgccgccttactcagccacggccctgtatgtgtcccatttcaactaaccaagtggcgtcacaatgaaaacgctgcaccagctggtgcccccccaaacaaaaatacatatgcacaataactaggcaacacaaaccaaacaagaaaagaaacaccttacaccaatattatcaacaaacaaaaaaataagcattacaaaaatacttaaaccacaacacccnnnnnnnnnnnnnnnnnnnnnnnnnnnnnnnnnnnnnnnnnnnnnnnnnnnnnnnnnnnnnnnnnnnnnnnnnnnnnnnnnnnnnnnnnnnnnnnnnnnnnnnnnaatcttgggccgcgagcactaaggagacgcaagactatataagaaacgctgaatatatatnctcggaaaaatttcaaaaatgatagtatttatatttcaaataataatgatcagaaaaaatcaaatcattaacacttctataaatagtgtgaagtattcgatatcaacgacaccgtgaaacctaagaacaaaaacactggataaagcgagaaggaaggtgtctatcgaaatacacaaatgctccaaatgtaaaaagttaatacgcaacaattagagtcccatgataaatactcatccataa

SEQ ID NO: 351587 - DNA, 443 bp, Homo Sapiens
ggaccgtgcagcatataaagagtacatctccaataaacgtaagagcatgaccaagctgcgaggcccaaaccccaaatccagccggactactctgcagtccaagtcggagtccgaggaggatgatgaagaggatgaggatgacgaggacgaggatgaagaagaggaagatgatgagaatggggactcctctgaagatggcggcgactcctctgagtccagcagcagaggacgagagcgaggataggggatgagaataaagaggatgacgaggacgaagacgacgacgaggatgacgatgaggatgaagataatgagtccgagggcagcagctccagctcctcctcctcaggggactcctcagactctgactccaactgaggctcagccccaccccagggcagccagggagagcccaggagctcccctcccaactgaccaccttt

SEQ ID NO: 351588 - DNA, 982 bp, Homo Sapiens
cgaccacagcctcggtctcgcagctgcagcccccgccccgcccggccgcgaagcgtctggaaccgcatcctccgcatccacatccgcatcgtcgtcctccccgaccgcgtcctgcagcagctgccagtggagccgcctgacaaggactgccatccaccatggtgaagctgggctgcagcttctctgggaagccaggtaaagaccctggggaccaggatggggctgccatggacagtgtgcctctgatcagccccttggacatcagccagctccagccgccactccctgaccaggtggtcatcaagacacagacagaataccagctgtcctccccagaccagcagaatttccctgacctggagggccagaggctgaactgcagccacccagaggaagggcgcaggctgcccaccgcacggatgatcgccttcgccatggcgctactgggctgcgtgctgatcatgtacaaggccatctggtacgaccagttcacctgccccgacggcttcctgctgcggcacaagatctgcacgccgctgaccctggagatgtactacacggagatggaccccgagcgccaccgcagcatcctggcggccatcggggcctacccgctgagccgcaagcacggcacggagacgccggcggcctggggggacggctaccgcgcagccaaggaggagcgcaaggggcccacccaggctggggcggcggcggcggccaccgaaccccccgggaagccgtcggccaaggcggagaaggaggcggcgcggaaggcggccgggagcgcggcgcccccgcccgcgcagtgacgtctccagccccgcagcccggcccgggcgtcctccgccagctcctgtgaccagcgcgtctcccgatgctctccgccgtgttcgtgtccccaggcgccctcgctgcagccccgcccccgtgggtctctgactctgtcgcttttctctaagtaaagatttcacgtccaaaa

SEQ ID NO: 351589 - DNA, 1003 bp, Homo Sapiens
  misc_feature (847)..(847): n is a, c, g, or t
  misc_feature (862)..(862): n is a, c, g, or t
  misc_feature (876)..(876): n is a, c, g, or t
  misc_feature (885)..(885): n is a, c, g, or t
  misc_feature (902)..(902): n is a, c, g, or t
  misc_feature (914)..(914): n is a, c, g, or t
  misc_feature (922)..(922): n is a, c, g, or t
  misc_feature (943)..(943): n is a, c, g, or t
  misc_feature (972)..(973): n is a, c, g, or t
  misc_feature (981)..(981): n is a, c, g, or t
  misc_feature (990)..(990): n is a, c, g, or t
  misc_feature (993)..(993): n is a, c, g, or t
  misc_feature (996)..(996): n is a, c, g, or t
aaccgcatcctccgcatccacatccgcatcgtcgtcctccccgaccgcgtcctgcagcagctgccagtggagccgcctgacaaggactgccatccaccatggtgaagctgggctgcagcttctctgggaagccaggtaaagaccctggggaccaggatggggctgccatggacagtgtgcctctgatcagccccttggacatcagccagctccagccgccactccctgaccaggtggtcatcaagacacagacagaataccagctgtcctccccagaccagcagaatttccctgacctggagggccagaggctgaactgcagccacccagaggaagggcgcagggtaaccacacccaccccacccactgtggggactcaggacaggaggagaaggtggaaggcagctgggggtgcctgggttccgtccaggccagtctggggtccccttgctctcagggaggagagggtggcagtgagtcatcccgcccagagctggccccaccggctgccctgcacccaccaggccccctcccgaggctgcaggtgcagactgaccaaacagtggcgctcctgagatgtttttctttctgggaagtgcccgcgagtgctgcttgcttgtttgcccagtgggtcattgtctcatcttcagtgacttacgggctttctatgtaatacttcctttctgcagtatatctggcaaatatcttctctcatcctcttgtttaaatctgtcaatgttactaatgatagctttagtcattctaacgtggactgtttccaaagccttccattctccagtagacagatctgctaaggctccccgcccctgggcctcacgttccagtntgcagctcatggtancacacatgcacccnctggtgggnagtcacctggggaggcntggtgagtgcancctccgantcccctgaggctgcggcccancacctgggggtccacagcgcggaaaaatnnaaattctngaaaaccanctnggncaaaggc

SEQ ID NO: 351590 - DNA, 499 bp, Homo Sapiens
catactctacggtactaggtacgaggcctgggtggcgaattcggcacgaggcgggtaggccccgatggccgcccaggatgctgcggtggcgctcggggtccatctccgtgtagtacatctccagggtcagcggcgtgcagatcttgtgctgcgggaggggccgggtcagggtcggtggggctgagccctcctgtgcgccccgggcccaggccctcccgcttctgcggttggggacactgcggacagtttgtaatggagccatggcttcaggacaccgaagatcagcctccagttcagaactcagggccctggaggggcatggagcaggaggtcgcgcgttgtaaggggaggggccacccaggtagaggggcgcagacaccagtggacctgcccagcgcagcaaggactctgcggagcgcgctccagagcataaaccatggagttaaggagaaaaggagcagattttacttctgataaataaaaggctttctaaaaacac

SEQ ID NO: 351591 - DNA, 895 bp, Homo Sapiens
agcgggcatcgtcgtcctccccgaccgcgtctgcagcagctgccagtggagccgcctgacaaggactgccatccaccatggtgaagctgggctgcagcttctctgggaagccaggtaaagaccctggggaccaggatggggctgccatggacagtgtgcctctgatcagccccttggacatcagccagctccagccgccactccctgaccaggtggtcatcaagacacagacagaataccagctgtcctccccagaccagcagaatttccctgacctggagggccagaggctgaactgcagccacccagaggaagggcgcaggctgcccaccgcacggatgatcgccttcgccatggcgctactgggctgcgtgctgatcatgtacaaggccatatggtacgaccagttcacctgccccgacggcttcctgctgcggcacaagatctgcacgccgctgaccctggagatgtactacacggagatggaccccgagcgccaccgcagcatcctggcggccatcggggcctacccgctgagccgcaagcacggcacggagacgccggcggcctggggggacggctaccgcgcagccaaggaggagcgcaaggggcccacccaggctgggcggcggcggcggtcaccgaaccccccgggaaagcctgtcggccaaggcggagaaaggaaggcggcgcggaaggcgggccggagcgcggcgcccccggcccgcgcaggtgacgtctcccagccccgcagcccggcccgggcgtcctccgacagctcctgtgaccagcgcgtctcccgatgctctcccgcgtgcccgtgtccccaggcgcctcgctgagcccgccccgggggtcctgactctggtcgtttctctagtaagattcccgtccg

SEQ ID NO: 351592 - DNA, 2575 bp, Homo Sapiens
gcaagctcggtggctgggtgggttggggcgttccgcgcgcccttcattgaagcggcggtggccgggctgggcgccggtagtggaaagcgacggcgcggctggaaaatgccagtccattcccgaggggataagaaggagaccaaccatcacgatgagatggaggtggactacgccgaaaatgaggggagcagctccgaggacgaggacactgagagctcgtcggtctccgaggatggagatagctcagaaatggatgatgaagactgtgaaagaagaagaatggaatgtttggatgaaatgtccaatcttgaaaaacagtttaccgatctcaaagatcaactttataaagaacgattaagtcaggtggatgcaaaactacaagaagtcatagctggaaaagcaccagaatacttggaaccgctggcaactttacaggaaaatatgcaaattcgtacaaaggtagcaggaatctatagagagctctgcttagaatctgtaaagaacaaatatgaatgtgaaattcaagcttctcgccagcattgtgagagcgaaaagctgttgctatatgatacagtccagagtgaactagaggagaagataagaaggcttgaagaggataggcacagcattgatattacctcagagctgtggaatgatgagcttcagtcaagaaaaaagaggaaggatcctttcagtcctgacaaaaagaagccagttgttgtttcaggtccatatatagtttatatgctacaagatcttgatattcttgaagactggacaacaattaggaaggcaatggctacattggggccacacagagtgaaaacggaaccacctgtgaaactggaaaaaacatctgcacagtgctagatctgaagagggaagactatattatgatggtgaatggtatatacgtggacaaacaatatgtattgataaaaaagatgaatgtcctacaagtgctgtaattacaacaattaaccatgatgaagtttggtttaagaggcctgatggaagcaaatctaagctttacatttcacagctacagaaaggaaaatattcaattaaacattcataatcatgatttaagtgttatctaaatttaccttattagtgttaccaaatgtaagtgccatgagagtaaaaaaatgtattcaataacttaatattctcactgaatcatgagagaatgtgtatttgtaggtagtactctaaatagatctcattgatatgttattaaaagaaacagtaataaaaattttatcacgatccttacgttgatttgcctcttaggtccgatgaccaataggtattctgtatatggtaggggtttctttctaaacatttttctttggttttaaaaaaagttatgcaaatttgtcttatctttagtaaactatgactacatttatctgcaatttttaaaattttccatatctttgtcattcattgtgtgtttgtaaataaggccgatagaatgtttcctataaatggtttgtactagtacattagtgttaaaccagaactgaaatttaaacatatatatatatgaggatgtatatatggcatcatcagcttatttagaactgatggccataccttacaatcttgttttacccaaaattaagctattggggttgaaagctaaaaggagcacttttgtagaatagcaacttttcttttcctctttcttgattgtatggtggggtggtgacctatttttacaaattatacctaatgagtaaaattagtgtaaagtgataacatgcttctacctgtatttctagtgaccctttagcggcaggtatttatacctggtatttatgatgcagtatataagtggtgaacaataactgacagtattgtgcttgctgtacatgtctggtcttttgaaacagattttagtaagcattttccagaggtaaaactgtgtccttattctaattttattcctagggcaaagtagacagggattatttccttgaatctatttccaaattaatatttttttctttggtatttctacactttaaggccatttggtgcaatttagaaagtgttggcctcccttccgctagccacattcaaaattaacttccaaaacctcaggaacagtacaaagaattgaaaccctcaatatggcagcacagccggctgtagtgtatatttagggtacaccaaatcaggtattcctggtggtcttgtgcactttaatttctgttacaatgagttaagaggatgaggaagaaatctacttattaacacttactgcagaaatgtctgcattattccgtttgttttcttattattttacctctccaaacatcttcctgtgcagatcactacttcatagttgccaaattttaaaacacttaactgctgaaattcagtgtcagcaaagtgatattacgttgttctgtttctaattaaccttagcaaatgtacataatgtcaaaacccaatagtatttgacagtacttatgtatacaatgtttgataagcatttttaataagatttgtatttttaaatttagtatataataaaaagatgtgtttcagtgtgaaaagaaccaac

SEQ ID NO: 351593 - DNA, 531 bp, Homo Sapiens
  misc_feature (72)..(72): n is a, c, g, or t
  misc_feature (133)..(133): n is a, c, g, or t
  misc_feature (213)..(213): n is a, c, g, or t
tacccacctaccactttcatgaagagaataaaaccagtaggaagctcaggtacatagtgtttcatcactgtntcccttactgcttttttaatgacaggctgtgctgtcataaatacacttgggtttgtttgantcactagaaaagcccaatatgataaatgtaaacatgtgtggtttaagatttgcagtcctgcttgatttgcgtggcaagangagttcccatgaaggaaagaccagttcttccctcatcagaaagttttactactcgccaggatctccaaggtaaatttcctctccaaagaagaccaaaggaatcattttagaatacttacatatttgggaatgcaaggactctatttagaagactgtaaggatgctagtactagcaattgctgctgcagtagaaatgtcaaggagttggaggaccggagagagagccactggctctcactgtatacccttttgttccatgtacttatgttacctagtttaaataaatacatttaaatcttgttaaaatttaattgtttc

SEQ ID NO: 351594 - DNA, 1248 bp, Homo Sapiens
gttcctgagtggaacatggcgacttgcgccgaaatcctgcggagcgagttccccgaaattgacggacaagtcttcgactacgtgaccggcgtcttgcacagcggcagcgcggacttcgagtctgtggatgacctggtggaagctgtaggggaactattgcaagaggtgtccggggacagcaaggatgacgcgggcatcagggccgtgtgccagcgcatgtacaacactctgcgtctggctgagccacaaagccagggaaatagccaggtgctactggacgcccctatccagttgtcaaagataacggagaactacgactgtggaaccaaacttccaggactgctaaagagggaacagtcctcgacagtgaatgcaaagaagttagagaaggccgaggctcgacttaaggcaaagcaggagaagcgctcagagaaggacacgctcaagaccagcaaccctctagtcttagaagaggcatcagccagccaggcaggcagcagaaaggagagtcggttggaatcatctggcaagaacaaatcctatgatgtgcgaattgagaactttgatgtgtcttttggcgatagagtactgctggctggagcggatgtgaacctggcatggggccgccgttacgggctggtggggcggaatgggttggggaagacaacgttactgaagatgctggccacccggagtctgcgggttccagcccacatttccctgctgcacgttgagcaagaggttgctggagatgacactcctgccctgcagagtgtgctggagagtgacagtgtgcgagaggatttgctacggagggagcgggagctcactgcccagattgctgctggcagggcggagggctctgaagctgcagagctggcagaaatctatgccaaactggaggagattgaggctgacaaggcacctgccagggcatcagtcattctcgctgggcttggctttacccctaaaatgcagcagcagcccacccgggagttctcaggtggctggaggatgaggctggccctggcccgggccctctttgctaggccagatcttctgctgttagatgaacctacaaacatgctggatgtcaggggccatcctgtggctgggagaattacctgcagacgtggccctccaccatcctagtcgtctcccacgaacgcaacttcttgaatgccatcgccacagacatcatccacctgcacagccagcggtagatggttaccggggagaattggagac

SEQ ID NO: 351595 - DNA, 866 bp, Homo Sapiens
  misc_feature (46)..(46): n is a, c, g, or t
  misc_feature (58)..(58): n is a, c, g, or t
  misc_feature (109)..(109): n is a, c, g, or t
  misc_feature (255)..(255): n is a, c, g, or t
ccctggggttgggtgccaaccctgccccgttctgtggctgggaaanaggacaaggccnagagggaggctctgtccacctgccttctgaagtcacaggaaagcaggcacnagagggccggggctggcccaggaatgcccagcagtgcactccttgcccttcgcaccctccatcctgccactgcggctcctgctgcagaacctatgctgtgttccgttctgtggcccagggaagcggaaccaaagcgacctctgcanctgaccctgcctctgtggcagggtcactgcagctggcaaccctcctacctccaccacgctcagatgtcatacagggctcctacagggtaccatggtgggaggaggggtggcgacgttaactgaggttcatctgaacctacttctgcaccaaccgctcctgctatggaaatctctggtgtgagcagagccagggagggtggctgggaactggaccggggccacggggctgctgcgtcccacagggagcgtctctctgtgctgttcgctcctgttcctagtgcacacgtgtgaaggacctggtatcggctttagcacaatccttagttaaccaaaacgttgttttgcttgaacgggtaaatcgcaaaaaaagggatttggtcaagagcccattacacgaagtggtctgggttgcagacatcggccccacttcctgcctctatgccccttcctccgggttctgggtccccaaggaggccactgtggaagacccttcagcacaacaaggggtaagcctagtagtaggcagggtgggaggcttcccagaaccaagggaggagaatggtctactgtatcatgtgcccacgggtatctcccatcactaagctctagac

SEQ ID NO: 351596 - DNA, 291 bp, Homo Sapiens
agaccctccctaggcactggagccatgaagcaggggctccctcatatgcttgcctgctgtattgtgggtcctgggtattgatttctgaggccattcgaggctacaaaattcaaacctgtcttgagcatgctaaaagtaagaagggccctgatttcaagtcaggaactatggattcaaattcctgggtaccaccagaatggccaatattaaaaaaactgacaacaccaagtgctaaccaagacgtggagctgctggagctcccacacactgctggtgaggatgtaagtcaat

SEQ ID NO: 351597 - DNA, 732 bp, Homo Sapiens
ggctccctccagaggctgcagctcgagtatgtggatgtggtctttgcaaatcgaccggacagtaacactcccatggaagaaattgtccgagccatgacacatgtgataaaccaaggcatggcgatgtactggggcacctcgagatggagtgctatggagatcatggaagcctattctgtagcaagacagttcaatatgatcccaccggtctgtgaacaagctgagtaccatcttttccagagagagaaagtggaggtccagctgccagagctctaccacaaaataggtgttggcgcaatgacatggtctccacttgcctgtggaatcatctcaggaaaatacggaaacggggtgcctgaaagttccagggcttcactgaagtgctaccagtggttgaaagaaagaattgtaagtgaagaagggagaaaacagcaaaacaagctaaaagacctttccccaattgcggagcgtctgggatgcacactacctcagctagctgttgcgtggtgcctgagaaatgaaggtgtgagttctgtgctcctgggatcatccactcctgaacaactcattgaaaaccttggtgccattcaggttctcccaaagatgacatcacatgtggtaaatgagattgataacatactgcgcaacaagccctacagcaagaaggactatagatcataaggcaatgcatgaaccacagaagctgcatggttaaaatagcggcctgtgccc

SEQ ID NO: 351598 - DNA, 746 bp, Homo Sapiens
atgagccaccgtgcccagccgcgtgtggttttcaattgttaccagcaatcatgacctttcatggactccacagcattagaagaacaacgtttatggccttcaagaactttcagggtgaagctatttctctaggatcagcttttcatgtggcagtagccttgggcctgtcacagccctgtatcttatcttctcaccaaccctggtttagttttcaacagacagaaatttgagccagaagaaatggatgtcactacacagttcacccctgacatctgtgatagtgtatgttatcactgacatgttctcattcaaactatgttataagagcaaggagaaagaagtaagaaaaatttgctatcatgtagaaaattctggggaacctcaaataactcactttatatttagcaggagtttatgcttcagagatcatctgtccctgcaatagacattttatcatggtaagggtgtggtcagcaatagaaaactatgatctcagcagaagtccctctaccaccccatagcttagtaattttcttaccaacagctagctgaggtagtgtgcatcccagacgcccgcaattggggaaaggtcttttagcttgttttgctgttttctcccttcttcacttacaattctttctttcaaccactggtagcactggggaaaagcataacattgaaatgttaatgtctggtaaagatctgatgtcaaagaatggtaattcaataaaatatgtgaacctcat

SEQ ID NO: 351599 - DNA, 2428 bp, Homo Sapiens
agcggcatgtgcgcgggctggccgtcgcggacgccgctccgggcagccgagcctctgtgggagccggggccgcggcggcgcgggtgctccgggccgaggccgcgtctggctcttgctgattgaattcctttggtgcagtttagcatgttcctctgtgttctgcatctcctgtagtgtaatgttcaagctcagaaatgccttatgtggatcgtcagaatcgcatttgtggttttctagacattgaagaaaatgaaaacagtgggaaatttcttcgaaggtacttcatactggataccagagaagatagtttcgtgtggtacatggataatccacagaacctaccttctggatcatcacgtgttggagccattaagcttacctacatttcaaaggttagcgatgctactaagctaaggccaaaggcggagttctgttttgttatgaatgcaggaatgaggaagtacttcctacaagccaatgatcagcaggacctagtggaatgggtaaatgtgttaaacaaagctataaaaattacagtaccaaagcagtcagactcacagcctaattctgataacctaagtcgccatggtgaatgtgggaaaaagcaagtgtcttacagaactgatattgtggtggcgtacccatcattactcccactcagaaagaagaagtaaatgaatgtggtgaaagtattgacagaaataatctgaaacggtcacaaagccatctttccttactttactcctaaaccacctcaagatagtgcggttatcaaagctggatattgtgtaaaacaaggagcagtgatgaaaaactggaagagaacgatattttcaattggatgaaaacagcaataggctacttcaaatctgaactggaaaaggaacctcttcgcgtaataccacttaaagaggttcatacaagtccaggaatgtaagcaaaagcgacataatgatgagggacaacctcttttgaaattgtaacaacgtctcgaactatctatgtgcaggctgatagccctgaagagatgcacagttggattaaagcagtctctggcgccattgtagcacagcggggtcccggcagatctgcgtcttctgagcatccccccggtccttcagaatccaaacacgctttccgtcctaccaacgcagccgccgccacctcacatttcacagcctctcgcagcaactctttggtctcaacctttaccatggagaagcgaggattttacgagtctcttgccaaggtcaagccaggaacttcaaggtccagactgtctctccaagagaaccagcttccaaagtgactgaacaagctctgttaagacctcaaagtaaaaatggccctcaggaaaaagattgtgacctagtagacttggacgatgcgagccttccggtcagtgacgtgtgaggcagaagcgcacggagcctgcctgcctctgccgtcctcagtttcctttcatgaggcttctagccaaagatgataaagggggaaatggtctctacgtgcgtatattatactgcctcttaggtgtactctttataagctggtaaaccaagaatctagggagtggccaaactaaactataatttctttaaaaacagaacacaacaacaggaaaaatccaaaatatctcagtatcatctgtctgaagcattgtgtgttctcattcgggtggtaacaatgtatgtgtaatatctcctccttacgtgattctgacagttcaaatgtttaacaacttaaagcattaacaatgcttattaataactttggtcatttaacaaaatgctacaatgacttcctattaaaggttcaatatttacacattcttatgggttgatattaccacattgaaatattgccagaccaagatacctaaactcatgatgtctgtggtgctgtaaaatttatactaaaatgtggactattttgaaattataaccatttttgatgccctgaatcttgaggtgacttatttgcatagaggatatggatagaccaacagtaagggtgtgggttataccggcatagagaaaaagaagaaaactagaattgaaacaactgtgtcttagacatttgttgaaaaagcttcatcaggccttggcagcagtcactgctttattccgcaaaaattatgggtaggaaatatcagggagatctgatttcttatcccaagttcgtaaaatagtgttatttctatatttggattggtgaaagacctcaaagtatatatgtaacgaccttaactgcccttagtccatgaaattgttgtgaactctactttttgtcactaatagacctaacattcaagtgcctggtaaaatacatcttgtataggacatgtctgagattaatgtgcttaaaagttctacgtgacatgcatataaaccattggataaaaattactgtgacagtcgaaacagtg

SEQ ID NO: 351600 - DNA, 1016 bp, Homo Sapiens
gcgtccggaattcccgggatggaggcccgcggcggtcgcggggccgacgagctcctcggcgtctccgccccccgagaaatcccgctcggggcgcggtgcgcgcagctgcccggggattcccggtggcgccggtcggagcgcctccctccagggctgtgcccgccgggcgcgcgtccccgggcatcctttcctggtgtttaatgcattttggcttcaggacttgccgaggccgaagccggctccgccctgggccctgaagtcgggcggtgtccgcgatttacctccgcaccttcggggcaggtggccagaggcagcgttgaaagcgacttgcccaaggtcacgcaggtggcaccggggaggcgaccagacccaggtctttcgacgccgaggccagctgccaaccgcagagctttggggccgtcttgagtggtttgtgtctggctcttgctgattgaattcctttggtgcagtttagcatgttcctctgtgttctgcatctcctgtagtgtaatgttcaagctcagaaatgccttatgtggatcgtcagaatcgcatttgtggttttctagacattgaagaaaatgaaaacagtgggaaatttcttcgaaggtacttcatactggataccagagaagatagtttcgtgtggtacatggataatccacagaacctaccttctggatcatcacgtgttggagccattaagcttacctacatttccaaggttagcgatgctactaagctaaagccaaaggcggagttctgttttggtatgaatgcaggaaatgaggaagtacttcctacaagccaatgatcagccagacctagtggaatggggaaaatgtgttaaaacaagctataaaaaattacggtaccaaaggcagtccggactcccagccctaattttgaataacccaaattccccctgtggggaagggggggaaaaaaccaaggtttttaacaaaactggataattgttggggggcgggtacccatctcataattcccccctcccc

SEQ ID NO: 351601 - DNA, 1631 bp, Homo Sapiens
  misc_feature (418)..(418): n is a, c, g, or t
  misc_feature (1052)..(1052): n is a, c, g, or t
  misc_feature (1167)..(1167): n is a, c, g, or t
  misc_feature (1170)..(1170): n is a, c, g, or t
  misc_feature (1175)..(1175): n is a, c, g, or t
  misc_feature (1210)..(1210): n is a, c, g, or t
  misc_feature (1364)..(1364): n is a, c, g, or t
  misc_feature (1411)..(1412): n is a, c, g, or t
  misc_feature (1415)..(1415): n is a, c, g, or t
  misc_feature (1431)..(1431): n is a, c, g, or t
  misc_feature (1453)..(1454): n is a, c, g, or t
  misc_feature (1460)..(1462): n is a, c, g, or t
  misc_feature (1468)..(1468): n is a, c, g, or t
  misc_feature (1473)..(1473): n is a, c, g, or t
  misc_feature (1494)..(1494): n is a, c, g, or t
  misc_feature (1496)..(1497): n is a, c, g, or t
  misc_feature (1518)..(1519): n is a, c, g, or t
  misc_feature (1528)..(1528): n is a, c, g, or t
  misc_feature (1541)..(1543): n is a, c, g, or t
  misc_feature (1545)..(1545): n is a, c, g, or t
  misc_feature (1556)..(1556): n is a, c, g, or t
  misc_feature (1567)..(1569): n is a, c, g, or t
  misc_feature (1599)..(1599): n is a, c, g, or t
  misc_feature (1601)..(1601): n is a, c, g, or t
  misc_feature (1603)..(1603): n is a, c, g, or t
  misc_feature (1629)..(1631): n is a, c, g, or t
cttgctgagccgcgacttcctgctgggccacgtggatgccgagagcctggtgaggcaccaccctgactgcaaggacctcctcatcgaggccctgaagttccacctgctgcctgagcagaggggcgtcctaggcaccagccgcacacgtccccggcgctgcgagggggccgggcctgtgctttttgctgtgggggcctctccaggagcctggggtgtggcccagcagtgggatccactcacgagtcccgtctccacctgccctccccaggcggcgggagcctgtttgccatccacggagactgtgaggcctacgacacgcgcaccgaccgctggcacgtggtggcctccatgtccacgcgccgggcccgggtgggagtggctgcggtggggaaccggctctatgctgtgggcggctatnatgggacctcagacctggctaccgtggagtcctacgaccccgtgactaacacgtggcagccggaggtgtccatgggcacaaggcgaactgcctgggtgtggccgccttgcatggactcctgtactcggccggcggctatgacggggcctcctgcctgaacagtgctgaacgctacgaccccctgaccggaacgtggacgtccgtcgctgccatgagcacccggaggcgctatgtgcgagtggccacgcttgatgggaacctgtatgctgtgggcggctacgacagctcctcacacctggccactgtggagaagtgaacgtgtggtcgcccgtggcgtccatgctgagccgacgcagctcagcgggcgtggccgtgctggagggtgccctgtacgtggcagggggcaacgacggcaccagctgcctcaactcggtagagagatacagtccaaaggctggagcctgggaaagcgtggcgcccatgaatatccgcagaagcacgcatgacctggtggccatggacggatggttgtacgccgtggggggtaacgacggtagctccagcctcaactccatcgagaagtacaacccgaggaccaacaagtgggtggccgcatcctgcatgttcacccggngcagcagtgtgggtgtggcggtgctggagctgctcaatttcccgccgccatcctccccgacgctgtccgtgtcctccaccagcctctgacccacctaccaccagaggcctgcagngtngccanatgccttaaggggaccgtggcccccaccagggacntcctgcgccatccgttcacgtttttgcatccattccttcatgtctttatttagttgtttatttatttagttatttatcttattgagaggtgaggagtgccacggctgcccgtttacacctttagcgtctggtcctcctgcgtgtcctcccctcnactgcctgcatggggggcgcggggagtgaccaggcgggggcctcacnnaancagggccgttgcctgntcagaccttgcaggctgtggannaagagnnnctgganatcancaagcagctgcagaccccagntnnaattttgcacatggcggggtnncgggaaggntggggagcaagtnnnanaactgtcgtcntctgccgtgtnnnttttttcctggatcttgtagcggttacatncntntactggacaccacacaacaatactannn

SEQ ID NO: 351602 - DNA, 410 bp, Homo Sapiens
cttacatcagttccttgccattctaggtacaccccgggctgcctttttaaattcagccgatttccctgcaaatggtattttaaaaaatatataaaaggctcatctacctggagctactgaaaaatatgtttctgaagggtgagaaacaaaaggaagagagctacaggcatgaactacgtttgagagtgaatgatgcaaagaacacaacatttcattaccatggacaataaaaagcgattcaaactcttgaaaaaaatatctcataaaaatatctacgttaaaattttagcctaaaagctatagcttcaattttataaaaaggcaatctttgaaaggatctggctcagataatagtacaaacgttacacaacagatatcaaagtaagacagctcaagaagacatcttaggg

SEQ ID NO: 351603 - DNA, 1482 bp, Homo Sapiens
ttcgggaacgtttcgctgtctgtgttcacatttcacaccggccagttgggtgacattactgtggttttgctgtcgtcctctggtgtggttgtttcgttcccctgggggattctctctctccggtgtcttttgggggggccccataatgggcacaattgtggcccctttatttctggaaacgtgcctgcccacagcgcttgcccagctcagtgggaatggtggaatgtgcccattcagggaacttgtcgcctggaaaagagaagatttgccaagggtctgcaactaacctcttcatggggaagtttttcactacagatgtgggccccaccatcttctcctggtcatcctccagcttaacagctgccagggctgtgggtgagccactgacgttgaactgcgttgtaggcttcctggggaatggcaatgtgggtaatgctctgctgctgaggggtccccccggggctgggcagaataaacagggatggtccaggtttctcctgtagggctagtaatggtcccagttggcactgtacaggtgggcactgtctactgtcagtaagtctggcctcaaagacacattaactctgctgctggccctgtggaatggccagcacggtggccaccggctgccctgagatggcgtaggacacagtgatgggcatgtccactttgcgcttcttcactggttggaggacactggccgtgccaacccgccgctccccttcccggggtgagccctgctgggatggtggtggggaaagggcacccacggtctggatttggatctgctgaccaccagcaagagactggccagccaccaagctgagcctggatttgctgatgtgggatgtgctcctccgggatttctgcagcctggatctgctgggctgcttgcacgtgctgcacctggatctgagctgcttgcagctgcgagggactgggactctgcagagacggggtctgaatggagggggctgctgactgtggtgcctggccttggatctgcacctggacctggatgggttgctcagtaggctggtgaacggtgagttgtggggagagctgaggccgagacctgttgcggagactgcatgtacctgcacctggacctgaacctgctgcggctgctgaacctggatctgctgttcttgctgggtttgtggctgaacactggtggtgactggacaggcaagttcaagcaaagacccagccacttcagtgctgtctgtgtatatgcagttcccaccctgttggtacaccatggtagtggtggctgtctgctggaactcctgaagggcttctggccccttagaggccagtgagtccagaaattccttcatcctgtgttgcgggacagaccgtgcctttactcggatgtactcttcaaaggagatggtgttctctagggaattattcatattgcagagtccttagggttccagtcaccatgttgcatgtatttctgcagctcgcccctgagtt

SEQ ID NO: 351604 - DNA, 1790 bp, Homo Sapiens
  misc_feature (21)..(21): n is a, c, g, or t
  misc_feature (342)..(353): n is a, c, g, or t
  misc_feature (1029)..(1030): n is a, c, g, or t
agtttcaagaaatgtgttttnaaatttttattaatgcacttgaacaactttgcaggaataaagcaaccccctaaccacaaaatatccctctaaattagttccctagctttctcaatgaatacacacatatttttacatagctatgatcgttgtgtacattctcctttgttttacttctcggcctaacacttgtctcctcttgtcaacacagattctactctcaccaatttaaatgtctttatatccatgtaacatgggtaacctcacttcaccccattattagatatttgagttatatctaatttttcactcttataaatagtgctgctatgaatgtctgtnnnnnnnnnnnnctgctccttcttttggattattcccttaggaatatctccaaagagggattacaaggtcaaagagcatgaagtattttatagctcttgttttatattgccagattgctttctagaaagatccaatctttgggttggaaggaccttaaaggtcatctagtttagcctccccaccccctctgaatgcttgaatcccctcgacaatttatgatgccaccagcaatgtataagcatttctgtttaccaatagctctgccagtattgggttttgccatttttatttatttttgctagtttaataggtatgtatagttgttcttgaagagttgttttatttcattaattgctagcaaggctgagcacttttccatgtgatgatttactagttgtatttccttgtgtgtaaaatgttcattcatttcttatgaccacttgttaagaggaactgatctcatatatttgtatcagaactgtatttttatgttatattgtatagtttgctctcctgcccctctccttaaaactgaatggtgccaataatttgatactaatgactacaaaaaaaggtaatgcctcatttactagtattgttgtaaaatgaggaatgtatgtgaatattcagataaccgaggattaaccctttaagtgctgaatctttaaaattttaatatattttttnntgagggaaatctttctaaaatgtattacgcacttccctgccttagtaaacagagtatactggagagtatttaaccttttcttgatgagtcatggtcatgattataaacatcagccccttttataccttggtacggtgcagtgatatcattaagagctatcaatatgtgtagggcttggcttggccttttataggatattatgctgttctcactgatggttttttactgctctctgctctgtcagtggagctatccggggcaattgtagcgtttgggtccttttacccctatgtcccccggctatacttttaaaacagctttagctgttctttatcttgtgcacatgatacaaaatatgttcccgtacaatatggggctgtcacttcttgccaacccagcaccctcttcctcttctaacctgctttctgaggcttctgctcttcacctcctgctcgctgatggaaacctccagggcaaagctgaaggtttcttggggaagccaggaaagccagtatttcctatgtgtcagatctgcttggcttccaagaagggatgcatgggctttttggccagtgtttccaggaggctctgggcttcctgcttcttccccgcttcccccagagttcacagatgttgaagtttctgaaggttgacgtcactggaagtctgaccacaaacaagttggctgttactgtatttgaaacccagtacctttggcagctcacctctaaccagtaaaataagaggattccatggtttc

SEQ ID NO: 351605 - DNA, 522 bp, Homo Sapiens
  misc_feature (260)..(395): n is a, c, g, or t
  misc_feature (411)..(411): n is a, c, g, or t
  misc_feature (444)..(444): n is a, c, g, or t
  misc_feature (493)..(493): n is a, c, g, or t
tctttgtttctattacttgtaatctaagataagttgtcatctctttaaaataacctgttatatctataaaatgtattttgtaagctttatggtaaacacaatacaaaaacctataatagattccactaaaagtaaaaagcaacaaattaaaacatactgttaaccacaaaggaagacagaaaaatgaagactcttaaatatttaagcaaaaaaacgaagacagtaagaaaggaagaaagaaagggaggagttacaaaacnnnnnnnnnnnnnnnnnnnnnnnnnnnnnnnnnnnnnnnnnnnnnnnnnnnnnnnnnnnnnnnnnnnnnnnnnnnnnnnnnnnnnnnnnnnnnnnnnnnnnnnnnnnnnnnnnnnnnnnnnnnnnnnnnnnnnnnnatggctggcctggcangaaacccactttcacctggtaaggacacacatngtctaaaagtgaagggggtgggaaaagacatggcttgccacagggcacngaaaaaggagccggggtggctatacttgg

SEQ ID NO: 351606 - DNA, 861 bp, Homo Sapiens
  misc_feature (49)..(150): n is a, c, g, or t
ccaggctggtacggtccggaattcccgggatatcgtcgaccacgcgttnnnnnnnnnnnnnnnnnnnnnnnnnnnnnnnnnnnnnnnnnnnnnnnnnnnnnnnnnnnnnnnnnnnnnnnnnnnnnnnnnnnnnnnnnnnnnnnnnnnnnngcatccagcctcatctttcttttaaccaataaacatgatgctgtatcttaaaaagagcactgagcagggacttaagggatcgagtcctcaaccaaactgatttaattactcaggattttcaaaaagcatcagaggctatttacaatcttaatcataggggttcagtaaaataaaaataagaagtaaaaaagcaagagaaattattctgtaaatctaactggtgtaattcccataatcatgcaattaagttttactcttgagtttcctgacagccattggtaaaaagagaaacacatcaggatttataatttttatcatccaattatgggaagcaagcatgttggccccaggagacgaactcttctactaatttatagcatgtatcctttcatcaagggccactgagccagttggtgagtcaacgggtgaacctaagatgcaaggatgttttccaggtgactatttaaaaaaataaataatccaccaacgtgattgaccttggcgagatcatgtttctagtctatacctcagtttccccatctgtaaagtgaggataatgtcccaccccatgtaactgtggtgaggaccaactgcaacactgtgcctgcgagtctccttggaaaagtgtaaggttatacacaaatggaaagtgatctgatcacagctcagtgtccccagcccagccgtatcagtgcccactgcttgcggcgt

SEQ ID NO: 351607 - DNA, 624 bp, Homo Sapiens
ggaagtcctccttctctcttgccttcttccgcatggtggacacgttcgaaggaccccgtcctcttcagcggcaccatccgatttaacctggaccctgagaggaagtgctcagatagcacactgtgggaggccctggaaatcgcccagctgaagctggtggtgaaggcactgccaggaggcctcgatgcaatcatcacagaaggcgggaagaatttaagccagggacagaggcagctgttctgcctggcccgggccttcgtgaggaagaccagcatcttcatcatggacgaggccacggcttccattgacatggccacggaaaacatcctccaaaaggtggtgatgacagccttcgaagaccgcactgtggtcaccatcgcgcatcgagtgcacaccatcctgagtgcagacctggtgatcgtcctgaagcggggtgccatccttgagttcgataagccagagaagctgctcagccggaaggacagcgtcttcgcctccttcgtccgtgcagacaagtgacctgccagagcccaagtgccatcccacattcggaccctgcccatacccctgcctgggttttctaactgtaaatcacttgtaaataaatagatttgattatttcct

SEQ ID NO: 351608 - DNA, 1711 bp, Homo Sapiens
  misc_feature (801)..(816): n is a, c, g, or t
  misc_feature (1539)..(1569): n is a, c, g, or t
aacaaccccggacaactacacactatatcttgtgagaagtgtcctacccaggagtcctgaatgtgatctgagtatgctctaaggcagccccaggaaaagcaattcagtccctctctctttgcctttagacctgcaggctgggacaatgaaaagaaaatagctattttacatgaaaattttacaaccgtgaagccggaagatgcatatgaagactttattgtgaaacctcccgtgagaaagctggtccacgacaaagagttggcagcagaagatgagcaggtgttcctaatgaagcaacagtcactccttgccaagcaaccagccactcccacgagagcttctgaatctcctgcaagaggaccctctggctctccaaggacccagggtcggggagggccagccagtgtgcctagctcctccccaggcacgtcagttaaaaaagccggacccaaacatcaaaaataatgcagcaagtgaaggggtgttggccagcttcttcaacagtctgttgagtaaaaagacaggctctcctggaagtcctggtgctggtggggtgcagagcacagccaagaagtcaggacaaaagactgtgttgtcaaatgttcaggaagaactggatagaatgactcgaaagccagactctatggtaacaaactcttcaacagaaaatgaagcctgaacctccttaaaaagtgcatatgtcgaatgaccaaataactatgtatattgatctgctaagaccaggatttttctgatatggcacatgctatcagttttttggggcaggggagatgaactttnnnnnnnnnnnnnnnncttcattggcttgtccgagtgtgaaatgcacatttaggaaggttacatgtcagaccctttgttaaggataacccttggactctggggcatgtggctcttttgtgggaggcaagcacatctgggcttcttgtggaggggaaggtagagtgaaagaaagagggcccactttctaacagggtggagcaaatgagaccaagaaatcattggtaagatgatggttagtctgaccagtttcatgttagtaaattcacttgttcttgggaagcagattaagtagcagaaagtccaggaaagaaagaccagaaggagtaatgagacaagtgatggtggggaagctgaatgttgagggaggtggaggaaggaaggagatgagcagtggcagtaaatactgtgcattcagtagaagttgaagaatcattgttagaagcatttccaaacaaaacactaagcaaaatgggaattaagccttattttgaatgcatctttaacttacgaaaaattgtactaattgtgggggtgcctgagtcaggcggagctgacccaggggtgggaacgatggcagctgcccaggacccatgtgcttggcccaggctatgtcctcgtgagaggtactggggtccacggatatgtgttgtggggcagacagtcactgtgggatgtcttcaaagtcagcagttacagaattagtttactttgaattttgttgtctaaatagctcctgcnnnnnnnnnnnnnnnnnnnnnnnnnnnnnnnctatcacaggctggcctaactaatacaaaataggtgatgaacctctggttttaccataatgcaatgtgccacggaaagttttggggaggtttttaatgtaattgcactctggttaattggcttcgtaccaagccctgcctta

SEQ ID NO: 351609 - DNA, 1883 bp, Homo Sapiens
agcgggataaaatgttttcagctcctggaggcgaaaggtgcagagtcgctctgtgtccgtgaggccgggcggcgacctcgctcagtcggcttctcggtccgagtccccgggtctggatgctggtagccggcttcctgctggcgctgccgccgagctgggccgcgggcgccccgagggcgggcaggcgccccgcgcggccgcggggctgcgcggaccggccggaggagctactggagcagctgtacgggcgcctggcggccggcgtgctcagtgccttccaccacacgctgcagctggggccgcgtgagcaggcgcgcaacgcgagctgcccggcagggggcaaggccccgccgacccgccgattccggccgcccaccaacctgcgcagcgtgtcgccctgggcctacagaatctcctacgacccggcgaggtaccccagggtacctgcctgaagcctactgcctgtgccggggctgcctgaccgggctgtacggcgaaggaggactgtgcgcttccgcagcgccactgtctacattgccccaccgtcgtcctgcgccgcacccccgcctgcgccggctggccgatccgtctacaccgaggcctacgtcacccatccccgtgggcctgcaccatgcgtccccgagccggagaaggacgcagacagcatcaactccagcatcgacaaacagggcgccaagctcctgctgggccccaacgacgcgcccgctggcccctgaggccggtcctgccccgggaggtctccccggcccgcatcccgaggcgcccaagctggagccgcctggagggctcggtcggcgacctctgaagagagtgcacctgagcaaaccaagtgccggaccaccagcgccgcctttccatggagactcgtaagcagcttcatctgacacgggcatccctggcttgcttttagctacaagcaagcagcgtggctggaagctgatgggaaacgacccggcacgggcatcctgtgtgcggcccgcatggagggtttggaaaagttcacggaggctccctgaggagcctctcagatcggctgctgcgggtgcagggcgtgactcaccgctgggtgcttgccaaagagatagggacgcatatgctttttaaagcaatctaaaaataataataagtatagcgactatatacctacttttaaaatcaactgttttgaatagaggcagagctattttatattatcaaatgagagctactctgttacatttcttaacatataaacatcgttttttacttcttctggtagaattttttaaagcataattggaatccttggataaattttgtagctggtacactctggcctgggtctctgaattcagcctgtcaccgatggctgactgatgaaatggacacgtctcatctgacccactcttccttccactgaaggtcttcacgggcctccaggtggaccaaagggatgcacaggcggctcgcatgccccagggccagctaagagttccaaagatctcagatttggttttagtcatgaatacataaacagtctcaaactcgcacaattttttcccccttttgaaagccactggggccaatttgtggttaagaggtggtgagataagaagtggaacgtgacatctttgccagttgtcagaagaatccaagcaggtattggcttagttgtaagggctttaggatcaggctgaatatgaggacaaagtgggccacgttagcatctgcagagatcaatctggaggcttctgtttctgcattctgccacgagagctaggtccttgatcttttctttagattgaaagtctgtctctgaacacaattatttgtaaaagttagtagttcttttttaaatcattaaaagaggcttgctgaaggat

SEQ ID NO: 351610 - DNA, 536 bp, Homo Sapiens
gcggccgcgcggggcgcctgcccgccctcggggcgcccgcggcccagctcggcggcagcgccagcaggaagccggctaccagcatccagaccagtgcccccaacatcttctcccccgaaagcgctttcagattcgcgccgagatggggcgacgcggcggctcttgagcggaataacccgaagggccacgcaaactggggcttccagccgcgagcatgcggcggggcgcccagggcctggggtcgcgcgctcagggcctgtgctgcgccacgcaggaggaggagagggctggccctgccgggcgcgggtgcgggcccgactggctgaaggaggagtggggactggcttggaagtctccggagcagaaaagtggggccgacaggatggaattgggggaggccgattttggctcagagagatttctctattaaggaaagcagtccaagaataggccccctggaagaggaatgcgctcaaacccagagggattctccttagagctacctcttgagattctgtacttcgaggaaattagag

SEQ ID NO: 351611 - DNA, 630 bp, Homo Sapiens
tcaccagtcgggcccgcacccgcgcccgtcagggccagccctctcctcctcctgctggcgcagcacaggccctgagcgcgcgaccccaggccctgggcgcccctccgcatgctcgcggctggaagccccagtttgcgtggcccttcgggttattccgctcaagagccgccgcgtcgccccatctcggcgcgaatctgaaagcgctttcgggggagaagatgttgggggcactggtgagtacactgcacaagtgacaaaatgttttcagctcctggaggcgaaaggtgcagagtcgctctgtgtccgtgaggccgggcggcgacctcgctcagtcggcttctcggtccgagtccccgggtacgaggaaagaccaccagggggcttctcgcggaaaagcggaccgcggaccctgcgcgggctggctggggcgggcggatgacgaggcgcaggggcaagggtgggtctgcgaggcggcgggtccgggcgtcttaggctccggggctccctcgctggcggcggagcaggatccgctctcgacgattcgagctcgccgatgtggcctgatccatacttcgataatgatgaaacgaagtatcgccccaccgcaaaaccgaggcccaagactaactc

SEQ ID NO: 351612 - DNA, 838 bp, Homo Sapiens
cgctggaccggtccggaatttccgggatgtgctgtgtccccagagaaatgtgggtttggggctagcagtggggaagaggggtataagcctttccaagacctcattcctggctgccctggggaccctgccccagtccctgtccccttgttcacctttggactggacagggagccacctcgcagtccgcagagctcacatctcccaagcagctccccagagcacctgggtctggagccgggggaaaaggtagaggacatgccaaagcccccacttccccaggagcaggccacagacccccttgtggacagcctgggcagtggcattgtctactcagcccttacctgccacctgtgcggccacctgaaacagtgtcatggccaggaggatggtggccagacccctgtcatggccagtccttgctgtggctgctgctgtggagacaggtcctcgccccctacaacccccctgagggccccagacccctctccaggtggggttccactggaggccagtctgtgtccggcctccctggcaccctcgggcatctcagagaagagtaaatcctcatcatccttccatcctgcccctggcaatgctcagagctcaagccagacccccaaaatcgtgaactttgtctccgtgggacccacatacatgagggtctcttaggtgcatgtcctcttgttgctgagtctgcagatgagggactagggcttatccatgcctggggaatgccacctcctggaaggcagccaggctggcagatttccaaaagacttgaagaacatggtatgaaggtgattggcccccctgacgttggcctaacactggggctgca

SEQ ID NO: 351613 - DNA, 173 bp, Homo Sapiens
caaactccaagttttaaaagtcctgaagaaaacaacatcaatgcacatcataatcaaatttcttgaagcaagtgataaagacaaaatcttgaaagtgaccagagataaaagcacattacatagataggaccaaagataaggatgacagccaacttttaggcaatacaatcccg

SEQ ID NO: 351614 - DNA, 2012 bp, Homo Sapiens
  misc_feature (1594)..(1594): n is a, c, g, or t
  misc_feature (1608)..(1608): n is a, c, g, or t
  misc_feature (1619)..(1619): n is a, c, g, or t
  misc_feature (1628)..(1629): n is a, c, g, or t
  misc_feature (1638)..(1638): n is a, c, g, or t
  misc_feature (1642)..(1643): n is a, c, g, or t
  misc_feature (1650)..(1650): n is a, c, g, or t
  misc_feature (1657)..(1657): n is a, c, g, or t
  misc_feature (1661)..(1662): n is a, c, g, or t
  misc_feature (1673)..(1673): n is a, c, g, or t
  misc_feature (1687)..(1687): n is a, c, g, or t
  misc_feature (1727)..(1774): n is a, c, g, or t
  misc_feature (1857)..(1916): n is a, c, g, or t
  misc_feature (1928)..(1928): n is a, c, g, or t
  misc_feature (1937)..(1939): n is a, c, g, or t
  misc_feature (1960)..(1960): n is a, c, g, or t
  misc_feature (1980)..(1980): n is a, c, g, or t
gggatggccatggcgcgggcggcgggcgcgcggggccctgccgggtggtgcaggaggcgcgggcgctgcgggcggggcacgctcctcgccttcgccgcgtggaccgcgggctgggtgctggcggccgcgctgctgctccgcgcgcacccgggtgtcctctccgagcgctgcaccgacgagaagagccggcgcatcctggccgcgctgtgccaggactaccagggcggcacgctggccggggacctctgcgaggacctgtgtgtggcgggaaagctgctgttccaacgctgcctgcactacaacagaggcaagaaggtgctgcaggccgactggcgcggccggcccgtggtcctcaagtccaaggaggaggccttctccagcttcccgcccctcagcctgttggaagaggaggcaggggagggtggccaggacatgcccgaggccgaactcctcctgatggtggctggggaggtcaagagcgctctgggcctggagttgtccaacagcagcctggggccgtggtggccgggcaggcggggcccacgctggcggggacagctggccagcctgtgggccctgctgcagcaggaggagtacgtctacttcagcctgctgcaggacctgagcccacacgtgctgcccgtgctgggttcctgcggccacttctacgcggtggagttcctggccgcgggcagcccccaccacagggcactcttccccctggaccgggccccaggtgcccctgggggtggccaggccaaggccatcagtgacatcgcactcagcttcttggacatggtgaaccattttgacagtgacttttcccaccgcctccacctctgcgacatcaagccggaaaactttgccatccggagcgacttcacagtggtggctattgatgtggacatggccttttttgaacctaaaatgagggaaatccttgagcaaaactgcacaggagatgaagactgcaatttctttgactgtttttcaagatgtgatttacgagtcaacaaatgcggagcgcagcgcgtaaacaacaacctgcaggtcatctgtgacaaaatatttcgccattggttttccgcgcctctcaagagctctgcggtctctttccagcttcagctgcagttacaggaggcggtgcaggaatgtgcagaccctggggtccccagtgggaacacccggagagcagcctccagcgtgttctggaagcttcgccaactcctccaagccacactgagggagctgcaggaggcagagaagtagccactctctggccttaaacatgctcacacaggaaaagtgaccttggctggatttcttctgccattgttttaaagatgagccatttcccctgtgctctctggggtgccgttctggtctccacattgtggagtggcaagtgctgctgccagagacagtgctccctcgctctcgtcccaccctggactctgacctgtcgccttgtgtaaaatgagatgagggaggaggtacagacctcccttcaggagggctctcggtcagaagacaccaacctgtgtgcacttattctctgcagagagcacttgtacctggttatcccagcacgagncccagctgctcttncctctaaatcnttaccaccnnaaaaagtgncccnntgcgcanacaaatnatgnntatccctctcnctgggccccaatgngcatgtgagcatgtttgagtgtccccatgagtgtctgcannnnnnnnnnnnnnnnnnnnnnnnnnnnnnnnnnnnnnnnnnnnnnnntcatgaggagtatgagtatgcctgagtgtgaatatgtatgagtgtgaatgagtgtgtgcacatgagtgcacgggtgtcagcannnnnnnnnnnnnnnnnnnnnnnnnnnnnnnnnnnnnnnnnnnnnnnnnnnnnnnnnnnnggggatgtgggntagggtggnnngtggtgctatctctagtgtgncctccggaacatcttgcctncctagcaaagaagttgaccattctttcggaat

SEQ ID NO: 351615 - DNA, 532 bp, Homo Sapiens
  misc_feature (17)..(17): n is a, c, g, or t
  misc_feature (53)..(53): n is a, c, g, or t
  misc_feature (60)..(60): n is a, c, g, or t
  misc_feature (69)..(69): n is a, c, g, or t
  misc_feature (85)..(85): n is a, c, g, or t
  misc_feature (92)..(92): n is a, c, g, or t
  misc_feature (100)..(100): n is a, c, g, or t
  misc_feature (108)..(108): n is a, c, g, or t
  misc_feature (202)..(202): n is a, c, g, or t
  misc_feature (321)..(321): n is a, c, g, or t
  misc_feature (464)..(464): n is a, c, g, or t
  misc_feature (521)..(521): n is a, c, g, or t
cccccggtcaaaaaacncccacccggtgcaccaaaccccgcaaaaaacactgnaccccgntaacccccnacacagtcccaacgancctcccngaaaaacntaacccanttaaaaaatgtccctgtgtgccaaacaaaagaagtgtaagcccgtgtccgggtgccaaatgaaccatgtgaaccatgtgtgaatgtgccccatnagtgtcctgccatgtgtgtgagtgtgcacaggtgagtgtgccacaggtgagtgtggtgtgcctcatgaaggagtatgagtatgccctgagtgtgaatatgtatgagtgtgaatgagtgntgtgcacatgagtgcacgggtgtcagcatgtgtatataagtgtaggcatgtgtatgtgattgtgtgagtgtgggcaggtgagtgtgttggggatgtgggttagggtcgggagtggtgctttctctagtgtgtcctccggaacntcttgcctacctagcaaagaagtgtgaccattctttcggaattaaatacaatcaaangaaaataagct

SEQ ID NO: 351616 - DNA, 2133 bp, Homo Sapiens
  misc_feature (722)..(732): n is a, c, g, or t
  misc_feature (1062)..(1073): n is a, c, g, or t
  misc_feature (1421)..(1436): n is a, c, g, or t
ggcagcgggaaagaggccggaaaaccctggatagtcacgcgtcccgcatggcacagctcaagaagcaagctgccctgtcggggatcaatggaggcctggagagcgcaagcgaggaagtcatttgggttaggcgtgaagactttgccccctccaggaaactgaacactgagatctgactgcgtcacctgccccgtagagaatgtgtgtagatacttcctgccctaactctgcccaccctcctgtaccgtcgacaagaatgtccccttaggtcgcgctcttgcacacacggttttggcagctgacttggttctgaagccatgtagccacccaactttgtcattttcaacaacatcagaaagaattgatcaggatcccaaataagcttgagtcctatcttctgtatattactaagggcttttatttattctcaataaatcagggcctgaacaattaaaagaaaaaagattctatagcactggaaagcaaatcaccccaggagttaacggatgtacaacagattaatttaagggatagtagcacacacacgatccttctatctgaaatcagtctcctagctggggaaacctctttcacacacaaaatgaaatgtgtacagcttgccgtgttctgactgtacccttccctcttccatgtctgagaatctccgtgtattttaagaatgtgtgaggagagggtggcgattcatgtttcaatgagcctcnnnnnnnnnnnccttcctgttttggtctatggctggtcttactctgtgtccatgttcggaagctctagttttgcatagaattatagagatgccaaactctttgaaaagagatccaaatttatcgcttgagagaaagaaaagaaacactattttttgtattttacctgagatacaggggcacaaatagatgagaattttacagtgttagtgtatgtatccctgagcctaaaaaatgaggatataaccttttacagagagagtgaggcgtggtggttttatatttatatatgaaaggccagcaagctcatgcgaaggatatacttttcttccaaaaagcggannnnnnnnnnnnaatgtttgaatctatatttgagatgggagtttggttggattaaacatgacaccccggtgggcggtgtgtgtgtctgttgcacatggcagggaggggagcctccttctcatggggttgccatggtgatcattggtttttccatcaaaattgcatcttcatccatagattaccttccccttccctgacagtccataaccaaacctttaaacagaacaacctctttaaaaacttctcttgtgtttaacactttcttcatgccaacgaaacagggtaaacatgctcaaaacattaacagtctaaacagatatccaaatactaagaagaaaaacaagttatagcactttcaannnnnnnnnnnnnnnnaaaaaaaggtttatagctttttcttttcccatgtcacaatgtccacttcctaagaagggtttaaaatactatgaaaactttctttttggggaaaatatctatttggtgtttgacacatcagtaggtactttaaagacctgaattttatagtagctttaggagttatattttataaaaatcagttatgactttatatttccagacaatagagagttcagtacatcatgctcttgtgcctctgcctgcttttcctgcgttcccaccctgtattccccccgcctttcgggtttccagggcttcgagcttgatcttttgaaagttttattctattaaatttttgctatatcttctggttttctgaaaaagctttagaatggtttctataccctttgtatcactgcatttttccatatcatctccggttcgatcgcgtccagatggaaaacggaagcagaggcttctaatcgtcgcatttactggctccagtgcaacacatccatctgaaaacactcggaagtctggtgcttggagagggtgccattgtctcttgtacataaggtcatgacgtgtctatgtcaaaagttcttatatatttcttttataagctgaaagaaggtctatttttatgtttttaggtctatgaatggaacgttgtaaatgcttgtcaaacaataaaaataacgaaaagtgaaaaaaa

SEQ ID NO: 351617 - DNA, 536 bp, Homo Sapiens
  misc_feature (35)..(35): n is a, c, g, or t
  misc_feature (42)..(42): n is a, c, g, or t
  misc_feature (66)..(119): n is a, c, g, or t
  misc_feature (136)..(136): n is a, c, g, or t
  misc_feature (167)..(167): n is a, c, g, or t
aaaatcccccaagacaatagagaagtcaagtacancaagccnctggtgccctctgccccgcctttnnnnnnnnnnnnnnnnnnnnnnnnnnnnnnnnnnnnnnnnnnnnnnnnnnnnnngggcctcgagcctgganccttttgaaaagttttaaatcctattaaaanttttgcctatatcctcctggttttcctgaaaaagctttaagaatggtttcctatacccctttgtatcacctgcatttttcccatatcatcctccggttcgatcgcgtcccagatggaaaacggaagcagaggcttctaatcgtcgcatttactggctcccagtgcaacacatcccatctgaaaacactcggaagtctggtgcttggagagggtgccattgtctcttgtacataaggtcatgacgtgtctatgtcaaaagttcttatatatttcttttataagctgaaagaaggtctatttttatgtttttaggtctatgaatggaacgttgtaaatgcttgtcaaacaataaaaataacgaaaagtgtc

SEQ ID NO: 351618 - DNA, 488 bp, Homo Sapiens
  misc_feature (121)..(132): n is a, c, g, or t
  misc_feature (417)..(417): n is a, c, g, or t
  misc_feature (449)..(449): n is a, c, g, or t
  misc_feature (459)..(459): n is a, c, g, or t
  misc_feature (466)..(466): n is a, c, g, or t
aatgaaatgtgtcagcttccggtgttctgactgtacccttccctcttccatgtctgagaatctccgtgtattttaagaatgtgtgaggagagggtggcgattcatgtttcaatgagcctcnnnnnnnnnnnnccttcctgttttggtctatggctggtcttactctgtgtccatgttcggaagctctagttttgcatagaattatagagatgccaaactctttgaaaagagatccaaatttatcgcttgagagaaagaaaagaaacactattttttgtattttacctgagatacaggggcacaaataggatgaggaattttacagtgttagtgtatgtatccctgagcctaaaaaatgagggatataaccttttacagaggaggagtgagggcgtgggggggtttatatattttatnatatggaaagggcccagccaagcttcatgcgnaagggatatnacttttncttcccaaaaagcggggttttt

SEQ ID NO: 351619 - DNA, 683 bp, Homo Sapiens
gggcagccaccttggaccataattaaatcaaggacattttctttgagacattccttatagttggagactcaagatatttttgttgcatcaggtgtattcccttgcatgggcagtggcttttataggagcattagtcctcattcgctgaaccctgttgtttaggtctaatttaagttttacatagagacccatgtatgactgcagcccattggctgcaagaccagggaggaaagtggcaagctgtagaaaatgtttacacgcatggaggggcattgctctagccctcagagcgtccggagcagcagggtacatgggtgggaggttcattcagcacccaccagtcaggtatgttctgagtgaacccacagcagtcgcagaatgagcacctggcagggtgggtttcctaggaataatttattatttttaaaaataggcctaataaagcaataatgttctagacatctgtctaagtaatcagactcaggttccacacacaagcaacaactcgtgggcctcttttctatttcaatgtgctactaagaacccttggatgtaacatactagttagttaatgaattctgtgaattctgtgaagagtaatgtgattgaaaataagtctaaacagctgtaaaagtgaccacaatgacatgaaataaatttaataagtctagatcagcaaaaaa

SEQ ID NO: 351620 - DNA, 1794 bp, Homo Sapiens
gctggtaccggtccggaatttccgggatcgcggtgctaaggaacacagtgctttcaaaagaattggcgtccgctgttcgcctctcctcccgggagtcttctgcctactcccagaagaggagggaagcacagtatgaagactttggagactcaaccgttagctccggactgctgtccttcagaccaggacccagctccagcccatccttctccccacgcttccccgatgaataaaaatgcggactctgaactgatgccaccgcctcccgaaaggggggatccgccccggttgtccccagatcctgtggctggctcagctgtgtcccaggagctaggggagggggacccagtttctctctccactcccctggaaacagagtttggttcccctagtgagttgagtcctcgaatcgaggagcaagaactttctgaaaatacaagccttcctgcagaagaagcaaacgggagcctttctgaagaagaagcgaacgggccagagttggggtctggaaaagccatggaagatacctctggggaacccgctgcagaggacgagggagacaccgcttggaactacagcttctcccagctgcctcgatttctcagtggttcctggtcagagttcagcacccaacctgagaacttcttgaaaggctgtaagtgggctcctgacggttcctgcatcttgaccaatagtgctgataacatcttgcgaatttataacctgcccccagagctgtaccatgagggggagcaggtggaatatgcagaaatggtccctgtccttcgaatggtggaaggtgataccatctatgattactgctggtattctctgatgtcctcagcccagccagacacctcctacgtggccagcagcagccgggagaacccgattcatatctgggacgcattcactggagagctccgggcttcctttcgcgcctacaaccacctggatgagctgacggcagcccattcgctctgcttctccccggatggctcccagctcttctgtggcttcaaccggactgtgcgtgttttttccacggcccggcctggccgagactgcgaggtccgagccacatttgcaaaaaagcagggccagagcggcatcatctcctgcatagccttcagcccagcccagcccctctatgcctgtggctcctacggccgctccctgggtctgtatgcctgggatgatggctcccctctcgccttgctgggagggcaccaagggggcatcacccacctctgctttcatcccgatggcaaccgcttcttctcaggagcccgcaaggatgctgagctcctgtgctgggatctccggcagtctggttacccactgtggtccctgggtcgagaggtgaccaccaatcagcgcatctacttcgatctggacccgaccgggcagttcctagtgagtggcagcacgagcggggctgtctctgtgtgggacacggacgggcctggcaatgatgggaagccggagcccgtgttgagttttctgccccagaaggactgcaccaatggcgtgagcctgcaccctagcctgcctctcctggccactgcctccggtcagcgtgtgtttcctgagcccacagagagtggggacgaaggagaggagctgggccttcccttgctctccacgcgccacgtccaccttgaatgtcggcttcagctctggtggtgtgggggggcgccagactccagcatccctgatgatcaccagggcgagaaagggcagggaggaacggagggaggtgtgggtgagctgatataaaaaggtttttatgat

SEQ ID NO: 351621 - DNA, 962 bp, Homo Sapiens
tttgattcctcggcctgttggcctactggctttcacgtcccggctccgcgggttccgtgggtcgcccgcgaaatctgatccgggatgcggcggcccaatcggaaggtggaccgaaatcccgcgacagcaagaggcccgtagcgacccgcggtgctaaggaacacagtgctttcaaaagaattggcgtccgctgttcgcctctcctcccgggagtcttctgcctactcccagaagaggagggaagcacagtatgaagactttggagactcaaccgttagctccggactgctgtccttcagaccaggacccagctccagcccatccttctccccacgcttccccgatgaataaaaatgcggactctgaactgatgccaccgcctcccgaaaggggggatccgccccggttgtccccagatcctgtggctggctcagctgtgtcccaggagctaggggagggggacccagtttctctctccactcccctggaaacagagtttggttcccctagtgagttgagtcctcgaatcgaggagcaagaactttctgaaaatacaagccttcctgcagaagaagcaaacgggagcctttctgaagaagaagcgaacgggccagagttggggtctggaaaagccatggaagatacctctggggaacccgctgcagaggacgagggagacaccgcttggaactacagcttctcccagctgcctcgatttctcagtggttcctggtcagagttcagcacccaacctgagaacttcttgaaaggctgtaagtggggctcctgacggttcctgcatcttgaccaatagtgctgataacatcttgcgaatttataacctgccccagagctgtaccatgaggggggagcaagtggaatatgccagaaatggtcccctgtcccttccaatggggggaaggtgatcccatctatggattcctggctgggaattctcctgg

SEQ ID NO: 351622 - DNA, 1093 bp, Homo Sapiens
ggaattctcgggatggaacacagtgctttcaaaagaattggcgtccgctgttcgcctctcctcccgggagtcttctgcctactcccagaagaggagggaagcacaggtgggtttctttagctctgcgtcggatccctgagaacttcgaagccatcctggctgaggctaatctccgctgtgcttcctctgcagtatgaagactttggagactcaaccgttagctccggactgctgtccttcagaccaggacccagctccagcccatccttctccccacgcttccccgatgaataaaaatgcggactctgaactgatgccaccgcctcccgaaaggggggatccgccccggttgtccccagatcctgtggctggctcagctgtgtcccaggagctacgggagggggacccagtttctctctccactcccctggaaacagagtttggttcccctagtgagttgagtcctcgaatcgaggagcaagaactttctgaaaatacaagccttcctgcagaagaagcaaacgggagcctttctgaagaagaagcgaacgggccagagttggggtctggaaaagccatggaagatacctctggggaacccgctgcagaggacgagggagacaccgcttggaactacagcttctcccagctgcctcgatttctcagtggttcctggtcagagttcagcacccaacctgagaacttcttgaaaggctgtaagtggggctcctgacggttcctgcatcttgaccaatagtgctgataacatcttgcgaatttataacctgcccccagagctgtaccatgaggggggagcaggtggaatatgcagaaatggtccctgtcccttcgaaatggtggaaagggtgataccatctatgattactgctgggtattctctgatgtcctcagccccagccaggacaccctcctacgtggccagcaagcaaccggggagaaccccgaatcatatctggggaccaattcactggagagcttccgggcttcctttcccggctacaaccacctgaaatgagctgacggaaacccattcgtctggcttttccccggaaggctcccagctcctctgtgg

SEQ ID NO: 351623 - DNA, 1117 bp, Homo Sapiens
  misc_feature (728)..(728): n is a, c, g, or t
ggagcgaggcctgggtggcgaattcggcacgagggcgggttccgtgggtcgcccgcgaaatctgatccgggatgcggcggcccaatcggaaggtggaccgaaatcccgcgacagcaagaggcccgtagcgacccgcggtgctaaggaacacagtgctttcaaaagaattggcgtccgctgttcgcctctcctcccgggagtcttctgcctactcccagaagaggagggaagcacagtatgaagactttggagactcaaccgttagctccggactgctgtccttcagaccaggacccagctccagcccatccttctccccacgcttccccgatgaataaaaatgcggactctgaactgatgccaccgcctcccgaaaggggggatccgccccggttgtccccagatcctgtggctggctcagctgtgtcccaggagctaggggagggggacccagtttctctctccactcccctggaaacagagtttggttcccctagtgagttgagtcctcgaatcgaggagcaagaactttctgaaaatacaagccttcctgcagaagaagcaaacgggagcctttctgaagaagaagcgaacgggccagagttggggtctggaaaagccatggaagatacctctgggggaacccgctgcagaggacgagggagacaccgcttggaactacagcttttcccagctgcctcgatttctcagtggttcctggtcagagntcagcacccaacctgagaacttcttgaaagggctgtaagtgggcctcctgacggttcctgcatctttgaccaatagtgcctgataacattcttggcgaaatttataaacctgcccccccagagctgttaaccatggagggggggagccacggtgggaaaaatggcagaaaatggggtcccctggtcccttcccaaatgggggggaaagggggcgaaccccatccaaagaaataacccggctggggaatatcctacggaagggaccctccacccccaggacagagaaaaccttccataagggtgggcccaacgaatcagccgcggggaaaaaccccccgatttctcttttctcgggggaacgcacatttcccacctggggaaaaagaact

SEQ ID NO: 351624 - DNA, 408 bp, Homo Sapiens
  misc_feature (123)..(123): n is a, c, g, or t
ggcaaagttgtgactgtttgatcttgtattacccacaggaatgagggcagctaaacccatagaaggagttggacccaaggcgaattacgagtcctgatcccagcagtatgtgtgctgacttcngggtgccccagaaatagacctctcctgtagagtggtgatatacagaatgagtttcagtttgcattgcagctgggattgaaagtaatcagtcatgagcaggcaggcaggaggtcctgttagccctgcattccaggaaggttggggtgggagttttgagtgggaaagaggatgacatgtgtgagagagttctgagcctgtttgctagggagagtgagtgagtgctcttgggcactgctcaggccgtttctgctgacttgcctggcttacaataaatgcccaataaat

SEQ ID NO: 351625 - DNA, 1285 bp, Homo Sapiens
  misc_feature (1145)..(1145): n is a, c, g, or t
  misc_feature (1186)..(1186): n is a, c, g, or t
  misc_feature (1198)..(1198): n is a, c, g, or t
  misc_feature (1209)..(1209): n is a, c, g, or t
  misc_feature (1219)..(1219): n is a, c, g, or t
  misc_feature (1274)..(1274): n is a, c, g, or t
gttgtcaccacggttatcaaagaggcagtactataacggtcctaaggtagcgaggctgggtggcgtgccgaagtcagttccttgtggagccggagctgggcgcggattcgccgaggcaccgaggcactcagaggaggcgccatgtcagaaccggctggggatgtccgtcagaacccatgcggcagcaaggcctgccgccgcctcttcggcccagtggacagcgagcagctgagccgcgactgtgatgcgctaatggcgggctgcatccaggaggcccgtgagcgatggaacttcgactttgtcaccgagacaccactggagggtgacttcgcctgggagcgtgtgcggggccttggcctgcccaagctctaccttcccacggggccccggcgaggccgggatgagttgggaggaggcaggcggcctggcacctcacctgctctgctgcaggggacagcagaggaagaccatgtggacctgtcactgtcttgtacccttgtgcctcgctcaggggagcaggctgaagggtccccaggtggacctggagactctcagggtcgaaaacggcggcagaccagcatgacagatttctaccactccaaacgccggctgatcttctccaagaggaagccctaatccgcccacaggaagcctgcagtcctggaagcgcgagggcctcaaaggcccgctctacatcttctgccttagtctcagtttgtgtgtcttaattattatttgtgttttaatttaaacacctcctcatgtacataccctggccgccccctgccccccagcctctggcattagaattatttaaacaaaaactaggcggttgaatgagaggttcctaagagtgctgggcatttttattttatgaaatactatttaaagcctcctcatcccgtgttctccttttcctctctcccggaagtttgggtgggcccggcttcatgccagctacttcctcctcccaacttggcccgctgggtgggaaccctcctggaagggggggtggctcccttcccatcgctgtcacaggccggttatgaaaattcacccccctttcctggacactcagacctgaaattctttttcattttgagaagtaaacagatgggcacttttgaagggggcctcacccgagntggggggcatcatcaaaaaactttgggagtcccctcacccntcctcttagggnttgggcagggntgacccctgnaaatgaggcacagccctaggggctgaacttgggggacctgggaaaccttcctggnctcttgatacc

SEQ ID NO: 351626 - DNA, 1768 bp, Homo Sapiens
caaagtgcaattgaactggggagggaatggggtgatgaagaaaggttcgctggacgaattgagggggccagtgtctcccctccctagaaaagattacttcccccatcaatatacccctaacacagagataaccccactcaaagggggcctgtgccacccacatgggaccctcaccccccacagctagaggaggggggcggtcgctgcttgagctgcctgaggtagaactagggtgcccttcttcttgtgtgtcccttccccttccagtccattgagctgggggtgggggtgggacaggcacctcagagccacctggagctgagagggtactgaagggaaaggacaagggggagggacagcagcagaggggaattgcagagcccagctggagaagaagggtagctggggctcctcaaaaggtacaggggagccaaagagggaaaaggctcaacactgagacgggctccccagtgcaggtcagaggggccatgagggcaggcggggtggtctgctccaggaccccaccttccccctgccttcacaagacagaggggggtatcaagagccaggagggtaccaggtccccagctcagccctaggctgtgctcacttcagggtcaccctgcccaaccttagaggaggtgaggggactccaaagtttttgatgatgcccccactcggtgaggccccttcaaagtgccatctgtttacttctcaaatgaaaaagaattcaggtctgagtgtccaggaaagggggtgaatttcataaccgcctgtgacagcgatgggaaggagccacacccctccagagggtaccacccagcggacaagtggggaggaggaagtagctggcatgaagccggcccacccaacctccgggagagaggaaaaggagaacacgggatgaggaggctttaaatagtatttcataaaataaaaatgcccagcactcttaggaacctctcattcaaccgcctagtttttgtttaaataattctaatgccagaggctggggggcagggggcggccagggtatgtacatgaggaggtgtttaaattaaaacacaaataataattaagacacacaaactgagactaaggcagaagatgtagagcgggcctttgaggccctcgcgcttccaggactacaagcttcctgtgggcggattagggcttcctgcttggagaagatcagccggcgtttggagtggtagaaatctgtcatgctggtctgccgccggtttcgaccctgagagtctccaggtccacctggggacccttcagcctgctcccctgagcgaggcacaagggtacaagacagtgacaggtccacatggtcttcctctgctgtcccctgcagcagagcaggtgaggtgccaggccgcctgcctcctcccaactcatcccggcctcgccggggccccgtgggaaggtagagcttgggcaggccaaggccccgcacacgctcccaggcgaagtcaccctccagtggtgtctcggtgacaaagtcgaagttccatcgctcacgggcctcctggatgcagcccgccattagcgcatcacagtcgcggctcagctgctcgctgtccactgggccgaagaggcggcggcaggccttgctgccgcatgggttctgacggacatccccagccggttctgacatggcgcctcctctgagtgcctcggtgcctcggcgaatccgcgcccagctccggctccacaaggaactgacttcggcagctgctcctcgtgccgaattcgccaccca

SEQ ID NO: 351627 - DNA, 1505 bp, Homo Sapiens
  misc_feature (835)..(854): n is a, c, g, or t
  misc_feature (1336)..(1347): n is a, c, g, or t
ctggcatctgtccagtgaagagtgtggaaactatccaagaggccttctgaattcctctgacatatatttgagaaactgggctactgaaagccctaaccccacttggctgcattttattaggtaaccagtgaggcaaacacccttgccagacccctaccatccatcttgatgtggttcctgcactggacactgcttgggtacgggcctgcccagatcttgggaatgtgggcagtggctcctctgaagcaccagtgggcagaggatgagtcatggtatcctcccggcacccctccctctgccttgcattttacttgtgatccaggtacttcctattgaagacagtggaccagcacatgaagctggccttctccaaggtcttgcgacagacaaagaagaacccctctaatcccaaggataaaagcacgagtatccggtacttgaaggcccttggaatacaccagactggccagaaagttacagatgacatgtatgcagaacagacggaaaatccagagaatccattgagatgtcccatcaagctctatgatttctacctcttcaaatgcccccagagtgtgaaaggccggaatgacaccttttacctgacacctgagccagtggtggcccccaacagcccaatctggtactcagtccagcctatcagcagagagcagatgggacaaatgctgacgcggatcctggtgataagagaaattcaggaggccatcgcagtggccaatgcaagcactatgcactgagatgccttggccatggcacaagagaaaccagccaggaaaaaccagacagactttcacactaaagaagaggcctccannnnnnnnnnnnnnnnnnnnattggtgtagttacgaagcctttcaggctgcttctgtttaaaatataaaagaaaactttgccccctttgcatcttcataaacctgctgcggcagactcctcagccgatggtggctctgggtttccttgagtgtcatatgtcctagaaagttgctggctgactcttttttgtctggggcctggggaaagggcttggactgtgaaaagaaatgtggcccctttccatcttcaagagagatggaattaatgatggatggaccctggagggaatctccccagccgacttccactgggctgacagactttgctgaccacaggggaacgatgttcttttctttcttcatgatcagacataaacttagcatcttaatggaagaaaaatgaggggaacttcaattatgatttattaaagacaatttctattacaccctcctttatgacaagtgacattttagatgtaaaagtaaaaactttaccatgccnnnnnnnnnnnnatgttggcctaacattgaggccttaaaacctgaggctcctgtgcctgatggaattcttgtaacatacacttgtgtatcatataaagataccactctgtttctcttatgtattcttactctagttgtttattaagaatgacaagcacgtcttttccaca

SEQ ID NO: 351628 - DNA, 894 bp, Homo Sapiens
  misc_feature (566)..(621): n is a, c, g, or t
  misc_feature (688)..(752): n is a, c, g, or t
ctagggttgatgaataccctttactgagtcaactattgctttaaagaattttttttgtaggtttatgtactcattttagttagcatctacctctctgggaaaatgaaaggagggttgacttagggatgagtatagatgttgaaagacaactatcaaaccatgtggtttgaatttttaaaattgtaaaacattggtgtccaaacctcccaccccacttgtatgtaaaggacagtgagtgttgtataaatagtaaactataagaagcatgaattttcatctttattaatgatcttgaaataaggaagagaatgcttaatatgttaagtagagccaagaatgctactaagaagcattgtctttggaaaaattttgtataatgacttggggcataagttgtgatgaaaaggcaacttggtttttggttccagtcatacttaatgatcagaaagctctaagatgttttctttaaaaatagaattaagtttaattttttgcatggcttacagattgggtcccttgaaggttaaaccatgtgatggtataacctgtgagatcttctagattgnnnnnnnnnnnnnnnnnnnnnnnnnnnnnnnnnnnnnnnnnnnnnnnnnnnnnnnntggtacggtaaccaacagggcactttgacttttaggcaagttaaaatggggtttacctacaggggannnnnnnnnnnnnnnnnnnnnnnnnnnnnnnnnnnnnnnnnnnnnnnnnnnnnnnnnnnnnnnnngtgttccaagtgggcttgcccctatttgaaaccgaatgccatttcccggggtggaaaaacccctctggggggatcccccgccctccaagggttttaaaatggggagtaaaacctgttagggccttaaagggggaaaaaattt

SEQ ID NO: 351629 - DNA, 2081 bp, Homo Sapiens
tactgctgcgggggccgcggggggcgcagctggggcgcggctcggaggggaggctagggggccgtgccaggcccgaagccgaggcggggccgggatgcggcgctgaggcccagcatggccggcccgggccccaccttcccgctgcaccggctcgtctgggcgaaccggcatcgcgaactggaggccgcactgcacagccaccagcacgacattgaacaggaggacccccgcgggcggaccccactggagctggccgtgtctctgggaaacctggagtctgtgagagtgctccttcgacacaatgccaacgtgggcaaagagaaccgccagggctgggcagtcctgcaggaggcagtcagcactggagaccccgagatggtgcagctggtgctccagtatcgggactaccagagggccacgcagaggctggcgggcattccggaactgctcaacaaacttcgccaggcccccgatttctacgttgagatgaagtgggagttcaccagctgggtgccccttgtgtctaagatgtgcccaagcgatgtgtaccgcgtgtggaagcggggtgagagcctgcgagtagacaccagtctcctgggcttcgagcacatgacctggcagcggggccggaggagcttcatcttcaagggccaggaggcaggagccctggtgatggaagtggaccatgaccggcaggtggtgcatgtggagacactggggctcactctgcaggagcccgaaacactgctggccgccatgcgcccagcgaggagcatgtggccagtcgcctcacctctcctatcgtctccacccacctggacactcgtaatgtggcctttgagaggaacaaatgtggtatctggggctggcggtctgagaagatggaaactgttagcggctacgaggccaaggtgtacagtgccaccaacgtggagctggtgacacgcacacgcacggagcacctctctgatcaggacaagtcgaggagcaaagcggggaagactccattccagtccttcctggggatgccgcagcagcattcctcccacaccggggcccccgtgcagcaggcagccagccccaccaaccccacagccatctcccctgaggagtacttcgaccccaacttcagcctggagtcacggaacattggccgccccatcgagatgtccagcaaagtacagaggttcaaggcaacactgtggctgagtgaagagcacccgctctccctgggtgaccaggtgacccccatcatcgacctaatggccatcagcaacgctcactttgccaagctgcgcgacttcatcactctgcgccttccacctggcttccccgtcaaaattgagattccccttttccacgtgctcaatgcccgcatcaccttcagcaacctgtgtggctgtgatgagcccctgagctccgtgtgggtgccggcccccagctctgctgttgccgcatcagggaaccctttcccgtgcgaggtggaccccaccgtgtttgaagtgcccaacgggtacagcgtgctgggcatggagcgcaacgagcccctccgggacgaggacgatgacctcctgcagttcgccatccagcagagcctgcttgaagcgggcactgaggcggagcaggtgaccgtctgggaagccctgaccaacacccggcccggtgcccgccctcctccccaggccacggtttatgaggaacagcttcagctggagcgggccctccaggaaagcctgcagctgtccacagagcccaggggcccaggatcccctcccaggacacccccagcccccggtccacccagctttgaagagcactgcgcctggccctggagttgtcttcacgggagcaggaggagcgggagcggcgcgggcagcaggaggaggaggacttacagcggatcctgcagctgtcactcactgagcactgagccatagccccgggagggctggccaggccactccctgcccgcttttgtaatttatttatttataaactctctgctgctgagcttggggcctggagccccaggaatgagcaggcaggggagactgagatggaaataaagagactgtcgcagc

SEQ ID NO: 351630 - DNA, 1129 bp, Homo Sapiens
  misc_feature (797)..(797): n is a, c, g, or t
  misc_feature (930)..(1006): n is a, c, g, or t
ggtccggaattcctgggattggtgctccagtatcgggactaccagagggccacgcagaggctggcgggcattccggaactgctcaacaaacttcgccaggcccccgatttctacgttgagatgaagtgggagttcaccagctgggtgccccttgtgtctaagatgtgcccaagcgatgtgtaccgcgtgtggaagcggggtgagagcctgcgagtagacaccagtctcctgggcttcgagcacatgacctggcagcggggccggaggagcttcatcttcaagggccaggaggcaggagccctggtgatggaagtggaccatgaccggcaggtggtgcatgtggagacactggggctcactctgcaggagcccgaaacactgctggccgccatgcggcccagcgaggagcatgtggccagtcgcctcacctctcctatcgtctccacccacctggacactcgtaatgtggcctttgagaggaacaaatgtggtatctggggctggcggtctgagaagatggaaactgttagcggctacgaggccaaggcaggagaggctaggggtggggggctgggggtaggagatgaggtccaggaactcagctcctctccacatccatcccaaagtagcccctgggctctggaaaccctgagcatttgtgggaactcagcgggcctgagtgcccagcccctgcggagtacacagggctcacccacatcatgggcccctacccagggtaccgaggatcaaaagaggagtgtgttcctcttgaccctggggctgcatctcctcgttgnggacttcctgggggtcagaacctgcccacctcctcctttttgggggagcagaatctcctctggtctctgggacgggagggactggggttctcccctggtgaggtttaattgtgggggaccagggttctgaacnnnnnnnnnnnnnnnnnnnnnnnnnnnnnnnnnnnnnnnnnnnnnnnnnnnnnnnnnnnnnnnnnnnnnnnnnnnnngcaccggagcccctctcttttttcgggcaggccggagggaaacaagggggggaagattccctttccggccttccctgggggaggggcggccaaaatttcctccccaccccggggcccccccgg

SEQ ID NO: 351631 - DNA, 1748 bp, Homo Sapiens
  misc_feature (1227)..(1254): n is a, c, g, or t
acagtactctccgggttaggtagcgaggctgggtggcgacaacactgtcaagatggccacacaggcccctggtagtcggggctccctgggtgactctcatggcaagcatgagactgtgaaccaggaagagaagagtggcccaggtgcaagtgggggcagcagcggggaccctgatggcttcttcaactccaaggtggcattgttcgcggctgtcggtgccggttgcgtcatcttcctgctcatcatcatcttcctgacggtcctactactgaagctacgcaagcggcaccgcaagcacacacagcagcgggcggctgccctctcgctcagtaccctggccagtcccaaggggggcagtggcacagcgggcaccgagcccagcgacatcatcattcccttacggactacagagaacaactactgcccccactatgagaaggtgagtggggactacgggcaccctgtctacatcgtccaagagatgccgccccagagcccggcgaacatctactacaaggtctgagtgcccggcacggcctcaggcccccgagggacagtcggcctggaccggacctctcctttcgcccccacaccccctccccttgccagctgtgcccacctttgtatttagttttgtagtttcttggcttttataatccccctttttccctgccccctgggcttcggaggggggtgcttgtgcccctaacccccatgctcttgtgccttccccctctggccaggcctctgggctccgtgggggcgccccttcttggaaggcagggctggacactgatggacagcaggcagggagacagtcccctggccctgcccctccctcgccccccttgccaccttcccaggactgcttgtccgctatcatcactgtttttaatgcttttgtgttcattttttagctgtcaactcattttcatctgttttttgaagaaaaatggaaaaatgtaaaaggcagcccctccccaggctttgtgagcctggcccaagccagtacaagagggcctggggcacgatgtggtcagccaggaagcataggatgccatttcttttatagattccttggtatttctggtggggtaaggggcaggccagggctgttcacgcccatgagggaagaggaaagtgccactgggcaaggtgtcccaccctcccctcctgaccctcctacgaggcttatcctggcaatggggtagtcactgccacccttcnnnnnnnnnnnnnnnnnnnnnnnnnnnnaaaaaaaatcccttccttgtgggattcttgggcatctcctgcctccctcactctcacggtaattaatgtcttaattggctgttgcctggggaacaggagaactgctgcaggcagatgacctcatggggggtggaagggaagtggaggtgcccagtgtgccatcttaccctgccaaacccgcgcagtttagaccacaaaccgcaagacgctgtgtatctacctcacctttaaaccgtccttttgccccctgactgcgcgacacctaccgcgcccacggccgttatattctaaaacaggggaacagaaaactacaattggaccacgtatccgccaacctgtcactcagcatgctcgcggtgatacctaaccgcccatactttatcccaccctcactatatactggccgtaaacaacgagtgaatgaggctgttatcctggctattcacgttagtcaaacagaaacatcaataccaacttaataaatttcgtggtgg

SEQ ID NO: 351632 - DNA, 731 bp, Homo Sapiens
  misc_feature (416)..(600): n is a, c, g, or t
tcaagccacagagtccaggccacctcagagccaggaaatgcatcctcacttgccccatggccttcatggcgcgctccaggcctcagacccttctctgtgttccgtcctggccatgggcttgttgcagtcagcaggtgtgggcttaggcgggcaccctgtggccaggggtactgcgtgaggccctcagttggtcctgtgcctctcaccagcacttagacagacacgtcaccagactttcaaggagatactgcagtgagtttctctggttggaaggggagggttggtgagtcccagaccttaaaaatacaaggttaagagggaccccaaagcaaaaaattccaacccttttcctcccagtcattgaaacaccaaaactattataccggagggtgtaatagttttgctgcccagttgtnnnnnnnnnnnnnnnnnnnnnnnnnnnnnnnnnnnnnnnnnnnnnnnnnnnnnnnnnnnnnnnnnnnnnnnnnnnnnnnnnnnnnnnnnnnnnnnnnnnnnnnnnnnnnnnnnnnnnnnnnnnnnnnnnnnnnnnnnnnnnnnnnnnnnnnnnnnnnnnnnnnnnnnnnnnnnnnnnnnnnnnnngtgacgggagaggaggttggaggtgtagcgatggagcaggaaactggagttgaggagggcagctcaagccacagagtccaggccacttcagagcaagaaatgcatcctccacagagccctggaagccccac

SEQ ID NO: 351633 - DNA, 2116 bp, Homo Sapiens
cggtccggaattcccgggatcccgcccgccagctcgctgacagcacgactcagggcggagggaagtaggtccgttggtcggtcgggaacgaggctcaggcggccaggcccgcgcggagccgttgccatggcagccgccgccggggacgcggacgacgagccgcgctcaggccactcgagctcggagggcgagtgcgcggtggcgccggagccgctgactgacgctgagggcctcttctccttcgctgacttcgggtctgcgctgggcggcggcggcgcgggcctctcgggccgggcgtccggcggggcccagtcgccgctgcgctacttgcacgtcctgtggcagcaggatgcggagccgcgcgacgagctgcgctgcaagatacccgctggccggctgaggcgcgctgccaggccccaccggcggctcgggcccacgggcaaggaggtgcacgctctgaagagactgagggactcggccaatgccaatgatgtggaaacagtgcagcagctgctggaagatggcgcggatccctgtgcagctgatgacaagggccgcacagctctacactttgcctcatgcaatggcaatgaccagattgtgcagctgctcctggaccatggtgctgatcctaaccagcgagatgggctggggaacacgccactgcacctggcggcctgcaccaaccacgttcctgtcatcaccacactgctacgaggaggggcccgtgtagatgccctggaccgagctggtcgcacacccctgcacctggccaagtcaaagctgaatatcctgcaggagggccatgcccagtgcctagaggctgtgcgtctggaggtgaagcagatcatccatatgctgagggagtatctggagcgcctagggcaacatgagcagcgagaacgcctggatgacctctgcacccgcctgcagatgaccagtaccaaagagcaggtggatgaagtgactgacctcctggccagcttcacctccctcagtctgcagatgcagagcatggagaagaggtagcaagagaggctccctgccttcctgccactgccccaccctgccccactgctgtctcagtaccaagaaaaagcccaacatctgggacttggagctgcacttgtctggtgaggaccttgccctcacccgcagatgccgtggggcagagatgctctctctccacggcctcagagccactcccagccacagtttccagcatctctgtggacagggaccacagctcccagcttcttccagttctcgcagcaccagaccagcctctgcagctgcacttcagctccgcagacctgcgctatctcagcagacctcacttgccccatggccttcatggcgcgctccaggcctcagacccttctctgtgttccgtcctggccatgggcttgttgcagtcagcaggtgtgggcttaggcgggcaccctgtggccaggggtactgcgtgaggccctcagttggtcctgtgcctctcaccagcacttagacagacacgtcaccagactttcaaggagatactgcagtgagtttctctggttggaaggggagggttggtgagtcccagaccttaaaaatacaaggttaagagggaccccaaagcaaaaaattccaacccttttcctcccagtcattgaaacaccaaaactattataccggagggtgtaatagttttgctgcccagttgtggtaggccagtagtggcctcccaagatgcccatgtcctaatcccaggaacctgtcaaaattaccttgtatggccaaaggggctttgcagatgtaatgaagttaaggatctttcgccaggaagattatcccagcttgttcaggagggcttgatgtcctcacccgggtctgtataacagaagagcaggtgacgggagaggaggttggaggtgtagcgatggagcaggaaactggagttgaggagggcagctcaagccacagagtccaggccacctcagagccaggaaatgcatcctcccacagagccctggaaggccccagccctgctcccacctggactggctcagtgaggctaattttataattttggctgattttagaactctaagggaataaatttgtgttgttttaagtc

SEQ ID NO: 351634 - DNA, 333 bp, Homo Sapiens
aagatgcccatgtcctaatcccaggaacctgtcaaaattaccttgtatggccaaaggggctttgcagatgtaatgaagttaaggatctttcgccaggaagattatcccatcttgatcaggagggcttgatgtcctcacccgggtctgtataacagaagaacaggtgacgggagaggaggttggaggtgtagcgatggagcaggaaatgcatcctcccacagagccctggaaggccccagccctgctcccacctggactggctcagtgaggctaattttataattctggctgattttagaactctaaggcaataaatttgtgttgttttaagtc

SEQ ID NO: 351635 - DNA, 1059 bp, Homo Sapiens
  misc_feature (508)..(544): n is a, c, g, or t
  misc_feature (903)..(903): n is a, c, g, or t
  misc_feature (917)..(917): n is a, c, g, or t
  misc_feature (925)..(925): n is a, c, g, or t
agccaactgtgggccttcacctctacctgcacttcccctctcacaccagctgcactcctctggctgccagagcagggtggttttccccaatacctggagctcagaaaggcagagccatctggccctccagggtgtccccagccatcaggagacttgagttggtatttggacctgagcccgcacattccactcccattctccctccaagaggggcccagcattgtatttccctgtgaccccttactctcctggccagaacttgagccagctgtgggatgttgctgcaggacagtaagccctcacctgggcaaacatgaagctctggcctcctttcctcagccccttgttcttccctgtcctccaccctggaccccagccggctgctggagcccagaggccaccttctccctgcatcctgaatgatgcttagtcagaagcctgtgttggaacatccctcgtttacggggcgctggcctacctcctgaggacctcagccacagatgagatnnnnnnnnnnnnnnnnnnnnnnnnnnnnnnnnnnnnnctacctgcacagcacgctgttgagtgttggttgctagagtatccggctggctgctgtgtgcctggtttcctcacatcctgcctcagcttcaacaccctggcttatgtggaacacctatcagggagcagaaaaggggtgcagtacactaagtgaacccagattctggattcttggtgtccacagcctagctgatacgagataggcccataggacacctgggtcaggtagaaggagcctcctcaaaaggcagtgctggggcacccacgggtgtgcttggatactggagtctgaaaagaggggaaggtgctggggccaaaggagaaactagaaaagtggtagatgggacaggtaagtggcanaaggtgaggggggntaatttanaatgtaaaagggcagtaaattagggggtgagggggaaaggggaatagggggacccctaaggagggttaaagtggggaccatggtcccggaaggcgaatttgaaaaaaatttggggggaaaaagggtttttttct

SEQ ID NO: 351636 - DNA, 305 bp, Homo Sapiens
tcggcacgaacggcacgaggagaatgtggccgcccttttcctgccctctgccccatgtgggtggggggcctcgtggcccggccggcgccccgtccccttctgcatgtctgaggccaccggcaaccgccgccccactccagatttgcccccgccctgttttgaaagccccttatttataacttttatactttgtgcaggtcgcggcgcttcctgcctcatcctcggctgcatggggcgggggcgctgtttttaacgtgcccgtttgtactgatgtatgaacttgtcaataaacacaattgtttgtt

SEQ ID NO: 351637 - DNA, 278 bp, Homo Sapiens
  misc_feature (59)..(59): n is a, c, g, or t
  misc_feature (83)..(138): n is a, c, g, or t
  misc_feature (161)..(174): n is a, c, g, or t
aatacaaaatttagttgggcatggtggtacatgcctgtagtcccagctactcaggaggntgaggcgggagtatcatttgaacnnnnnnnnnnnnnnnnnnnnnnnnnnnnnnnnnnnnnnnnnnnnnnnnnnnnnnnngacagagcgagattcttgtctcnnnnnnnnnnnnnngaagtaaaacccccacactttacagttacacagaaaatcatactaactatcagaaagaactaagaatcagataggcatcagacttttcatctacaacaataaat

SEQ ID NO: 351638 - DNA, 584 bp, Homo Sapiens
ttattcaagtgtatgtggtaaaaatgcagatgattgctgctttaccccagggtttattagcatcctacttctgctgggctgcatcattatataatgccacaggcatctagtcaaggtaaagaagccagaaaggttaggcaagaagtgagataaaatcagatcacctttgatcaaaatggttggtgaacctccacatgtccagttctgttgccaaactttccattcagagtatttggtggagtttgaatttgagcaaactaaatgccttcatcttaggtagaaagggcctgaatcttccattttatattcaaacctcattgttatttggcctaagtaaaaagtcagatttcatttccatttacctgagttcgctttaaagagcttttcaaagagagctttatagacacccacaattgtccccaatctcttcatgatgttgcattaatagttgtttttgtccctttcttggaaatgttaatgccaaagttgcctgaacattgggcggttttcttaatttgaagtataaaaattataaagagtaattccaaaggtattaaaagattgtttaacagtatgtgtggtga

SEQ ID NO: 351639 - DNA, 2121 bp, Homo Sapiens
cagtttacctctttccagaatggtggttggagggctggttcaggtgccctggagggaaggggaagcctgtggccctgatttgttcagagcccattctcccttgcctccccttttgagactggagccaacccttttggagagaggacctgcccacctttgagatcagcagggggctcggatccagccctaagagacttgggtggacccccatgagtcaatggagggcagacggctctcccccttaaagctgttccctgggggatggcttggtagtggactttctggggtttgcctgttacgccagactcggacttctaagctttaagtgtggcccaggaggtttcttctccctgggagggcttggctcccaagaagtcccagggcagccgaggccagccctgcctgggttggagaaactgactttgtgccttaagtctactcagtgcctggtgaagccaccctcagcccttcacaggcctgaaccagtaggggccagtgggccaggtaagccctagagccttgaaccaggaatatccaggaagaggaaattccctttgagcccccagatggtattgcagcttcactgcctgcgttcctgggagcgtctggagctcacagtgatcagtgaccacatcattctctctgagcagaggagcaggaatccctcaagcagcagcctggtcttggctggtgggcagatgcaaatagcttttgctgttattaatgaagtaattactaaatgcacttaaaccagggcaggaaggaatggaaggatggagctagaaagctcagagtgggccagagcaggggtgtgacacttgcaaagacagggctctgactctgatccctcccagggagcctccgacacccatcccactcccaaccaccaagaccctgggttagggaagaagttgtatcttaagtgccaccttcaagtttcttagtggtgcctggtgcattccgaggctacatccaggctcatggaaggagtgtagtattcatttagccatgtctgccatgggtccagaaatgggaaagggaattgctgtccttgccctgtggtatgctgccacctctttgggaagcaggccttgcccctgtcccaccactcattctcagctttgaatgggaggcctttctatagtggaggcctttccttgaagcctatgaactgcaggcccccttttgccattgatctcaaagcacttgtcctcaggatagggaagagcagggggatgcaggaatagcagggatagcttgctcccagccccctccccaatttggttccgttgacataggaattttacgattcccaaaccatgcaggggctgagccttccttatgatgactttgttctccctcccactgggggaatcctccctatgccttaaaactgccgagccccactccatgtaataggattcctgggcttcctcaatgggggttcatgttcttggactgcgggccctcagtccttaactggaaagtgaccgtccactgccccatggagcccatctggacacagcacagccccaaaaccgttagcagctggctctgtttccaagcctggggaggggttcctcagtgcaggagttggggacaggctggggatccaagctgcttgagggggtcaaccttggaccaaagttgccttaagcctgtggtaaaagggcttcagggaaggtaagtgggccacctgctggaagctgccagctgcccggctggcaatggtgtgagtgtcttggccctgtccctgccctggggtccagcaggtcatccctcccttcttctctctcctttggcgtttgttcctgtagtcactgggctaatctccccctagcttcaagctgtacatagggcctcccagtgcaaatcctcctgcccataccgtgcacccttagaagcctgcgtgtgcatagagcgccccctacttcccagttaactcccagttcttctccctgagcttggtatttgtcatgtgccaactctgactctgaggtgggcagtgagggaagcagccccgggcctgcttgcttcctgtccccgaaatgttcgtttcttctgaagtaaatatacatatataaataaatgtataaatactgctttgtatctgaaaaaaaa

SEQ ID NO: 351640 - DNA, 2410 bp, Homo Sapiens
  misc_feature (246)..(246): n is a, c, g, or t
  misc_feature (373)..(373): n is a, c, g, or t
  misc_feature (1783)..(1783): n is a, c, g, or t
ggctttcctgtgactttctctttactcctggcacacttccagaaagtttgtggtctggagacactcgcagtagctcttttgcccactggttccactgcattgtcttgctaatatttagaggtttctaatcctgtatcagaagagacatttgatcttttaagctgaaatgctgtggtttgatgttgttttaggtatgaacatgctaatgatgataagagcagtttgaaatcagatcccgaagggaanaacatccatgctggactcctgaagaagttaaatgaactggaatctgacctaacctttaaaataggccctgagtataagagcatgaagagctgcctttatgtcggcatggcgagcgacaacgtcgatngctgctgagctcgtggagaccattgcggccacagcccgggagatagaggagaactcgaggcttctggaaaacatgacagaagtggttcggaaaggcattcaggaagctcaagtggagctgcagaaggcaagtgaagaacggcttctggaagagggggtgttgcggcagatccctgtagtgggctccgtgctgaattggttttctccggtccaggctttacagaagggaagaacttttaacttgacagcaggctctctggagtccacagaacccatatatgtctacaaagcacaaggtgcaggagtcacgctgcctccaacgccctcgggcagtcgcaccaagcagaggcttccaggccagaagccttttaaaaggtccctgcgaggttcagatgctttgagtgagaccagctcagtcagtcacattgaagacttagaaaaggtggagcgcctatccagtgggccggagcagatcaccctcgaggccagcagcactgagggacacccaggggctcccagccctcagcacaccgaccagaccgaggccttccagaaaggggtcccacacccagaagatgaccactcacaggtagaaggaccggagagcttaagatgagactcattgtgtggtttgagactgtactgagtattgtttcagggaagatgaagttctattggaaatgtgaactgtgccacatactaatataaattactgttgtttgtgcttcactgggattttggcacaaatatgtgcctgaaaggtaggctttctaggaggggagtcagcttgtctaacttcatgtacatgtagaaccacatgtttgctgtcctactaccacttttccctaagttaccataaacacattttattcacaaaaaacacttcgaatttcaagtgtctaccagtagcacccttgctctttctaaacataagcctaagtatatgaggttgcccgtggcaactttttggtaaaacagcttttcattagcactctccaggttctctgcaacacttcacagaggcgagactggctgtatcctttgctgtcggtctttagtacgatcaagttgcaatatacagtgggactgctagacttgaaggagagcagtgattgtgggattgtaaataagagcatcagaagccctccccagctactgctcttcgtggagacttagtaaggactgtgtctacttgagctgtggcaaggctgctgtctgggactgtcctctgccacaaggccatttctcccattatataccgtttgtaaagagaaactgtaaagtctcctcctgaccatatatttttaaatactggcaaagcttttaaaattggcacacaagtacagactgtgctcatttctgtttagtatctgaaaacctgatagatgctacccttaagagcttgctcttnccgtgtgctacgtagcacccacctggttaaaatctgaaaacaagtacccctttgacctgtctcccactgaagcttctactgccctggcagctcgcctgggcccaactcagaaacaggagccagcagagcactctctcacgctgatccagccaggcaccctgcttaagtcagtagaagctcgctggcactgcccgttcctacttttccgaagtactgcgtcactttgtcgtaagtaatggcccctgtgccttcttaatccagcagtcaagcttattgggagacctgaaaatgggaaaattcacactgggtttctggactgtagtattggaagccttagttatagtatattaagcctataattatactctgatttgatgggatttttgacatttacacttgtcaaaatgcagggggttttttttggtgcagatgattaaacagtcttccctatttggtgcaatgaagtatagcagataaaatgggggaggggtaaattatcaccttcaagaaaattacatgtttttatatatatttggaattgttaaattggttttgctgaaacatttcacccttgagatattatttgaatgttggtttcaataaaggttcttgaaattgttaccagtg

SEQ ID NO: 351641 - DNA, 305 bp, Homo Sapiens
tctagaggatctcgatgcatgtggcagaggacagtccagacagcagcctgccagaaggcatttctcccattatataccgtttgtaaagagaaactgtaaagtctcctcctgaccatatatttttaagtactggcaaagcttattaaaattggcacacaagtacagactgtgctcatttctgtctagtatctgaaaaccaggatagaaaaagctccatgagcagagcagcccatgtaacctttattatggctcaggccttgcaaaaagggctatagagtgtggagtgacaaagccaggatttaggt

SEQ ID NO: 351642 - DNA, 397 bp, Homo Sapiens
  misc_feature (333)..(333): n is a, c, g, or t
  misc_feature (362)..(362): n is a, c, g, or t
  misc_feature (364)..(364): n is a, c, g, or t
caacatctccaccatgttggtgacacacgattacacggcagtgaaggaggatgagatcaacgtctaccaaggagaggtcgttcaaattctggccagcaaccagcagaacatgtttctggtgttccgagccgccactgaccagtgccccgcagctgagggctggattccaggctttgtcctgggccacaccagtgcagtcatcgtggagaacccggacgggactctcaagaagtcaacatcttggcacacagcactccgtttaaggaaaaaatctgagaaaaaagataaagacggcaaaagggaaggcaagttagagaacggttatcggaagtnacgggaaggactcagcaacaaggtatctntnaagcttctcaatcccaactacatttatgacgtt

SEQ ID NO: 351643 - DNA, 2014 bp, Homo Sapiens
gggagcgcgtctccgcgcagctgggacgaggcggaggcgcaggaggaggaggaggccgtgggcgacggcgatggcgacggggacgcggacgcggacggcgaggacgacccggggcactgggacgcggacgctgccgaagccgccaccgccttcggggccagcggcgggggccgcccgcacccccgggcgctggctgccgaggagatccgacagatgctacagggcaagccgctggccgacacgatgcgtcctgacacgctgcaggattacttcgggcagagcaaggccgtgggccaggataccctgctgcgctcgctcctggagaccaacgaaatcccctcgcttatcctgtgggggccgccgggctgcggcaagaccactctggctcacatcatagccagcaacagcaagaaacatagcataaggtttgtgacattatctgcaacaaatgccaagacaaatgatgtgcgagatgtcataaaacaagctcaaaatgaaaagagctttttcaaaaggaaaaccatcctttttattgatgagattcatcggttcaataaatctcagcaggacactttccttcctcacgtggaatgtgggacgatcactctgattggggcaaccactgaaaacccttccttccaggtcaacgctgctcttctgagccgctgtcgagtgattgttcttgagaagcttccagtagaggcaatggtgactattttaatgcgagcgatcaactccctgggaatccacgtcctagactctagccgtcccactgaccctctgagccacagcagcaacagcagctcagagcccgccatgttcatagaggataaagcagtagacaccctggcttacctcagtgacggtgacgcccgagctgggttgaacggactgcagctggcggtgctggctaggttaagctctaggaagatgttctgtaagaagagtgggcaatcctattctcccagtagagttctgatcacagagaatgacgtgaaggagggcctacagcgatcccacattttatatgaccgggcaggtgaggagcattacaactgcatctccgccctgcacaagtccatgcggggctcagaccagaacgcctccctctactggctggctcgcatgctcgagggaggagaggacccactctacgtggcacggaggcttgtcaggtttgccagcgaggacataggtctggcagacccgtctgcgttaacacaagcggttgctgcctaccaaggctgtcattttataggcatgcctgaatgtgaggtgcttctggcccagtgtgtggtctactttgccagagccccaaagtccattgaggtgtacagcgcctacaacaacgtcaaagcctgcctgaggaaccaccaggggccactgccccccgtgcccctgcacctgaggaacgcgcccactaggctgatgaaggatttgggctatggcaaaggctacaagtacaaccccatgtacagcgagcctgtggatcaggagtacctgcctgaagagttgaggggggtagatttcttcaagcagaggaggtgctgactcctcagggcacgacagcagaaggatgttgcttttttaagggagggccagaaagaaagttagtggattgcaaagttggttgcctggtggaagttagaacagaccaacattttgtgccagaaatttaagagttccataggtggaggcgcagttctttcgaataaatgtgtaactttgaaattgtgttcatttgcactcggtgcagcggttatgcttatgaaaatacctggcagctttgtgcaatgaattaatgttataaggaattatctattttgtcatagtatttaagtcataatgtcatttcagaattcagttctgtaggattttcttttctttaaaaaatgtatattctgggtagttttaattggtaaaaaaatgtaattgtgatttaatactgcatagtgttttgggtattttttttatatgcaaaggtcttacgagccaataaaactatttcaaacta

SEQ ID NO: 351644 - DNA, 469 bp, Homo Sapiens
  misc_feature (436)..(436): n is a, c, g, or t
  misc_feature (446)..(446): n is a, c, g, or t
gacattatctgcaacaaatgccaagacaaatgatgtgcgagatgtcataaaacaagctcaaaatgaaaagagctttttcaaaaggaaaaccatcctttttattgatgagattcatcggttcaataaatctcagcaggacactttccttcctcacgtggaatgtgggacgatcactctgattggggcaaccactgaaaacccttccttccaggtcaacgctgctcttctgagccgctgtcgagtgattgttcttgagaagcttccagtagagggcaatgggtgactattttaatgcgagcgatcaactccctgggggaatccacgtcctaggactctaggccgtccccacttgaccctcttgaggccacagcaggcaacagcagcttcaggaggcccgccatgtttcataggagggttaaaggcagttggacacctngggttttacntcagttgaacggttgaacggccc

SEQ ID NO: 351645 - DNA, 579 bp, Homo Sapiens
  misc_feature (538)..(538): n is a, c, g, or t
  misc_feature (546)..(546): n is a, c, g, or t
tcacgttcaatcctctgtgaatcaaaaactcctaactgggaaaaaataggaattgcccaactccttcttaacagaacatcttccctagagcttaacctaacccagcaaccgcccagctgcagtccgttcaacccagctcgggcgtcaccgtcactgaggtaaaccagggtgtctactgctttatcctctatgaacatggcgggctctgagctgctgttgctgctgtggctcagagggtcagtgggacggctagagtctaggacgtggattcccagggagttgatcgctcgcattaaaatagtcaccattgcctctactggaagcttctcaagaacaatcactcgacagcggctcagaagagcagcgttgacctggaaggaagggttttcagtggttgccccaatcagagtgatcgtcccacattccacgtgaggaaggaaagtgtcctgctgagatttattgaaccgatgaatctcatcaataaaaaggatggttttccttttgaaaaagctcttttcattttgagcttgttttatgncatctcgnacatcatttgtcttggatttgttgcagataatg

SEQ ID NO: 351646 - DNA, 244 bp, Homo Sapiens
aaatgcatgtggcagtggttcccaaacactggtgtgcagatggaacacaacccgtgaagttttcagcggtccttgttaaaaagagataaaggaaagagataaaggataaagtgctgagattctcgtgaagctaaatgaagctaaataaacatccttcaatgagaatatgtccttcctatagtttttggaggaaaatatttccttttgtgagacaaaagtgttagtaggtgggtcagaacataag

SEQ ID NO: 351647 - DNA, 1223 bp, Homo Sapiens
  misc_feature (736)..(753): n is a, c, g, or t
  misc_feature (762)..(800): n is a, c, g, or t
  misc_feature (847)..(919): n is a, c, g, or t
ccgttgtcagtgtgtctgttactatttaaatatttatacaaaagggtttttgtttatagcttaaggaatgatactgtgctctgcttggtgcatggagaaaaaggaagacccatactctccacaccctagagcttttctctaaatattgtgcaaagtttttgctagttttatcttctgactttgggactagtttttgctgcagagttgtgttgctttgtgattttcctctgggatagtgtactgtacacaaccagatgtgttccacactccgtgactccgcagtttgtcctggagtgacatacacatccaccatggaaagggaagcatctctgcctgtggattctcaagtacttggaagcacctctcctgaggaacctacaggattctaaggtttcctaggtcactgaacaactaatcttggtccctgaatatttctaggtttgtaagtgcagcagttttatttcctctagaactcatcctgtttcaagggaagtacctaagaagatatagagtgtttctagggtaagggacctgcaggtgtaagcatagatgaaataactgtcctgtcacatgtgcagcaggccatggagtgtagcgggcatcgctgccgccattcctgcagcatcaccataagcagtgcagggtgtctccatcgagctgtttggttccatgtgtgtttaacatgtgcagaagtagcttctctgtttaagtttaataaagttgagtttcaccagtnnnnnnnnnnnnnnnnnnctcgaggcnnnnnnnnnnnnnnnnnnnnnnnnnnnnnnnnnnnnnnncatggtcatagctgtttcctgacccagctttcttgtacaaagtggtnnnnnnnnnnnnnnnnnnnnnnnnnnnnnnnnnnnnnnnnnnnnnnnnnnnnnnnnnnnnnnnnnnnnnnnnntgcagtacccggggaatttaacccgcctaatgagcgggccttttttttgggatcccaaggaatcttccttgagatccttttttttcctgcaagataatctgctggcttgccaaaccaaaaaaccaccgccatcaaaggggggggtttgttttgccccggtctcccacctttccaaaccccccttcccgaaagggacacagaaactttacgcaaatagcccacttccccccgtacccctttcttttccccggtgcgccgatgacgcgcggcgaccccccgagccaataccgcggcgccttcccta

SEQ ID NO: 351648 - DNA, 472 bp, Homo Sapiens
  misc_feature (29)..(29): n is a, c, g, or t
  misc_feature (78)..(78): n is a, c, g, or t
  misc_feature (83)..(83): n is a, c, g, or t
  misc_feature (341)..(341): n is a, c, g, or t
tgaacaaaacaacaccccacccaggaaanggaaagcacctctgccctgtggattcctcaagtacctggaaagcacccnccccngaggaacccctacaggattccctaaaggtttcccctaggtcacctgaaacaacctaatcctggtcccctgaaatatttcctaggtttgtaaagtgccagcagttttatttccctcctagaactcatccctgtttccaagggaagtaccctaagaagatatagagtgtttcctagggtaagggacctgcaggtgtaagcatagatgaaataactgtcctgtcacatgtgcagcaggccatggagtgtagcgggcattcntgccgccattcctgcagcatcaccataagcagtgcagggtgtctccatcgagctgtttggttccatgtgtgtttaacatgtgcagaagtagcttctctgtttaagtttaataaagttgagtttcaccagtc

SEQ ID NO: 351649 - DNA, 3755 bp, Homo Sapiens
  misc_feature (3281)..(3344): n is a, c, g, or t
  misc_feature (3371)..(3371): n is a, c, g, or t
  misc_feature (3404)..(3404): n is a, c, g, or t
  misc_feature (3411)..(3411): n is a, c, g, or t
  misc_feature (3413)..(3413): n is a, c, g, or t
  misc_feature (3464)..(3464): n is a, c, g, or t
  misc_feature (3468)..(3468): n is a, c, g, or t
  misc_feature (3495)..(3495): n is a, c, g, or t
  misc_feature (3637)..(3637): n is a, c, g, or t
  misc_feature (3654)..(3654): n is a, c, g, or t
  misc_feature (3662)..(3662): n is a, c, g, or t
  misc_feature (3665)..(3665): n is a, c, g, or t
  misc_feature (3677)..(3678): n is a, c, g, or t
  misc_feature (3686)..(3686): n is a, c, g, or t
  misc_feature (3689)..(3691): n is a, c, g, or t
  misc_feature (3696)..(3696): n is a, c, g, or t
  misc_feature (3698)..(3714): n is a, c, g, or t
  misc_feature (3720)..(3720): n is a, c, g, or t
  misc_feature (3737)..(3737): n is a, c, g, or t
cccgggatggaaggtgcgccgcagccagaagctggacatgtccgcgcggctggagctgcagtcggccctggaggcggagatccgggccaagcagcttgtccaggaggagctcaggaaggtcaaggacgccaacctcaccttggaaagcaaactaaaggattccgaagccaaaaacagagaattattagaagaaatggaaattttgaagaaaaagatggaagaaaaattcagagcagatactgggctcaaacttccagattttcaggattccatttttgagtatttcaacactgctcctcttgcacatgacctgacatttagaaccagctcagctagtgagcaagaaacacaagctccgaagccagaagcgtccccgtcgatgtctgtggctgcatcagagcagcaggagccaaaagctcaccagttcagcatcaagtccttctccagccctactcagtgcagccactgcacctccctgatggttgggctgatccggcagggctacgcctgcgaggtgtgttcctttgcttgccacgtgtcctgcaaagacggtgccccccaggtgtgcccaatacctcccgagcagtccaagaggcctctgggcgtggacgtgcagcgaggcatcggaacagcctacaaaggccatgtcaaggtcccaaagcccacgggggtgaagaagggatggcagcgcgcatatgcagtcgtctgtgactgcaagctcttcctgtatgatctgcctgaaggaaaatccacccagcctggtgtcattgcgagccaagtcttggatctcagagatgacgagttttccgtgagctcagtcctggcctcagatgtcattcatgctacacgccgagatattccatgtatattcagggtgacggcctctctcttaggtgcaccttctaagaccagctcgctgctcattctgacagaaaatgagaatgaaaagaggaagtgggttgggattctagaaggactccagtccatccttcataaaaaccggctgaggaatcaggtcgtgcatgttcccttggaagcctacgacagctcgctgcctctcatcaaggccatcctgacagctgccatcgtggatgcagacaggattgcagtcggcctagaagaagggctctatgtcatagaggtcacccgagatgtgatcgtccgtgccgctgactgtaagaaggtacaccagatcgagcttgctcccagggagaagatcgtaatcctcctctgtggccggaaccaccatgtgcacctctatccgtggtcgtcccttgatggagcggaaggcagctttgacatcaagcttccggaaaccaaaggctgccagctcatggccacggccacactcaagaggaactctggcacctgcctgtttgtggccgtgaaacggctgatcctttgctatgagatccagagaacgaagccattccacagaaagttcaatgagattgtggctcccggcagcgtgcagtgcctggcggtgctcagggacaggctctgtgtgggctacccttctgggttctgcctgctgagcatccagggggacgggcagcctctaaacctggtaaatcccaatgacccctcgcttgcgttcctctcacaacagtcttttgatgccctttgtgctgtggagctcgaaagcgaggagtacctgctttgcttcagccacatgggactgtacgtggacccgcaaggccggagggcacgcgcgcaggagctcatgtggcctgcggctcctgtcgcctgtagttgcagccccacccacgtcacggtgtacagcgagtatggcgtggacgtctttgatgtgcgcaccatggagtgggtgcagaccatcggcctgcggaggataaggcccctgaactctgaaggcaccctcaacctcctcaactgcgagcctccacgcttgatctacttcaagagcaagttctcgggagcggttctcaacgtgccggacacctccgacaacagcaagaagcagatgctgcgcaccaggagcaaaaggcggttcgtcttcaaggtcccagaggaagagagactgcagcagaggcgagagatgcttagagacccagaattgagatccaaaatgatatccaacccaaccaacttcaaccacgtggcccacatgggcccaggcgacggcatgcaggtgctcatggacctgcctctgagtgctgtgcccccctcccaggaggaaaggccgggccccgctcccaccaacctggctcgccagcctccatccaggaacaagccctacatctcgtggccctcatcaggtggatcggagcctagcgtgactgtgcctctgagaagtatgtctgatccagaccaggactttgacaaagagcctgattcggactccaccaaacactcaactccatcgaatagctccaaccccagcggcccaccgagccccaactccccccacaggagccagctccccctcgaaggcctggagcagccggcctgtgacacctgaagccgccagctcgccacaggggccagggagctggagatggcctccagcgtcagtgccaagactgagcgggccctccagtgttgtccaaggaaatgtagaatcactttgtagatatggagatgaagaagacaaatctttattataatattgatcagttttatgccgcattgttcgtggcagtagaccacatctgttcgtctgcacagctgtgaggcgatgctgttccatctgcacatgaaggacccccatacagcctgtctcccacccctgacaacccgagagggcatatggggccctgccaacaccacttcctcagcagaaacccgtcatgacgcggctgcttcggaagcagacatctggggacacagcctcagtacccagtcttttccctagttcctgaaactttcctaggaccttaagagaatagtaggaggtcctatagcattcccagtgtcactagaattttgaagacaggaaagtggaggttagtctgtggcctttttttcatttagccattgcacagtcagctgcagaagtcctgctgaccacctagtcatggacaaaggcccaggaccagtgacaccctgcgtccctgtgtgcattaagttcattctgggtcgcagccatgaagtgtcaccagtatctactactgtgaagtcagctgtgctgttttccattcgcttccacggcttctgcctcctgccataaaaccagcgagtgtcgtggtgcaggcaggccctgtggcctgctgggctgagggaagtcagagccccagggcgccacgaagcagccactgggatannnnnnnnnnnnnnnnnnnnnnnnnnnnnnnnnnnnnnnnnnnnnnnnnnnnnnnnnnnnnnnntgattagtagcccgtatgatcacgtanacccaccccacacactccggcacactggccccngcccacngnacagcaatcccctgcgcgtggatttcacctcaccctttgtaccagatgttnagtnaccagctctgtggccctgtgtcgtcanaggcttgtgattaactgtggcggcaaacacagcttgtccacagcttgggccaggcttcccctgacctcccaccggtcggctgcttggcaaggctgttcagaacgtgcacttccccaagtcggcactgagtggcccagcaccncctagccctgccacccnacagcccnccngggcccaccccnngaagcgcnccnnnggggngnnnnnnnnnnnnnnnnnaatttnattttcattctttgtanttaattatttaataaaga

SEQ ID NO: 351650 - DNA, 544 bp, Homo Sapiens
  misc_feature (26)..(26): n is a, c, g, or t
  misc_feature (33)..(33): n is a, c, g, or t
  misc_feature (56)..(56): n is a, c, g, or t
  misc_feature (83)..(83): n is a, c, g, or t
  misc_feature (98)..(98): n is a, c, g, or t
  misc_feature (105)..(105): n is a, c, g, or t
tgtcccaaaaagtctgctcccaaacnacccccntcatgaacgggtttcctgctaangaaaatgttcttgccaggacccccatnatgcctctcgggttnttcaacngtggaaaaacaggctgtaatgggggtccctccatgtgcaagatggaaacaaccatcgcctcaaaagctgtgcaagacgaaacaagatgtggtctactgcccacgaacaatgcggcataaaactgatcaatattataataaagatttgtcttcttcatctccatatctacaaagtgattctacatttccttggacaacactggagggcccgctcagtcttggcactgacgctggaggccatctccagctccctggcccctgtggcgagctggcggcttcaggtgtcacaggccggctgctccaggccttcgagggggagctggctcctgtggggggagttggggctcggtgggccgctggggttggagctattcgatggagttgagtgtttggtggagtccgaatcaggctctttgtcaaagtcctggctgatcagacat

SEQ ID NO: 351651 - DNA, 559 bp, Homo Sapiens
  misc_feature (28)..(28): n is a, c, g, or t
  misc_feature (38)..(38): n is a, c, g, or t
  misc_feature (44)..(53): n is a, c, g, or t
gaagcagcaactgggatacccaaaacangaccagcctngccagnnnnnnnnnnccaccagtcctgcccccgcatggagcccccgtgattagtagcccgtatgatcacgtagacccacccaacacactcctgcacactggccccggcccacggcacagcaatcccctgcgcgtggatttcacctcaccctttgtaccagatgttgagtgaccagctctgtggccctgtgtcgtcagaggcttgtgattaactgtggcggcagacacagcttgtccacagcttgggccaggcttcccctgtcctcccaccggtcggctgcttggcaaggctgttcaggacgtgcacttccccaagtcggcactgagtggcccagcaccgcctagccctgccaccccactgccctcctgggccttctgctggatgggcacctggggggttctggtttttacttttttaatgtaagtctcagtctttgtaattaattattgaattgtgagaacatttttgaacaatttacctgtcaataaagcagaagacggcagttttaaagttaaaaaaaa

SEQ ID NO: 351652 - DNA, 824 bp, Homo Sapiens
  misc_feature (199)..(290): n is a, c, g, or t
agacctgtggtaaagtgctggcagagctgccggcttccccttgaaggaataggagtagacctgctgaactatcacatgagagaagaggcccaaaagcttgcacactacagtcaagctggcccttaaagagatggacctagaagatgctgagccagatgtactcaattacttctccaaaattcatcaattagaactgctnnnnnnnnnnnnnnnnnnnnnnnnnnnnnnnnnnnnnnnnnnnnnnnnnnnnnnnnnnnnnnnnnnnnnnnnnnnnnnnnnnnnnnnnnnnnatacaacatgtttaagaccacagaacatctgcataggctgtaaatttcgttgaatgatggatgcaaagatggaagacagatggatagaggaaaagacagaatcagatactggatgagttagtactgctgcctgtgcttcagagctgtcttattaccacaaggccggcaagcatcaatgtccccacatccccctctgcctccccctgaaatgtaccgatttatatgaaaattaagattacaaattaaagcctggctatcctggagttttccagttcatcagccatccaataaaaatgatgtcaagcctgtatgcataattcccggaagattactttcgtccttacagctaagccctgtccctgatatgaaagatctctatccacttttattgaaataaagaactaacatcataatcccaatattgaggtataatcttcattatctcctgaccctcttgaggttcccccaatctatattacttcagatttggtttatgtgtaatccttatgtatttacttttattgagataggatt

SEQ ID NO: 351653 - DNA, 289 bp, Homo Sapiens
  misc_feature (203)..(203): n is a, c, g, or t
agccgaagccggaaggttgaaggaggtctggagattgaaggggaaactgaggctaactgtggcccacgccgagttgtatccagggacccagttcagcctcaggcttgctatttgccagcaggccctgggcccgtcaccagtaactaccttcacctccagcctccgctcctgagaacgacaggaggtaaaggtagttacaggtnacccaccaagttatcctttaaaactctgctccccgaatgttcatagagactgatttgagtaatgattaaaactctggtctcccacc

SEQ ID NO: 351654 - DNA, 1173 bp, Homo Sapiens
tgacctctgcatttatcttcaaataccctaattttaaaacaaaagaacaagaaaagtttataacaccatgttcactaaaaccacggttgaatcttgggtgtgggcatcctttcgagtgttgtccataagagcagttcgtggaattttgcccatctgacccatattatcagcttattctgccaccagagtaggagtctaataaattccaaagtttttatttgctccatggtgtatgttctgactttgaaaatgtcagattctataatcatacccctaacatccaggaaacaaatgacagattatctttaaactgaaattgactctacaatgcaacccttaatgctgaatggattaaaaaagtcagcccttttagtatctgtttgaaagggccgtaaaaagttgacacttttgttgttgtggatcctgcgtgtctagacccacgtgttgtttccatcgtatactgtagggtgcaccccttgggattcatcattaagaactgaggctcactgttgtcagaaacaaagctccccaccccccaggttcaaccttgtgggagaactgttgagccatgagaatgttcctagactccagaggtactaaaatttgttacccacatcattgccttcctttcctacaggacgaattgaggcttaaactttactgttaatgatactggttcattttaatgtgcttgttggtatgttgcctatttttcatttcatagctttcaaaaatcatgctaattgtatacttgtctagtttaaggctattttaaaatatgtacaatactattcacagcatttagttcgtttaatttttattataaagcaatctactaaaaaagtacaactgtatttgaacttttcaatagttgtttgtgagctatgataatcaaaagtcattaaagtcttttttaacaaacattcgtgcttacttttcaacataattcccagttatatacagaaaaagatttccacctgtcacgtatctgcctcttttacctgagcaatggtgtagttcttagacctaaggtctgtaattgcaatacttttaaagaaagatgttgctctaagtgctgtttgttagttatgaaatcagatttttctgcttgttcttaatgctgtggtcaaaccatagcacaaaatcattaaaaataatcagcggcaaaaaaaa

SEQ ID NO: 351655 - DNA, 1686 bp, Homo Sapiens
ccttttctggttcagttcccttgtcctgatctcatcctctctggtctcccaataactcacccttgggatgtgtttagagcgtgggaggtgcctttgagaactgcttgactccatgatctcctagaacaaaaccgccctgactttacagggggaacactcatgctgagctgagaaagcagagaagtggcgtgggagccagctgggggtgaagagcatttgggccagtcccgtggcccccttcagattcctcaagcaggattgttctgttctaaaaagctgttgcacagcattcgcaatgagatctttagttggcggattttctggaacatttgtttttcaacttgtcccgacattttttttctgtttctattctgagagagagatgatcaagttttaatttgggtataggttaaatggaagaagaaacagaacttcatggccaaagtagacctatagattttgattgggttctttgttaacagtagaatgcgatctttgccactgactgtactattaataaggttttaatgtgagatattcctgcaaaccatcccatttctactgattgtaagtcagaatttcttttatccctttcaaatcagtttctacatgtttaagtgttcagggcttcatcagcatgagaagtttgtaattactgaaagtctgatttcattcaggacacatttttttccttcatattttttctgtgaatttataggctaggaaggctattgaagcctcaattatgggtcttcattttgagatcgttttctatgagctgaactgaggatatcaatggttatctcaaaatcgtcttttaggagatccccaattgactcagagtttgaggagttagtatcacagaattagatttttttaaagcatttgtacggttccattcccaaatatggtagctgtgggttcttgaaaacacatcctacattgcatatgggcatagcagtttttgacccaggcagaataagttaatatttaattaaatattgctttgaagatggcgctctgggcatgagcatggggctccatgacttcccttctatccccatgagcccctcctccatccagcgacaagccatgggcatgcatacaatgcagcaagaccaacacaagagcaatattgaattgttcattctatctaaaattacatgtatataaaatatataatttatcttcctgcatttttgaagtataaagtcataaattgtacatatctgtaagctagtatatttgtttcactgtttgtaatatttaagaaatgctcattctttgtagaacaaaaatgtattaaatattttaaaaattgctctgtgatacttaatttttttccccaaaatttgtaatgtgttgcttctacataagttctctggaaatatctacaactaataggacacatgtaaatccttgaagacacatcctggaattcataccccacaaggacagtgtgtatacaaagtatttgcagagcatgacttttatatgtgtgggatatcaatgtgtatatttatatttaaagtgtatttattgttacaagtctattctctattatattttatttactctgcggttataaaaatcacccttgcatacaagtttctagttgccagtgatgttctggaaataatgggagatattacaataaagctacagttatgacaccctgaaaaaaaa

SEQ ID NO: 351656 - DNA, 437 bp, Homo Sapiens
  misc_feature (421)..(421): n is a, c, g, or t
gctgaactgaggatatcaatggttatctcaaaatcgtcttttaggagatccccaattgactcagagtttgaggagttagtatcacagaattagatttttttaaagcatttgtacgtttccattcccaaatatgtagctgtggttcttgaaaacacatcctacattgcatatgggcatagcagtttttgacccaggcagaataagttaatatttaattaaatattgctttgaagatggcgctctgggcatgagcatggggctccatgacttcccttctatccccatgaggcccctcctccatccaggcgacaagccatggggcatggcattacaatggcaggcaaggacccaacacaaggaggcaatatttgaatttgtttcatttctattcttaaaatttaacatgtattattaaattatnttaattttttctttcc

SEQ ID NO: 351657 - DNA, 909 bp, Homo Sapiens
  misc_feature (144)..(227): n is a, c, g, or t
atataatcaaatttattacatacaaataaaacttattatataaaaatttgttttaaatgattggacaaaaaggtatggtctaatggtaataaactgggggaacttggcaaacttgttagtaaacttggaaaagtaaactatctnnnnnnnnnnnnnnnnnnnnnnnnnnnnnnnnnnnnnnnnnnnnnnnnnnnnnnnnnnnnnnnnnnnnnnnnnnnnnnnnnnnntaaaccatttgagaaatactggccacatggggaaacttttactgtttatctaaaggacaggcagacatggaaatgcagggaatatgtcaagtaagaaaaataagcagtgacgcatgtgccctgactttaaatgtatgtagaacaacaacagttgttcaacagtctcaaattgaatgagactattcaactggatctattcagaaacatatgaactgtccctttctgtttcatttccgtgggcttatgttagtgtagaagcctgagtacatttgctgtgggcagacatgtaaattctttagcccatgggaagctgtagagaagaaagtaggattgagtactgcctcctgatcatctcccaggactggattaccaatagccagtctgtctatgcccatgttctgtcatgtgccaagcaggggcagaaaaaaaatatatatatttctatcaattcacattataattataaatcaattcacattataatataaatataaatataaagccaaaatgttcttggcctttgtaggggagaaaaaactttttcctctaccaacttttgttatttcaataggagcctgcaaattaaactgaaaaaaagacattagtaagagaaaagagcttatttatgcggacaatgttcgcacatgtgggagtgttccgtgatgagtaactgaaaagtgtg

SEQ ID NO: 351658 - DNA, 314 bp, Homo Sapiens
  misc_feature (29)..(29): n is a, c, g, or t
  misc_feature (100)..(100): n is a, c, g, or t
ctattaaaataacattttaaaaaacctgnttatttcatattttaaaaaagcaaagcttaccgactaaaacaattttgccattttggtttagtgctgtagnaaagacataatttcacccttataaaagcttattctaattataaaggaatttagtaaagcacatcatgctttgctacaatttacaaattaaactcatataggggtagaatattaatataataaatttctcctctaaatttttttcaaaaagagtaaaatactttgatgcctttgatttacattaacgatgcaagtaatattcactcacagaaaac

SEQ ID NO: 351659 - DNA, 874 bp, Homo Sapiens
tggtacggccggaatcgtaggatcaagggcgggcagaagttggaaacatgcggctgtcggtcgctgcagcgatctcccatggccgcgtatttcgccgtatgggcctcggtcccgagtcccgcatccatctgttgcggaacttgctcacagggctggtgcggcacgaacgcatcgaggcaccatgggcgcgtgtggacgaaatgaggggctacgcggagaagctcatcgactatgggaagctgggagacactaacgaacgagccatgcgcatggctgacttctggctcacagagaaggatttgatcccaaagctgtttcaagtactggcccctcggtacaaagatcaaactgggggctacacaagaatgctgcagatcccaaatcggagtttggatcgggccaagatggcagtgatcgagtataaagggaattgcctcccacccctgcctctgcctcgcagagacagccaccttacactcctaaaccagctgctgcagggtttgcggcaggacctcaggcaaagccaggaagcaagcaaccacagctcccacacagctcaaacaccagggatttaactggatctgaagagtctgcagcccttaatcagtacccatgatcacaggcctttggagcacttttactctctgagaagaactggagctagagatgtaaaatggacagtcttgatggggttgagaaccttctggggagccagatgaccctctctttgcacaatagataaaagtctttatatgaatatatatttatttatttagtttttccttcctgtgggatttctggagaatgagaattatccaaatgctcagtctacctgagatagtaaattcatggcttatgcttctggtccttaaaa

SEQ ID NO: 351660 - DNA, 623 bp, Homo Sapiens
  misc_feature (39)..(39): n is a, c, g, or t
  misc_feature (157)..(157): n is a, c, g, or t
  misc_feature (488)..(488): n is a, c, g, or t
  misc_feature (523)..(523): n is a, c, g, or t
  misc_feature (548)..(548): n is a, c, g, or t
  misc_feature (553)..(553): n is a, c, g, or t
  misc_feature (602)..(602): n is a, c, g, or t
  misc_feature (609)..(609): n is a, c, g, or t
ggacaacaagagtcagctggtgcagaaggtgcggagaanaatcggctgcggcatccagctgacgcgggaggtggatggtgtgtgggtgtacaaccgcagcagttaccccatcttcatcaagtccgccacactggacaacccggactccaggacgctnttggtacacaaggtgttccccggtttctccatcaaggctttcgactacgagaaggcgtacagcctgcagcggcccaatgaccacgagtttatgcagcagccgtggacgggctttaccgtgcagatcagctttgtgaagggctggggccagtgctacacccgccagttcatcagcagctgcccgtgctggctagaggtcatcttcaacagccggtagccgcgtgcggaggggacagagcgtgactgagcaggccacacttcaaactactttgctgcttaatattttcctcctgagtgcttgcttttcatgcaaactctttggtcggtttttnttttgtttgttggtttggtttcttcttctcgtccncgtttgtgttccgtttttgtttcgnctttnagaaatagcttatgaaaaaaatttttggggtttttttggaagaaggggnaggtatntccggaaggcaacc

SEQ ID NO: 351661 - DNA, 1173 bp, Homo Sapiens
  misc_feature (815)..(1073): n is a, c, g, or t
aagtgtataaatgaaattgttgcttcttctccgatacaattttgattgggtgagcattatttgcttttacaataatgctttgttttttgcattgcattgcactaacctgtccattaatacaaacagaaaaagaaggtggaggacgtgcccagccgcttggtcagcgtgccgaacctcgtctcctatgcaaagaactttctgagttggcgatctgagttccacgattaatgcccctccaataactacatcacccagcttggaccccaagccccagctgtgctcggacctacaaacccaaccagtctacagatgcaaaaactgccacaaggtttgggggatgttggggacagggccccttattctatttccctgtagataagaggggaagtaggattctttctagcacctggtaccaaattccagaaggccttttttcatggatgattagacaagggacactgaatcacttacctgaaaacttcagcatgggttatacaaaaggtggactccatctggcctggaggtctgaattcaaattacagtcttcctcattcttagctctgtggccttggacaggtcacttgacctctccaggtctccatataccttgcctttaaaattaagataatacagcacctatctcatcagactgacgtgagactaaaggaattaatccataggatgtgcttagcacaggacttggcacaaaaatcttcaatatagtttcagtattattactaacattattcctcaagatttactctatcaccttggaattctaaagtctcttaatcgggccgggcttggtggctcannnnnnnnnnnnnnnnnnnnnnnnnnnnnnnnnnnnnnnnnnnnnnnnnnnnnnnnnnnnnnnnnnnnnnnnnnnnnnnnnnnnnnnnnnnnnnnnnnnnnnnnnnnnnnnnnnnnnnnnnnnnnnnnnnnnnnnnnnnnnnnnnnnnnnnnnnnnnnnnnnnnnnnnnnnnnnnnnnnnnnnnnnnnnnnnnnnnnnnnnnnnnnnnnnnnnnnnnnnnnnnnnnnnnnnnnnnnnnnnnnnnnnnnnnnnnnnnnnntcacaaaaaataaaaacaaagtctcttgatctgtaggtttggttaatcctgcattattagagctacaaccactaagtctcaaaggaacaatggagaaccc

SEQ ID NO: 351662 - DNA, 546 bp, Homo Sapiens
  misc_feature (18)..(18): n is a, c, g, or t
  misc_feature (105)..(105): n is a, c, g, or t
gtccctggccaacctccntgaaaaaagccttctggatttggtaccggtgctagaagaatcctaattcccctcttatctacagggaaattggaattagggcccctntcccccaacatcccccccaaaccttgtggccagtttttgccatctgtagacttggttgggttttgttaggtcccggcccacaagctggggcttgggttcccaagctgggtgatgtagttattggaggggcattaatcctggaactcagatcgcccactcagaaagttctttgcataggaggcgaggttcggcacgctgaccacgcggctgggcacgtcctccaccttctttttctgtttgtattaatggacaggttagtgcaatgcaatgcaaaaaacaaagcattattgtaaaagcaaataatgctcacccaatcaaaattgtatcggagaagaagcaacaatttcatttatacacttacatgctattttttaaagcacttttccctccaatcttcattttgtattataaataaatatgtatgttcacaacctcttaacc

SEQ ID NO: 351663 - DNA, 1806 bp, Homo Sapiens
attcccgggatccttgctcgaactgtgggacttaccctactatggtccgagcctaccctatttcattatactcaagtaacgccccagaaattccagagaatctcacacaaagaggttgagtcttgccgtggtgccttcaggggaatgtcatcccgggctagaagagctgcaaaaggctgtcaggcttctcagaactttgcttctccagcagaataatcctgcggaagactgagcagttcttgtgagtgtaaaaccatggcccatgcattggtgacgttcagggatgtggctatagacttctctcagaaggaatgggagtgcctggacactacccagaggaaattgtacagagatgtgatgttggagaattataataacttggtctcactgggatattctggctcaaagccagatgtgattaccttactggagcaagggaaagagccctgcgtggtggcgagggatgtgacaggaagacagtgccccggtttgttatccaggcataagaccaagaaattatcttcagaaaaggacattcatgaaatcagtttatccaaagagagtataatagaaaaaagtaaaactcttcgtctgaaaggatccatttttagaaatgagtggcagaacaaaagtgagtttgagggtcaacagggcacttaaagaaagatctatcagtcaaaagaaaatcgtctctaaaaaaatgtcaactgatagaaaacgtccctcttttactctgaatcagagaattcacaatagtgagaaaagctgtgactcacacttggttcaacatgggaaaatagattctgatgtgaaacatgattgtaaagaatgtgggagtacttttaataatgtctatcagcttactctccatcagaaaattcatactggtgaaaaatcctgtaaatgtgagaaatgtgggaaagtttttagtcatagctatcaacttactctgcatcagagatttcatactggtgagaaaccctatgaatgtcaagaatgtgggaagacctttactctttacccacaacttaatcgacatcagaaaattcacactggtaaaaaaccctatatgtgtaagaaatgtgataagggtttttttagtagattagaacttactcaacataaaagaattcatactggtaagaaatcttatgaatgtaaagaatgtggaaaagtttttcaacttattttctactttaaagaacatgagagaattcatacaggtaagaaaccctatgaatgtaaggagtgtgggaaagcttttagtgtatgcggacaacttacccgtcatcagaaaattcatactggtgtaaaaccctacgaatgtaaggaatgtggaaagacctttagacttagtttttaccttactgaacacagaagaactcatgcaggtaagaaaccttatgaatgtaaggagtgtgggaaatcatttaatgtgcgtggacagcttaatcggcataaaacaatccatactggtataaaaccttttgcatgtaaggtgtgtgagaaggcttttagttatagtggtgacctcagagtacattctagaattcatactggagagaaaccatatgaatgtaaggaatgcgggaaagcctttatgcttcgttcagtccttactgaacatcagagacttcatactggtgtgaagccctacgaatgtaaggaatgtgggaagacctttcgagttcgttctcaaattagtctacataagaaaattcatactgatgtgaagccctacaaatgtgtacgatgtggggaagacctttagatttggtttctaccttactgaacaccagaggaatt

SEQ ID NO: 351664 - DNA, 1513 bp, Homo Sapiens
acaactccggacaacttctaaagagcacttctaactgctcaaagtcttgagaagggaaagattttagcaaggctaggaaaataaaaatgcaacagcacattgtccagaaaccctagacaaccatgcaaaaaggaatgagccaaaaagtcttagctttgtaagacttgaaaggaaaaaaacacacatttaaaactcctacataaaatgagctaatgggcagagccgaaactacagctccgtgtgaagagacggcagtgaagctggcctggggccgggccactcattctggaggggcttgttccagtgtgaatgcagcaagggatgttccatcttgggggtgcacgaggctcggctgagacccatcctccgggaaccttcacgcggcctagtgggaggcataggctgggctccacagccctgagggagggctggctttgcgagcaggaggcaatgcattgggagatgtgggtgatgaggcagcgaaatagtgggggctgtgtccagggctggctcgaggcgtgagggctgcaggcacagcaagatcccggggcgtgcagacagtgtggtaggctatgatcatgaccgctgtcccagccaacagggcgaagagcgtgaagaacatgacctggtaggaatccaggaagtgctggaagaggctggctccataaggaccgggcccacggcgatccatcacaaaagccactgtcactgggatggcaatggcttggttggtcacgggggctggagaaggtcagggtagtggacagaggcccttggctgccagccgcggggtccgagacgccgaccgtgtatgtgatgaagctgggccacccaaaagacttctcctttgcgaatgccagcacggccggggacccggatttcacctccaagttctccagaacctccggggcaccaaagaccctgatctcggaactggtgtagtggttgctcaaaaggatttcagcctggtcggcgaagagacctgggctgaagggcacctcggcccccacctgctctgtggagaagtggctgctggagagggaggcactgaccaccagagctgtcttcttcatgctcaggtgcttccgctgcttgtccgtcagcctgtgcattgtgattgagcagaagtactggccgagagcagtgtcaaactgtggctccacggtgaacacatcttgagatgggaaatcaaagacggccggcttgaactgggactggcagctgatgagggtctctgggtgcaaggcctggatgacttccctctgggtgggggtgcactcgcctctcaggttagagcttctgtctcccacggcaacaatcactttggaggctgtagcctcctggaagctggtctggatggggtggaggtgacgggccatgatcctctgagggacgctgaccaccacctccttgtaggtcctcaggtgcccagcgacctcatagtaaaccgtcacggatcccacggcccgggccacagccacacccgtcttggggtcgatgtggaggatgctgc

SEQ ID NO: 351665 - DNA, 459 bp, Homo Sapiens
  misc_feature (59)..(59): n is a, c, g, or t
  misc_feature (405)..(405): n is a, c, g, or t
  misc_feature (429)..(429): n is a, c, g, or t
  misc_feature (439)..(439): n is a, c, g, or t
gtattagtgaagaggcacacaattagcgtattgttcctttctgtattgtgctgagaggntccaagggattggtgggggaacaggcaagccaggcatcaccgtggatgttgaagaagggggttactcaaacctcggcatcttcacttgctcgatctggaattacagctatttattacgaagcactctgtgtggcttagtggagtgtgtctgaggaaacacatcccggacaccacttagggttagtctttctgagctcttcacatctctgactaattatcatcattaccatggagcccaacagtcccaaaaaagatacagtttgccgtgcctgtattccagagtcagattgcacctggaagcagcagagcagatcagggaaaagaagacctacaccagcatcacttntggattctcaatggaggcataacnccccaggaantaggatggacaagagggggg

SEQ ID NO: 351666 - DNA, 980 bp, Homo Sapiens
cctggatacgtcggctcatgtccccgaagcttcctgctgctccaccttgtaaaaatgctgcctttgggaatcttcgaaatatgtacacagagaaaatcacatgaaggagacctggggtccccacttgtgagtgcaactgcaagtaactctggctagagagacacatgtgtcttgtgtcaaggcaggaggataacccggatgaccttctgaggtctcttcagcccttttcgctagtggtcacccaccaccatggttacttgccagcaacatctctattgctggatggtccctgtctataaccttgggctagtatattttttccaatatgggaccttagtcttactactgatgagttctatgggtctcttgctagggggtaaggatttttattcttgggcttatagagccagttagatcataattcttatgaaatagagagtgtcctaaatatcactgaaataaaaagtaggaaaaagaagcttgaattttaagactgaggctgctctgcagattctagtttggctttcagagttcaagagtggtggcatcttcacctgaattcttcaatgccagggtaataaaccaaaatagtcctaatcagtatatgctagttgagcatcggcataattttctttcctctggctgatcccagccctaaaggaagggtagacccgtgtctttccagccctaaaggaagggtagacccgtgtctttccagccctaaaggaagggcagacccgtgtctttccatgcccgagggccacgacgtcactatgcagggcacacgtggcttggtttaaaaaggtcatcttagatttatcttagtaaatgtaataaattattttttagatcttgaaatttataataaaaatactttacctaccctgatcaccaaaacctgatgttttaaatgtgctttctctatgaaaccatatgttttcaaataaaatctccataaagcaatatttaaaaattggtca

SEQ ID NO: 351667 - DNA, 497 bp, Homo Sapiens
cctcctccaaccaatctccttcaccccttcaaagcctacttgcaaaaagcttcaagccagatggatctggattccaagagaagcatctgcctaatatatttaaagaactaaaatattccctatccatttctttgccagctcttttttcctctccccatcctcctaccaccaacactaaaggtttggctctgcctatgagaggtgggaatgagattccccatcatgtcctcagggcacgacgaaactcagagtgataatgggttactttttctttccttgagaatccccagaaaatgagggaagaaaaaagatgggtggaagatttgggcaaacaattaaaggaggacaaactaatatttgctgaatgggaaaaagggatgggaagatcattcgtaaatgcaaataagagccacaattaattttcagagaaaattatgtttaaaaagccaaaatagttaagttggaatcatctccaagaagctaaaaccatgctgaat

SEQ ID NO: 351668 - DNA, 625 bp, Homo Sapiens
tcacctaggggactgcctctgtgcctctccccaggaagcatccagggcagaggaagccacatctcccggtgcccccaaccccagctgcagcctcctccccctgagcattcattctctccaccaggcctccaggtcctgagcccttcctctgtaaaagtgtcaaaccacctccctcagcacttccccatcacaacaacctatgtcactgactcagatgcagggtctgctcaccccaacacatgccttccctccccagccacaccgtgcacgaagggggcacaggagaggagaggggctgtgccccaggctccccatttcccagctcctcacagaggcctggtttgctcagtcttctgaactccagggaccagccctggtgggcatggggtggggagcagggagttgcccttcccctccctcgggaagccacctaagaatgtttacatgccaaacagaatgtaacacccctccccaagcccttcccagtcactgcatggcctctgcccatcctgcacctgtccaccccaccccaacaccctggaagccactgtcaatgattagatcgggtctcggaagggaagtagccatcacaccattaaaaagcctgtgggaccttttaaaaaaa

SEQ ID NO: 351669 - DNA, 478 bp, Homo Sapiens
  misc_feature (19)..(19): n is a, c, g, or t
  misc_feature (27)..(27): n is a, c, g, or t
  misc_feature (33)..(33): n is a, c, g, or t
  misc_feature (175)..(175): n is a, c, g, or t
aaaccttactggcaacttngcactgcnaccaanaaagccctgccttgctgccttcaccctgaaaaatttaataccctgcaagcccaggccaacttcccctcacttaaccaccccataccagtcacctcctgctccttttcctcttttgtgaaaagatgggggctggagggggcanagtggcctgtgagcaagagcccaggggtgtcccagtcccagcctctggggcagagcttgtagccctggatggcctctggggcaggaccactagctaagcaagccaggagaagacccctgcccaagtggctcttgggacaacgtgctgcttacactccaggtgtggaaccggccgcagcccccactgacctgcccatgtccagagggactggacagccagggcagggctttggggggcactagaagatgagggtgtcggctgtgaggcgggtggctggtataaataatatttatcttttcaacc

SEQ ID NO: 351670 - DNA, 413 bp, Homo Sapiens
  misc_feature (21)..(21): n is a, c, g, or t
  misc_feature (253)..(253): n is a, c, g, or t
acttccccctaactttaaccnacccccacacccagtcaccctccctgctcccttttccctcttttgtgaaaaaaatgggggctggaagggggcaaaagtggccctgtgaagcaaagagcccaggggtgtccccagtcccagcctctggggcagagcttgtagccctggatggcctctggggcaggaccactagctaagcaagcccaggagaagacccctgcccaagtggctcttgggacaacgtgctgcttanactcccaggtgtggaaccggccgcagcccccactgacctgcccatgtccagagggactggacagccagggcagggctttggggggcactagaagatgagggtgtcggctgtgaggcgggtggctggtataaataatatttatcttttcaaccaaaaaaaa

SEQ ID NO: 351671 - DNA, 1653 bp, Homo Sapiens
  misc_feature (1077)..(1077): n is a, c, g, or t
  misc_feature (1087)..(1087): n is a, c, g, or t
  misc_feature (1093)..(1093): n is a, c, g, or t
  misc_feature (1096)..(1096): n is a, c, g, or t
  misc_feature (1100)..(1140): n is a, c, g, or t
  misc_feature (1158)..(1158): n is a, c, g, or t
  misc_feature (1164)..(1164): n is a, c, g, or t
  misc_feature (1169)..(1171): n is a, c, g, or t
  misc_feature (1180)..(1180): n is a, c, g, or t
  misc_feature (1182)..(1182): n is a, c, g, or t
  misc_feature (1187)..(1187): n is a, c, g, or t
  misc_feature (1191)..(1191): n is a, c, g, or t
  misc_feature (1243)..(1244): n is a, c, g, or t
  misc_feature (1255)..(1256): n is a, c, g, or t
  misc_feature (1264)..(1265): n is a, c, g, or t
  misc_feature (1276)..(1277): n is a, c, g, or t
  misc_feature (1282)..(1282): n is a, c, g, or t
  misc_feature (1286)..(1286): n is a, c, g, or t
  misc_feature (1290)..(1290): n is a, c, g, or t
  misc_feature (1310)..(1311): n is a, c, g, or t
  misc_feature (1331)..(1331): n is a, c, g, or t
  misc_feature (1334)..(1334): n is a, c, g, or t
  misc_feature (1341)..(1341): n is a, c, g, or t
  misc_feature (1350)..(1351): n is a, c, g, or t
  misc_feature (1361)..(1361): n is a, c, g, or t
  misc_feature (1377)..(1377): n is a, c, g, or t
  misc_feature (1386)..(1386): n is a, c, g, or t
  misc_feature (1389)..(1389): n is a, c, g, or t
  misc_feature (1394)..(1396): n is a, c, g, or t
  misc_feature (1400)..(1400): n is a, c, g, or t
  misc_feature (1420)..(1420): n is a, c, g, or t
  misc_feature (1424)..(1424): n is a, c, g, or t
  misc_feature (1444)..(1445): n is a, c, g, or t
  misc_feature (1471)..(1471): n is a, c, g, or t
  misc_feature (1499)..(1499): n is a, c, g, or t
  misc_feature (1531)..(1531): n is a, c, g, or t
  misc_feature (1533)..(1533): n is a, c, g, or t
  misc_feature (1537)..(1537): n is a, c, g, or t
  misc_feature (1539)..(1539): n is a, c, g, or t
  misc_feature (1544)..(1544): n is a, c, g, or t
  misc_feature (1553)..(1554): n is a, c, g, or t
  misc_feature (1556)..(1556): n is a, c, g, or t
  misc_feature (1561)..(1561): n is a, c, g, or t
  misc_feature (1563)..(1564): n is a, c, g, or t
  misc_feature (1573)..(1573): n is a, c, g, or t
  misc_feature (1578)..(1578): n is a, c, g, or t
  misc_feature (1583)..(1583): n is a, c, g, or t
  misc_feature (1585)..(1587): n is a, c, g, or t
  misc_feature (1589)..(1589): n is a, c, g, or t
  misc_feature (1600)..(1600): n is a, c, g, or t
  misc_feature (1602)..(1605): n is a, c, g, or t
  misc_feature (1611)..(1613): n is a, c, g, or t
agcggggtttccgctggcttccggtcccctgagactggggcctcgctcgctcccgacccggttgcaagtgttgcggtgggagaaagtcgcgtccgcatcggaggggaagcgccgtcatgcctaagtattatgaggacaagccgcagggcggcgcgtgcgcgggcctgaaggaggacctgggcgcgtgtctgctgcagtcggactgtgtggtccaggaaggaaaatcacctcggcagtgtttgaaggaaggatactgcaactctttgaagtacgcattttttgagtgtaaaagatcagtgttggataacagggcaagattcagaggaagaaaaggatattgatgcattatgttgaagccaacatggaaaacaacaaatattttccctggtcattaacacaaagaagccaaaacaggaaacatactttttactacatctgtttggttggaccagatttcccctccgtggaacactgaagaaagtggatgagttgttttcgaatatgtataaagtaaatgattctcttgatccaagttatttttagaagaaaaacctaattgaacaggtatgggttgggagcataataaatgtgttttgagaattgttctaaagcacagaaaatggaaagactgttatttgcaaacttgactcttcaattgaattacccaattagtacaggccactgatttgactgacacagtcgataacatgcagcctatccagaaggtgtctgttgggaaagtttaggataaaactttttctttagttcagtcttttcctgtctagttctaaaatgaattgtgtttgattccttagagaagaaatacttcatttgtgctctgattcactgaagtaataacctcagcactttaatagcgtccacaggcatagctgatgctaggccccagattgtgttgcccaggctctttaccatcatcttcggactgtttttgtttcctggtttcattttcagtctggcccgctctacataatgggccagtgtcagctccaagtccacatccttactatccatgattcaaaagggagagagagaacttcctttttcagcgcccacaanccaaacccanaaaagnacnccgnnnnnnnnnnnnnnnnnnnnnnnnnnnnnnnnnnnnnnnnngtggaagaggggacgggnccccgngaccnnncccaccccngncccanccanccgcactgccatcgctaacccctgtcagaatcacatggatgaaaagtgggcnnaaacccaaaannaaaggggnncagagcaagannaaacnacanaagnacaccaaagaaagcaagaannaaaaccaagaagcggggganganaagccanacaggaatnntattctgatnacttaatacagtagantcaaacagnaanccaannncccnaccttattatttttggcacngaanaattacaaagaattctagcnnctttatacctccgtggttcactgganttaatgcaatcggggcgttgtacagctnacttgagtttttaaaggttctactaaaaagtnanaatncnacagnaatatgggnnantgtcncnnaatatcacnaagcnctgtngnnnanaccccctttcncnnnnaaagannnaataatagtttttttcaatgtatatatatataagtgatct

SEQ ID NO: 351672 - DNA, 515 bp, Homo Sapiens
ggcctgggctatctatctgcactgtcattgctaactcctgtcagaatcacatggatgagtagtgggctgaatcccaaaaggaaaggggtttagagcaagtggaaacaacagatgttcactatagaaagcaagaatgaaaaccatgaagtggttgaagattagccttacagtaattttattctgatcacttaatacagtagagtcaaacaggaatccaagtttccaactttattatttttggcactgaagaattacaaagaactctagcgtctttatacctccgtggttcactggagttaaagcaatcggggcgttgtacagctcacttgagtttttaaaggttctactaaaaagtgagaattccacagcaatatgggtcattgttgcagaatatcacaaaggtctgttgtgtatactccttttcaccaggaaagggacaataatagtttttttcaatgtatatatatataagtgatctaactttttattaataaaagtaaacaaatctaaaatgt

SEQ ID NO: 351673 - DNA, 451 bp, Homo Sapiens
  misc_feature (14)..(14): n is a, c, g, or t
  misc_feature (32)..(32): n is a, c, g, or t
  misc_feature (46)..(46): n is a, c, g, or t
  misc_feature (80)..(80): n is a, c, g, or t
  misc_feature (87)..(87): n is a, c, g, or t
  misc_feature (279)..(279): n is a, c, g, or t
  misc_feature (361)..(361): n is a, c, g, or t
aaaggggtttaganccaagtggaaaacaacgntgttccactaaggnaaagcaagaatgaaaaccccatgaaagtggttgnaagattnagcccctacagtaaattttaattctggatcacttaatacagtagagtcaaacaggaatcccaagtttcccaactttattatttttggcactgaagaattacaaagaactcctagcgtctttatacctccgtggttcactggagttaaagcaatcggggcgttgtacagtctcacttgagtttttaaaggttnctactaaaaagtgagaattccacagcaatatgggtcattgttgcagaatatcacaaaggtctgttgtgtatactccttttcnccaggaaagggacaataatagtttttttcaatgtatatatatataagtgatctaactttttattaataaaagtaaacaactctaaaatgt

SEQ ID NO: 351674 - DNA, 556 bp, Homo Sapiens
  misc_feature (459)..(459): n is a, c, g, or t
  misc_feature (465)..(465): n is a, c, g, or t
  misc_feature (490)..(490): n is a, c, g, or t
  misc_feature (496)..(496): n is a, c, g, or t
  misc_feature (502)..(502): n is a, c, g, or t
  misc_feature (511)..(511): n is a, c, g, or t
  misc_feature (529)..(529): n is a, c, g, or t
  misc_feature (541)..(541): n is a, c, g, or t
tgctgcagtcggactgtgtggtccaggaaggaaaatcacctcggcagtgtttgaaggaaggatactgcaactctttgaagtacgcattttttgagtgtaaaagatcagtgttggataacagggcaagattcagaggaagaaaaggatattgatgcattatgttgaagccaacatggaaaacaacaaatattttccctggtcattaacacaaagaagccaaaacaggaaacatactttttactacatctgtttggttggaccagatttcccctccgtgggaacactgaaggaaagtgggatgagttgttttcggaatatgtattaaagtaaatgattctcttgatcccaagttattttttaggaaggaaaaacctaattggaacagggtatggggttgggggagccttattaaatgttgttttttgaggatttgtttcttaaaggcacaggaaattgggnaagacngtttattttggcaaacttggactcnttccanttgganttacccccntttggtacagggccctgnttttggactggncacattccgttattg

SEQ ID NO: 351675 - DNA, 1474 bp, Homo Sapiens
aaccccacattttagtttccttttggggagaaagaggagggccgtggaagaaaaggggtgtgcagctagagcgttattatgtctttctcagcggcaggcatgccgcctctccaccttctccccgccaggcacaggagccagcagctggagcgtgctctgagtttcaggggaccccccacccagactgactggggcttctgggacttctcataggaagagtcaagacctcctgcgcttctttaaaaggtgatgggctcagtgttcccagtggcatctggaggtgaagccggtactgtctcaggagtggaaggcaatggcccactggcctttttctcccccacgtcacagtccccatttgctggagcccttgagggggccaccgaaactgtggctctcattcagcctcccaaagtgttgcactactgaatactcctttctgtttacaccagcagtgaatagagtcatgaaaagaacatattatatgcaatggcttgatgcttagtgtggcaatcaaaagcttgcctgggcagatgtaggcaggggctagacaatagtcatggagttgtcaccaggtcactgtctctctccttccccttccagatctctactgtcccctgcagccaccacaagggctaagctgttgaatgagccccttggtttttccttataaacgcaatgacttacttgtgattcttggtctaatcccaggctaagaaacaaaacaaaagcttgtgatctgacccattcctttgctgccttccttctctttcaggcacctggacgtatttagtattctgccatgtgccttgcccaggggagggagaagtttctagcaaatgtggctttctgtctgctgcctggtgcttttatagtacttcatctgctttttattgttgttgttgtgtgttttaaccaaaatggcatttgtttggctgtcattgtcgagtatatatttattgtgttttacaaacatgagtatatatgtatgtatatgtataaaaccaaacttatatatataagaagtcaaggcatgtatactagatattttaaagagttatttatcaagggaaaaagatgtgtgttataaagtaaacagagtctatattttctatataatgtagatagtcaaacatagcttataaattataggaggttttggttttcttttttattattaaaggaccaacacagaagaaaacaaaaagacaatgaatgcaactgttcttagtgtttttaaggccaaactactgtggaagctgggaggcggccctccctgcgggcctccagcagccctgtgcctggccgctaggagctccagagctgatgcccgttgtgatctctgcgatgctcgatgctcggagccagcggtcagcatcactcagccagctggcctgtgccgctctgacgtggcttccagctgttctccgcaatttgcattggtgggataaaggaataaaaggataaataaagattt

SEQ ID NO: 351676 - DNA, 420 bp, Homo Sapiens
  misc_feature (202)..(202): n is a, c, g, or t
tgacaaccccatagtttcgaaattttgtttctgcaatccgcagctttgggaagcactgaattacaaaacctgaaaaccctcatatatgtggcggcttagaggccggcctaggctggagcggaggtcttgggaagcgctgggccgctcgtaaagtcaatggtgagtctcccggctttcggctttcggctttcggcggcagcgngttgtgaggttccacgggcaaagccagccagagggttgacagaaataactggataaatctgtgcccctgcccctgccggctcacacggctgcagcccacggctggagccaaaaataaccgcgcagttgacgccacggtttctttagcgtcttgctggagacattgactttcagagcccctgtcccgccttccattccccactacttggcagcccaccg

SEQ ID NO: 351677 - DNA, 847 bp, Homo Sapiens
tgtatcccgtgacttcccttaagttcatcaccaacatgataaggaccactttctatctgcagctcctcttgtcatgattctggccacaatgatcgccccggtctgttcatccttcttaatggtagctcccagtggttctctatttttgaccaagacggattatttttactgagtcttcctcatcgtcaatatcttcaggcataggaggcaacactgggtcgtaattcttctgagccacagtatcatgtacagagagcaaagccttcacattgggttttgacagtagtttcaacagctctctgatctcactgtttaatggcttgttctgaagctcttcggccagatcatcggccaaggccgccgcaccatggagaatgggcaccggactctgcttctcatagtagtgtagtttttcatgaatctttaccaatgaatgcaggcttttttcaccaaacatatcccagaggaaggtcaggtcttcctggctatccacatgtggctgcagctgggctggcagagcagccaacagctcatacagaccagtgtcactcccagatcccgttgacaaagctggcatgatgcaaggtgtaggaacaggtcagcccaccgctctccggacaccctgccttcggacagccacagggaattccaattcaacagcctgcagccacgttgtctaccaagatctgtatattttgtaagccgtttcagccaggaattcagttcagcaactgccaagactgctatacctttctttctcttcacaatgaggcttttggccttggcagaagctaaattttgttcaaagcctaggagaacctgctgtttatgaacattcctgtaaaag

SEQ ID NO: 351678 - DNA, 978 bp, Homo Sapiens
  misc_feature (17)..(17): n is a, c, g, or t
  misc_feature (53)..(53): n is a, c, g, or t
  misc_feature (62)..(62): n is a, c, g, or t
  misc_feature (108)..(108): n is a, c, g, or t
  misc_feature (144)..(144): n is a, c, g, or t
ctgcaactgaaacaaanactgaaaaagggaaacccctggcctgcctgtaaaanactttgggntgtggggctgggtaaggcaagaaccaaaacttggggaacctgttangggtaatgggggtaaaccgctggtcaagtggaacantttaactggtaatcccagggggaacgcccctggtgccatccataagccctgccccaggcccatgcccctgctgatgccccaggtgagtcatggtgtgggtcaaattggaggtactgttgcccccactcaggctagggtaggctgtctcttcagggtccaggggggtgggcagtggtgggggaaagtgcaggttggtgaggtcaggtagggagccccccgtgttcatggcaggtgggaggacaggcacattggcaggctggtcaggagatggaaagatgttaattccagggacttcacaggaccgaggtcgggaagaggatgaggatagcttcttagcatcccatggcttcagcaaatgcttgtcatctagcaagttctcctcaatagcaggtacttgaaagagaaagactttggggtccatttcaccatccagaatacccccacgtcggctgggcaggatgctgggaggtgtggggcctgggtaggtatcctggggactggggttcatcacacttgtatgaagggcagagtcagagcttgtcctgttaagtgcagatggtagtcgaaacaactgccccttctctgcagggaaattgccccaggccaccgtccttcgccagctagactctgggggaggagataagtaggcaggactatagggagagctgtcaatgtggcgggtgtatcggcgaagtggggacaccattcttcgaggatctcgctgcacccgttccaccagcccatggtgccgagtgctccgagatgaatccaaaggtgagtggaggggctccgacgcgtggtcgacgatatcccggaactccggaccgtacagcc

SEQ ID NO: 351679 - DNA, 908 bp, Homo Sapiens
  misc_feature (100)..(100): n is a, c, g, or t
  misc_feature (127)..(127): n is a, c, g, or t
aaggcatccccccattggcttccaggcaaaatgcttggtccattctagccaaagttccttcctcaaatagccagggtactttgaaaagagaaaagacttntggggtcccatttcacccatcccaganataccccccacgtcgggctgggcagggatgcctgggaggtgtggggccctgggtaggtatcctggggactggggttcatcacacttgtatgaagggcagagtcagagcttgtcctgttaagtgcagatggtagtcgaaacaactgccccttctctgcagggaaattgccccaggccatcgtccttcgccagctagactctgggggaggagataagtaggcaggactatagggagagctgtcaatgtggcgggtgtatcggcgaagtggggacaccattcttcgaggatctcgctgcacccgttccaccagcccatggtgccgagtgctccgagatgaatccaaaggtgagtggagggggctctggaactcggccaggccagagccaatctggttaacattgggcagagacccaccataatgagagctccttgtgtatgccagtcgcagtttttgggcctgtaaccgggtggagccgatgtccatcatcacctcctcgaaggccgccgtctcctcggcctgacgctgcttctgcagcgcaatcttctcactaaatttgcgcggattggaagccgaggccgtggccgaaccaggcccgttcgcccccgacgtcgccatcttccttccccgtccctccctgccaccctcccagtaccagccgcggcctccgccgcggcctcggcccggctcctccagccgtagccaccgccgcctcagctagcgccgcgaacccggccccagcctagccctgacctgttgcgcgcgggggccgccgggcccgct

SEQ ID NO: 351680 - DNA, 1250 bp, Homo Sapiens
  misc_feature (58)..(58): n is a, c, g, or t
  misc_feature (390)..(390): n is a, c, g, or t
  misc_feature (640)..(640): n is a, c, g, or t
  misc_feature (646)..(646): n is a, c, g, or t
  misc_feature (650)..(650): n is a, c, g, or t
  misc_feature (692)..(703): n is a, c, g, or t
cccgggatcggggcaggaggcacgcgcgcggctgaggcgaggtcgctcggcgcactgnttgcggggccatggcggggaccgcgctcaagaggctgatggccgagtacaaacaattaacactgaatcctccggaaggaattgtagcaggccccatgaatgaagagaacttttttgaatgggaggcattgatcatgggcccagaagacacctgctttgagtttggtgtttttcctgccatcctgagtttcccacttgattacccgttaagtcccccaaagatgagatttacctgtgagatgtttcatcccaacatctaccctgatgggagagtctgcatttccatcctccacgcgccaggcgatgaccccatgggctacgagagcagcgcgnagggtgggagtcctgtgcagagtgtggagaagatcctgctgtcggtggtgagcatgctggcagagcccaatgacgaaagtggagctaacgtggatgcgtccaaaatgtggcgcgatgaccggggagcagttctataagattgccaagcagatcgtccagaagtctctgggactgtgagacctggcctcgcacaggcgcacacacaccgccaagcagctcagcattctcccccggcacacttagtgacagngatgcnctgngctggtaccaaacaaggcagacttgcaagaaccacggcatcnnnnnnnnnnnncaaacctttcctacttcaaacaggcttctcttctgaaatgatgacttaatgtcgaatattgacagcttactgcagttttacagtattcctcacaaagggcttcaggtagattatcagagctgtcagcactacctctccccgctgaaaccagcagttcatggcttcctgtggattccctccctccctggagtgttgagggggttgtacctgccagacttccaggggacgatggaatacccagaacgctccttctgaagaaatggggccctgtagctgcagcacaggggaagggcccggcaccctttctgggtccttcctggttccctgtgggccccatgaggagtccattacttcctttcttccttcatattttacaggcagatgcttttcccttataatctaattacatcttttcatttgttatatattacaaaccatcacacttagaaatacttccaggaaatgcttttttgaagtgtgaattaataagaaatggggtaaatagaaaagaaatttattgctgattggcccaggtgcggtggttcgt

SEQ ID NO: 351681 - DNA, 899 bp, Homo Sapiens
  misc_feature (815)..(851): n is a, c, g, or t
  misc_feature (863)..(863): n is a, c, g, or t
caaactccaaattgacacaagcaccacttccagaagagaaccctgttggaaataggaaaggtttgaaaaataaaaaagatgccgtggttcttgcaagtctgccttgtttggtaccagcacagagcatcactgtcactaagtgtgccgggggagaatgctgagctgcttggcggtgtgtgtgcgcctgtgcgaggccaggtctcacagtcccagagacttctggacgatctgcttggcaatcttatagaactgctcccggtcatcgcgccacattttggacgcatccacgttagctccactttcgtcattgggctctgccagcatgctcaccaccgacagcaggatcttctccacactctgcacaggactccaccgctccgcgctgctctcgtagcccatggggtcatcgcctggcgcgtggaggatggaaatgcagactctcccatcagggtagatgttgggatgaaacatctcacaggtaaatctcatctttgggggacttaacgggtaatcaagtgggaaactcaggatggcaggaaaaacaccaaactcaaagcaggtgtcttctgggcccatgatcaatgcctcccattcaaaaaagttctcttcattcatggggcctgctacaattccttccggaggattcagtgttaattgtttgtactcggccatcagcctcttgagcgcggtccccgccatggccccgcaacagctgcgccgagcgacctcgcctcagccgcgcgcgtgcctcctgccccgacaccggggaccgctccgctctcgacgaattcgagctcggccgatttggcctgatnnnnnnnnnnnnnnnnnnnnnnnnnnnnnnnnnnnnnccgccaccgcgnttaatccagtcgccctatagtgagtcgtatacatcc

SEQ ID NO: 351682 - DNA, 386 bp, Homo Sapiens
cggggcaggaggcacgcgcgcggctgaggcgaggtcgctcggccagtgtttgcggggccatggcggggaccggctcaagaggctgatggccaagtacaaacccttgagaacgtgcagtgagagcttgaggaagaaggcctgacttgctgctgcggaattaggagggaaaagtgtatgcgttaaaaggggaaaggctcgttggtggagctttgaaaggtcagattttggctttccctctaatgaaggaaaagggtttttgaacagtgccacctgtcactcctcctaggtagtgttgaggaaacctctttgagtgctttcctacccggtaaattagatatttctaatgtctgaggagagcgaagggagaaatgagaacctagggaaca

SEQ ID NO: 351683 - DNA, 574 bp, Homo Sapiens
  misc_feature (18)..(18): n is a, c, g, or t
ccaaggttccctaaaagncccgtaacgaccaaatacgatgtaacaaaatccttcaaataatcactgggcaagtcaaaaatgaataacaggttcaacatttgaaaatgtccaatccctcttggctgctaactgctgtagccactaaaaattgggctttttcctgagcggaactggtgaagggcctcttctctatccctctgagaacggtctccatggatgctggtacatgcgtatccttcatggtataagaaatcctccagagaatctgcaccctttttggtctccacaaacactaaggtcagtgaatccttgcctgttgcatttaggaggtcaagcagaaatgaccgtttgtctgattcttccacccaaactactttctgtgtgatgttttcagaggtagagccaactcttcctacagccaagaagatatattcatctaagaaatcacgagccagcatctgtatttccttaggaaaagtagcactaaacatcatagtgtggcggacaccctttggaggcatagtatcttgttcgactattctacgaatctgaggctcaaaccccaggcacgagg

SEQ ID NO: 351684 - DNA, 591 bp, Homo Sapiens
ggtcaggaataataaaccaatgagttagctcagggccggtggacatgttcactggtggaccagttggcattgacctaaacggacagagaaatgcacatggaggagaactacgttgaaatcaagatcctatgtctgttgtattttctctttgcctggagtaaatagcattataagtcattccacccttattagataaccaaagcatattggtctcaatagctttctcctgaaaaatgtgattgaatcttacctgtagcagttcactcttaaggttgaaagaactgtcaatatagataaaatccattccttattattattgattggtgtgacatttgaaaatgtgtctaaacaatatttgtaagtaaaagaaccagtcataagcctcaaatgtgttcagtgtgtaccaagctggaatgggagactggcccctcttggctttaaagtagcatgttgtctttttctagcagcttcttcctagtagacattccagggatgggaggggccagggatcatgtcttactcatttctgtatcgccagcccctggcatagtgtctggcttatgttatgtgaataaatgaatgcttgccaag

SEQ ID NO: 351685 - DNA, 544 bp, Homo Sapiens
gcctcttaggacctacgatgccagcagctcccattaacagtgaaatgacagaggccaaagatggccaagtgaagacccaagtctcagaaaacccagacttgggacaactgcctgggaactaggatgctagagcagttctgtaatgctttgagacacagcaattttcacattggccattctttcccctcccctaccccttttcttttgagggacttttaatgtttgctgctttaggtggatggagagtccaccagtcccactcaatgctgctctaactctacccacacccacctaattaggggtgctaataaaacatgctgaggttgagataaagacgggacataaggggaaaattcattccatagagctgaaatctggttttcaaggcctctgtggctttcttctgaacttaccaccagccctggctggaatgtagattgtgtttttagtaatgtgtactgtgagctgtcttctgtataatgtattttgtaatgtatttttctcatctaccaaaggatgaaacaaataaaattatttaaatagt

SEQ ID NO: 351686 - DNA, 566 bp, Homo Sapiens
  misc_feature (524)..(524): n is a, c, g, or t
caaaactgggtcacatggctattcccacaccgatacctagtaagggaaggagagtcatggtgattggctcaggtgttgtaacaaagagggggcatgatttctaggatggtacaaacactggttcatgagctcccgcacacggttcctgagattatgaatcccaaacactgagcacggcgtctaacacatggcagttgcttatccatattgcttccccctttctctgattccctctaagaacacaagactcccagcctggcctctcctgagccagccttccacccctcaatcctggggcttgggtctccaccagtcagtgcctctcccatcctgacctctggctccatcactgccctccctcttatttctatctcaaaagcttggggatgaacaaagatcacttcgttgtcctcagtgacactgggattcctaaaagaataaaagatagggagatgctaggattccttataataaatgcttttcaccaggggaggccaaaaattaattaacaggcatggaacaangggccggggggttttttaaccacttccattccggacaacttg

SEQ ID NO: 351687 - DNA, 787 bp, Homo Sapiens
  misc_feature (710)..(719): n is a, c, g, or t
  misc_feature (747)..(747): n is a, c, g, or t
  misc_feature (760)..(760): n is a, c, g, or t
gggtgccgaaggctatgcactatacgcccaggcattaacagatcaacaacagtttggtaaagctgatgaaatgtatgataaatgtattgatttggaaccagataatgctacaacatatgttcataaaggtttacttcaacttcagtggaagcaagatctggatagaggtttggaacttatcagcaaggctattgaaattgacaataaatgtgattttgcctatgaaaccatgggaactattgaagtacaaagaggaaacatggagaaagccattgacatgttcaacaaagctattaacctggccaaatcggaaatggagatggcccatctgtattcactttgcgatgccgcccatgcccagacagaagttgcaaagaaatacggattaaaaccaccaacattataaaacagggggaaagcagactgaccctctttttaaaagtttaccccctcttcaactgaaccctaaagacactgtcatgaactgtgttgaatggtggaaatcagtatttctgtttgtggtgttgttatttgttacatctgtttcatgtctaggtgttgtgggtgtggctgttgaaggaagtttgcagtcttgcagcttttattccctctggcaacaaaagattagaacatgttaaagggatttttaaataaagttgcaaagagtacaaatgataattggccatgcaaataaaaactgatttgttgannnnnnnnnnaaggggggttggcagttgattatgttcntggatgattccgnctatatatgtgtgaataatgtaagtat

SEQ ID NO: 351688 - DNA, 1431 bp, Homo Sapiens
  misc_feature (1341)..(1341): n is a, c, g, or t
gcctgggtggcgatcaaaacgagggtaggctgcaggctcgtgcagggagggcagcggcgccgcgtcgggagccgccgccgtcccggtcctcccgcccgcccgcccatccggtgcctcctgcagcccgcctgctgggcagggccggcgcggcccggccatggagtcctacgacatcatcgccaaccagcctgtggtcatcgacaacggttcgggggtgattaaagctggctttgcaggagaccagattcccaaatactgtttcccaaactatgtcgggcggccgaagcacatgcgggtgatggctggagccctggagggggacctcttcatcggaccaaaagcagaggagcaccgggggctgctgaccatccgctaccccatggagcacggcgtggtgcgagactggaacgacatggaacgcatctggcagtacgtctactccaaggatcagctgcagaccttctcggaggagcatcctgtgctcctcacggaggccccgctcaacccgagtaagaaccgggagaaggcggcagaggtgttctttgagaccttcaacgtgccggccctgttcatctccatgcaggctgtgctcagtctgtacgcaacaggacgcacgacaggagtggttctagactcaggggacggggtcactcatgctgtgcccatctatgagggctttgccatgcctcactccatcatgcgggtggacattgccggccgcgacgtctcccgctacctccgactcctgctgcgcaaggaaggggttgacttccatacctcggctgagtttgaggttgtccggacaatcaaagagcgagcgtgctacctgtccatcaacccacagaaggatgaggctctggagacggagaaggtgcagtacacgttgccagacggcagcacgcttgatgtggggcctgcacgattccgggcccccgagctgctgttccagccggaccttgtgggggatgagagtgaggggctccatgaggtggtggccttcgccatacacaagtccgacatggacctgcgccggacgctgttcgccaacatcgtgctctcaggtggctcaacgcttttcaaaggcttcggagaccgattactcagtgaagtgaagaagcttgccccaaaggatatcaaaatcaagatctcagccccgcaggaacggctgtactccacatggattggcggctccatcctggcctcgctggacacttttaagaagatgtgggtgtccaaaaaggagtatgaagaggatggctcccgtgctattcatcgcaaaactttctagtgcccaaggaaggccggggcatgttgggaaaaaggggagggaggggaaaacanaacccctttaaccccttttttggccctttggctccgtataactaaggcctttagggcccccctgcatggctgtgaaaaaccccccgctgt

SEQ ID NO: 351689 - DNA, 953 bp, Homo Sapiens
  misc_feature (95)..(179): n is a, c, g, or t
taatttgatacaatattttaaataattttgtgcatgaaacaaagtttcgactgcattttgactgtgatttctggcatgagatcagttatggaatnnnnnnnnnnnnnnnnnnnnnnnnnnnnnnnnnnnnnnnnnnnnnnnnnnnnnnnnnnnnnnnnnnnnnnnnnnnnnnnnnnnnntatatatattttttaatcgacgtgaaattcacgtaacatagaattaaccattttgaagtgaacaatttggttgcattcactgatgttgagcaaccaccacctttaactatttccaaaacattttcatcactccaaaataaatgcctgtacacactaggcagtcactccctatcttcccctccacctgtccgctgggcaaccactggattctcctttttatttctgtgggctttttctattctgggatatttcatataagtggaattacacaatatatgtgggcttttgtgtctggcttcttctgagacagtaggaagggggcttggctttggctcacccccactagagcattttttcatgcattcccactgatcacaaaacccatactactacctcattgacaccatacctgctaacctcgaggctttagtcatacaaagaaaaaggcctttctgtaatgatctcctgtgccctcataatgcttaaaccatgtcttttacttaaacaattcccaggaactggccttaggagatccaaatagggaaccaagattgcagagtgtcccatcttgggagggaatgctgaataattaattgatttacagccttgttgccgctggccagaccaccaggtggcccattactcgagatgatcatcacaaccagatgatgctaacctatatcctctacccttcgcgtgctttgtctgggaagtcttttggccccatgtcagtttctattgcattgagagcccaagagcccctggtcagtcagg

SEQ ID NO: 351690 - DNA, 1352 bp, Homo Sapiens
  misc_feature (1307)..(1307): n is a, c, g, or t
tagacgtgtggaagttgtgtcaaaagcaaattgtgcaaagctaaagcaagggattgctgtacggttccatggagaagaaggcatgggtcaaggtgttgtgcgtgagtggtttgatattctgtccaatgagatagtcaatcctgattatgcattgtttacccagtcagctgatggaacaacttttcagcctaatagcaactcttatgtaaatcctgatcacttgaactattttcggtttgctgggcagatcttgggattagcgttgaaccacaggcagctggtcaatatttacttcacacgatccttctacaagcacattcttggtattcctgtaaattaccaagatgtggcatccattgatccagaatatgcgaaaaatttgcaatggattttagataatgataagtgatctgggtctagaactaactttttctgttgagactgatgtgtttggagcaatggaagaggtgcctttgaaacctgggggtgggagtattcttgtgacacaaaataataaagcggagtacgtccagcttgttactgaacttcgaatgacaagagccattcagcctcagatcaatgcttttttacagggctttcatatgttcattccaccctccctcatacagctttttgatgaatatgaattggagctactgctttctggcatgccagaaattgatgtgagtgattggataaaaaatacagaatacacaagtggctatgaaagagaagatccagttattcagtggttctgggaagttgtagaagacattactcaagaggagagagttcttctcttacagtttgttacgggcagttccaggggtcccacatgggtgggttttgctaatatcatgggtggaagtggattgcaaaactttacaatcgctgctgtgccatatactccaaatcttttaccaacttcaagcacatgcatcaacatgctcaagttacctgaatacccaagtaaagaaatactcaaggacagacttcttgtggcactacattgtggcagctatggttacacaatggcataatgaagtctggaaaactcctctgactactgatgcacaattcagaatggcagaagtaatttgggaaaatgtcaacaaaaaagcagcctaaatgcaacccataggcagggctgatgcttccaatttataaaggatcatcaggttttctgtttctctcttttcccttttatgttttctctgtttgtatacaattaggaaaatataaaatcacagtaggattttattttttaaaaatgcttaactggaagtaataggggactgtcccttttncataattaatttttatccaggttgtatttaggggcaaatctggtt

SEQ ID NO: 351691 - DNA, 1258 bp, Homo Sapiens
  misc_feature (461)..(469): n is a, c, g, or t
  misc_feature (1190)..(1190): n is a, c, g, or t
taaactgcttcccatatctaaggtgaaaatagaaagacatttttaaaagtttaatataaagaatgaaataatttcaggtcaagtttattatacagaaattatattaatgggtgggataaatactttacaggagagggtcacactctcagacactttggctcccaaagggcttggagcttttgtgaggctgagcatcttccaaccaggtgcatgcactggtttgccaacatcctcaccacgcccaatccagccccttcacacactgacatcgcctacctgggccctccttgtggccttaagttttatctaaccagtgtacacaacatatttataaccaattaatacgtgtgagtcatgatttgtttaaaatgtcagcttttgtgaactgaaggggatgggcagaaggcaggatgctgtccttggtcaggaatgtgacccagattttaacactgctcctaggnnnnnnnnntatttccttttatgatgccacttcctgggacatgatgagctgaagattaaaaactcttcagagatgtgcgagaaaaaacaagcccagggaaaagtctgcaggcatggtggaggaagaaattagggatgaaatcgcaagtggcagagcaagcatgaccaggctgaagtcagcagagacaagagggcagcgaggcccagcctcctcttccctctcccacagcgtttagggccacgtccatggcgccacccctctcctttcttcccaactgaaaagggtgccctctttccttcttttctgcagacgctgatgagaatttaaccagaggaacttcctccacagcaactataacaggacatcctcatccagtcctcctatctcatttcctggtggggaaacaggcctggcaaggaaataggccgaaatcacgatttaaaaaatgttgtgtttaagtactctggaaccctgtgttcagaggaaatcgtgcaagaatagatcaatcagagctgatctgatggagacggaggaaccagccacacagaggccctgcattaactgtatttcctgtactcttgatgctctggtatctggggcctcgctgacctggacagactgatcctcccaggctagcaaatcccccaatccctagagatggcaagcatctggctgaaagcatgcctttcctatggaaaccaactaatccggaagcgatggcgccagctgncctccttcacatggctctcccagggtctgtcacaccccaggtccaacattccacctgtccctgaactc

SEQ ID NO: 351692 - DNA, 2325 bp, Homo Sapiens
  misc_feature (222)..(222): n is a, c, g, or t
  misc_feature (230)..(230): n is a, c, g, or t
  misc_feature (1736)..(1766): n is a, c, g, or t
  misc_feature (1836)..(1939): n is a, c, g, or t
ctttgctgtgtcatttctcaagagaatcctgcattttatgtggttgacattcatgttaatatttgatcaacaaagaatgtatcctttcaggtgaattatcagtaatttattcacagggatcagaattgatatgtttttaggagaatggagaggttatggtaactagaatattcccatttgggagctaggtaggctattctcatataccagtgaagcataganagtcaganacctgtgtctttgtaggtttattttcaatgtcttcccctcctcagattgtcatagatgatgcaactatcttaatcctcggagggtgtggcggtcccaatgctctattcaaggatgcttggttgttgcacatgcattctggtccttgggcctggcagccactcaaggtagaaaatgaagagcatggggccccagaactgtggtgccatccagcttgccgggtgggacagtgtgtggtggtcttcagccaggctcctagtgggagagccccactcagccccagtttgaactctcgcccatcacctatcagtgccactcctccagctctcgttcctgaaacccgagagtaccgctctcagtctccagtaagaagcatggatgaagctccttgtgttaacggccgctggggaacactgagacccagggctcaaaggcagactccttcaggttcccgggaagggagcctttccccagccagaggagacggctctcctatcctcaatggtgggagtttgtctccaggaacggcagctgtgggtggctcttctttggacagtcctgtacaggccatatctccaagtactccatctgctcctgaaggatacgacctgaaaataggactttctttggccccccgacgaggatcactaccagatcagaaagatctgagattaggatccatagatctgaattgggatctgaaacccgcttccagtagtaatcccatggatggcatggacaataggacagttgggggaagtatgagacaccctcctgaacagacaaatggtgtgcataccccacctcacgtggccagtgcccttgcaggggccgtctccccaggtgccctgcgtcggagtctggaagccatcaaagcgatgtcccccaaaggcccctcggcctctgcagcactaagtcctcctcttgggtcttctccaggctctcctgggagccagagtttgagcagtggagaaacagtgcccatccctcgcccagggcctgcccaaggagatggacattccttacctcccattgctcgccgcctgggccaccaccctccacagtccctaaatgttggcaaacccctataccagagtatgaactgcaagcccatgcagatgtacgtgctggacattaaagacaccaaggagaaggggcgggtcaaatggaaagtatttaatagcagttctgtggttggacctcctgaaaccagcctgcataccgtggtacaaggcaggggtgaactcatcatatttggaggactcatggacaagaaacagaatgtgaagtactatccaaaaacaaacgccttgtactttgtacgagcaaagagataatgtgttctaaacccctttccttttctgtggcttttaatttggaattttccagtgtgtaagcatttggactgagaattgggaaaacaaaattactcccagaagccaaaactctttaattcccaaccgaagtcactccaggctgggatcaaatctccattaagaaaaaaaatnnnnnnnnnnnnnnnnnnnnnnnnnnnnnnngccaactctgtttgacaaaaaaagggagagatttccatcctggttcagataaagttgttgctgtgttttnnnnnnnnnnnnnnnnnnnnnnnnnnnnnnnnnnnnnnnnnnnnnnnnnnnnnnnnnnnnnnnnnnnnnnnnnnnnnnnnnnnnnnnnnnnnnnnnnnnnnnnngataggaagaaaagcgccgcacacacacaaacaggaggaacacactacccggccgggccccggacaacaaatcaatgaaaaaagatcgagcactaggagcggccgagaccgatcaacacaaaaaccaacgcgaaatggagaaaaggcacagctcgaagccagagaacaacaagcaagaagcggcccacagtcaaaatcaaggaagaagaggacagacacacacatacggcgccccgcacaacggcaggacggcggccgccctaacaacgacaaacaacacatcacacaggaccgcaaccgcccagacccccacgacgcgaaacgtaagacccatatctacacgccaaaagcagagccgaagaccaacacccaagatcctccaagag

SEQ ID NO: 351693 - DNA, 750 bp, Homo Sapiens
tgagacctaatttgtgacatgtcagtagcatcatcttttgacacacaggaggtcatggtcatttcattcctactcttcaggagacactgctgaacagaggaatgattctgttccttgtgtgcttacttccttaacatttatacattgttttaagaaaaaacttttaaaaatatttcttatagtctcctaacatttgtctctagcctttgcctttgtacaatcacagatatcctatggagatttaaggatgaaagccctgagttgttcttgggttcttggatctggactacttgttatcttatgcttctcacttctggctaaaacttgcacctcttcttctcttagctaagccccaaaatgaagatttccttcagaagtcttgttagcagaattatttatcagtcacagagagaaaaatctgctatttttctaagtaagagtctcgagaagcagagtttttgtcttgtcattgagaggagtcagcagtcttgttctgtaaaggaccagagatggtaaatactgtcccactcagctctgctgggcgcagtacagcagcagcagccccagcacagctgtgttcctgcggagtcccctttacaaagccgctgacccctgatgtgaaactttgtagagcagcagagtggctgcgtgaaacgggaggctggcaggtcctcagataggttctgcagtgttacctgtcacttggaggcagccaacacttctggacattgcatccttattcacacatgt

SEQ ID NO: 351694 - DNA, 278 bp, Homo Sapiens
atagcacagattcctttgccccttttatctccttatctggatatgataagtggttatgagggtctcactaactattttgtgtttaccttttatatgtgtaaaactttgcagtagcatttaaagtgtaatttatttttctatcaagtgcactattcatttagtgtgttccagttttatatgacttgtattagaaacactgcactgagttgtttgtacactgaaatgagaactctagatgtaactctattcaaataaaccttcgtgagacattcaaaaaa

SEQ ID NO: 351695 - DNA, 1410 bp, Homo Sapiens
  misc_feature (59)..(59): n is a, c, g, or t
  misc_feature (61)..(61): n is a, c, g, or t
  misc_feature (293)..(293): n is a, c, g, or t
  misc_feature (339)..(339): n is a, c, g, or t
  misc_feature (343)..(351): n is a, c, g, or t
  misc_feature (384)..(384): n is a, c, g, or t
  misc_feature (430)..(430): n is a, c, g, or t
  misc_feature (493)..(493): n is a, c, g, or t
  misc_feature (515)..(515): n is a, c, g, or t
  misc_feature (519)..(519): n is a, c, g, or t
  misc_feature (528)..(544): n is a, c, g, or t
tttcttcttgttcccgtcccccgagaggaaggggggagaaaggggagggagaagaaagnanattgaatgtttcaagaaggtttatttaaatagagttacatgtagaggtttccattccagggtacaaaacaattcagtggagggtttttaaatacagtcaatataaaactggaacaccataaaaggaatagtgcacttgatagaaaaaataaattaccacttaaaatggtactggaaagttttacacatataaaaggtaaccacaaaatagttagtgagaccttcataaccanttatcatatccagataaggagataaaaggggcaaaggaatctgtgntatnnnnnnnnntctctttgaagaggagaaatcctgacaagtaantgaatgatcatctcaagcaatgtggtgacatagggacttacagatngtatcttttagaactgggaaggaatcatagctttaccaatgtgttaacacaacccagttcagntcagggcaaatttttataattnaggngggggtgcnnnnnnnnnnnnnnnnnaatatgtaggaaaagtttccaactttcttctgaccactgaagaggtacagtgtttaaatttccgagaaaagaaaaaggacaaataatctagaaatgtgtcttcttcagtctgcagaagaccccaggtctccaagcaaccacatggtcaagggcatgaataattaaaagttggtgggaactcacaaagaccctcagagctgagacacccacaacagtgggagctcacaaagaccctcagagctgagacacccacaacagtgggagctcacaaagaccctcagagctgagacacccacaacagcacctcgttcagctgccacatgtgtgaataaggatgcaatgtccagaagtgttggctgcctccaagtgacaggtaacactgcagaacctatctgaggacctgccagcctcccgtttcacgcagccactctgctgctctacaaagtttcacatcaggggtcagcggctttgtaaaggggactccgcaggaacacagctgtcccttctccaacctcagcccagtctcaccagcctgcttctcacccactatcatctccaacctttccctttgaacccatcaaggatgccggcacacatgcctctctcttctcaagagacagacatctccccttccctacctgccacattcgtagaccacctcagccctgcctctccccaccacactgttctcaggggagcagaacaggaagagctgttacagcagctctgcgcatggcagcagcagcagctatgacaggaaaccaatccccaacacgcatttaatctgtcggggccaattcagcattcaagtatgaacttccgtgtttgccacttcatgtcagggcatgagacaaagtttcctctcc

SEQ ID NO: 351696 - DNA, 705 bp, Homo Sapiens
  misc_feature (663)..(663): n is a, c, g, or t
gggaaggggagatgtctgtctcttgagaagagagaggcatgtgtgccggcatccttgatgggttcaaagagaaaggttggagatgatagtgggtgagaagcaggctggtgagactgggctgaggttggagaaggggcagccgggggcactgctgagggtttgccgtgcacgcctcggacggagcacggtggggtggcggggagcagatagtgctgcctccctgcgggcagacaggagaggaacctcaactcagtccatttcatagccctgataggggaagtgggagttgacaggatggtttaaaataagacgtgaaggtttcagttacctgctctagactttgcctgagaacttgtaaattaatcagtgagacctaatttgtgacatgtcagtagcatcatcttttgacacacaggaggtcatggtcatttcattcctactcttcaggagacactgctgaacagaggaatgattctgttccttgtgtgcttacttccttaacatttatacattgttttaagaaaaaacttttaaaaatatttcttatagtctcctaacatttgtctctagcctttgcctttgtacaatcacagatatcctatggaggatttaaggatgaaagccctgagttgttcttggggttcttgggatctgggactactntgttatccttatggcttctcacttctgggctaaaacctggca

SEQ ID NO: 351697 - DNA, 1332 bp, Homo Sapiens
  misc_feature (42)..(42): n is a, c, g, or t
  misc_feature (195)..(195): n is a, c, g, or t
  misc_feature (1006)..(1006): n is a, c, g, or t
acgggttcattgattggtttgaaaaccagacagacggccgtnagcaccacgcccagccaagatgaactccttaaggacaggatttggtaagtgattgacttctttttagttccatgatcttgagattatttttagctttataaatttagcagtcgcagggcccgtggagaatcaggttaatgaggtaaaggcttntctgggtatttcctgccaaggccacatcaccaattttctcgatttaaaaaactgtcaagagatttatttttccattgcaggttttaaagtggagattctgaagtggaaaataggtactgtcagaacaaagctacctggaaacagcatagagtgaagcctttcgtgagggcttgcaggccgctgctgagtggcagtttacagaagaggtcgcggggtgagcctcttagcaggacagaaaacaaggcagcagcgcacctgccacccattcacgagctgctccttgagcctaaaaagtaggctttattcatcccttctgttcatttaccaacctgggggattgatacgaccggggaaaatgttcctaaaccaggaagctgcgttagccgatcaggctttgtaagatctcgccaacagctagctgcttaggagtacccccacgatacgcacagcacaccactgtcccttcactgcactttcttcctgccttaggtagttgggcttgcccaccctagtttgcttttgtagtggtttggcaaggttagaaggcctcggcctctctgtcatgctgggaagtgcctactctctgggccactgctgcagaggccgtggcacttgtcatgggtttggaagacccagccatctgcagcagaggcagcctatcccattgcaaggagaggaactgaacggagtaattattctactcttctttttacataaatgtttatttaaatattctaaattggattttctttcacagatactgattattctttccagttcttaaataaaactgcacttgatttcactcccncgacagggagcgcgacagcaaacacccgagcgcacaaaaaccagacccaacacttcccgaccacaccacccacacgaaagccacaaggcggggcggcagagtcaccaacacactcagcgttatcaacatcacaccttatgtgcgcggcgtccccactatcgtacccaggcactccgaggcctcccccctgcgcactgaagcgagtcgccggcataccctgccccttgggttcaaccgagaagaccccggagtccacacctagcccccgttcagggaatgataagcactcacgtggctctagtaagaaccacccgcgcaacctcatc

SEQ ID NO: 351698 - DNA, 429 bp, Homo Sapiens
agttctaatcattgatgatagcttggaaataaataaattatgccatggcatttgacagttcattattcctataagaattaaattgagtttagagagaatggtggtgttgagctgattattaacagttactgaaatcaaatatttatttgttacattattccatttgtattttaggtttccttttacattctttttatatgcattctgacattacatattttttaagactatggaaataatttaaagatttaagctctggtggatgattatctgctaagtaagtctgaaaatgtaatattttgataatactgtaatatacctgtcacacaaatgcttttctaatgttttaaccttgagtattgcagttgctgctttgtacagaggttactgcaataaaggaagtggattcattaaacctatttaatgtcc

SEQ ID NO: 351699 - DNA, 2161 bp, Homo Sapiens
  misc_feature (897)..(897): n is a, c, g, or t
  misc_feature (902)..(904): n is a, c, g, or t
  misc_feature (912)..(912): n is a, c, g, or t
  misc_feature (951)..(1017): n is a, c, g, or t
  misc_feature (1571)..(1580): n is a, c, g, or t
ggcccgcggggagcgaaaaaaaagagagcggggggaacgaccccccggggcggcccaaggccaccgggatcgggccaaccgcgggaaagggggccccaggaagggaaaaggtctccccaaccccctgggagacctaatgagccccaagggcgggaccagaggaccggcctcagactgaacccgtggacagcccaaccaggcctttgcacctagggcccaagtctgctatgagaagaagggccgcaactggacccaaacaccaatgccccacggcaaccatgcttaccaaaccgcctgcccctttgcgggggctgggctaaccggcgagcatggctgcgtccgcctcattttccagggcccgctggattaggctccctggggccccctgctgctgtgcccacctgcccacccaggtccccacctcctgcagcccagagggagctctgcatgtgggacactccctgctggcacagccacaccagatggacatgttggatgggctgtgcccttccccccaactgtggccccccaaggaggtccccaagatctccaccccagtcatgctgatggggccttcagcaccagctctgtcctgggtcgatggaggaaagcccagccccatggccttgcccttcctggggcatcccacatcgtgccgccgacactgtgtgcccctgggggagtgaaggggccaggggcctttgacccccagcttaggctggctatgccctgagcctgccaacccagtttcagacactcatccttcatccttcctgctgccgccctgggttcctctataaacctcgctgctcagctgcccccacaagtcccacatgccccgcatgcgtgcaatgcctccagcccccaagtgagtggtgggtgggtggcaggatgggnctagnnntgtgctgntggccactatgggctcgactctgtgcttagtggtgtctnnnnnnnnnnnnnnnnnnnnnnnnnnnnnnnnnnnnnnnnnnnnnnnnnnnnnnnnnnnnnnnnnnntgttgacaaatggcaacacggcttcatgcgtgccaggatcagagtacaaatcaggctgtgacaggcctcactcggtaatggaaaagtaagggaggcttcacggaggaggtgtcataggagctcagcctcaacggctgctcggatccctccgagtccacaagatgggaagcaagtccacaagatgggaagcgtgctctatacagaagggagggcctgtgcacaggctcaggtgtcagtaagccagaaatccagggacagagtcaggatggctggagcatggactgcggggggaacagagaagggggtggagcaaaaggttgggaccatgtgaccagggaagatgctggatggaggattctgaacctcatttgtggacggtcaggagtcaacaaagggaggagagaggactcactggtcaagagtgtcggctgtgacacaagggccatcatccctgaatgccctaccatgtgccccgcactgtgctgatgatgataataataactacgcccaccccactttcacacctccacccgttatatccttgtccagcccgnnnnnnnnnntcccagaacgctttctaagacccattccgggttgggccgcgcggggcccccgttcaacgtcaaactgaaaccctggctccacaccccttggattccccagagggagcaccccgggggctcaatggaccatcaggcggcctctggcgattctcttccagcgcgaagtaaaacgaaacccccaccccgcggggggcggcttacccctggggagggcgggcttcttttggacaccaataagctcgctcggccattggtgcgcctccctctgcgacggcgcaacgtttaaccgggggcatcctctctcacagcgccgtggcgcgttgctcgagatgcgaacgccctccgggctattcctcgattttccgcggcgccccgcgcctttcgggcctagtccgcttggcgccgttcactcggggccccggagctccaggcccccgcgcctgctccccgcactaacctttagttaatcccccttctccccacatccgggtgatcgtaatcgcaactccggcgagagttgtgcgccgccgcggtcgtcacccaatccgtcttgtgccgctcctcgtgtgactaaccgctaa

SEQ ID NO: 351700 - DNA, 500 bp, Homo Sapiens
aggttcacaaggatgggaagcaagtccacaagatgggaagcgtgctctatacagaagggagtggcctgtgcacaggctcaggtgtcagtaagccagaaatccagtgacagagtcagtgatggctggagcatggactgcggggggaacagagaagggggtggagcaaaaggttgggaccatgtgaccagggaagatgctggatggaggattctgaacctcatttgtggactgggcaggagcctgccaacccagtttcatgacgactcatccttcatccttcctgctgcgcgccctgggttcctctataaacctcgctgctcagcttgcccccacaagtcccacatgccccgcatgcgtgcaatgcctccagcccccaagtgagtggtgggtgggtggcaggctgagcctagcacttgctgatagccactatgggctcgactctgtgctaagtggaatctggagacacagaggcaatcagacctggttccccccctggtgga

SEQ ID NO: 351701 - DNA, 345 bp, Homo Sapiens
cagagctgggatggaggcagggcccagaagcttcgggacccagagtctccatgccagcagctgagacccctgcccaggctcaggacacagtccgtctgcaggagcagttgctgatactcactgaggttggtcaagacagctggcaggggcagccccacaggaaagggaatctgggcattagctgaaccaggccatgcccatctgtaccagggggcagaggcaagggagcctgggccccattcctgggggattccaatgtagggcaaggggctctaggggcacagaggaaaggagaatgaccaggagagaaagattctagcagggcgtccacacagtgacactcca

SEQ ID NO: 351702 - DNA, 753 bp, Homo Sapiens
attttccagcttagaatttttattaaaacaatcatttaagttataatcgttccccagaatagaaaatagccttctatgatctggccctgataggaggcaggactcgggccctacaggaagaagtgacgtttgacatctttgaaaatggatggcgcttccctgaaagccctggaggggctggcttgggcccagggtcactgggccaggctgtctccctgccaacgctgctccctccaggggtggtgaggccccaccctgtcagtgaggaacacttagacactgcagctggttgtcagtctctgggcttttgacaaaaaaagagagggaaagagagaaacctgtccccaaaattacaagacacagccactcaagaagtgttatgtaatgccacggggtgctatctagcagggcctggcaggtacatgaataatagggtggacaacacaggttggggggactgctgtggctgaggtggggccttgatcaggatgaacgaagccatctgtgccacacagctgcacacggctactggccaaaaggacagcctcacggacatcatgagctgggcagtgacctcatgaatggtcccggtgctgtggggcttctgcctgagagccagcagaagggctcgtaatgaaaccaccatggtcaggacgctgctctttgggcttgagacttccttacttgacaaactcccaggccctaaaatgttcgcttaaaaaggacgcagtctggccaagcgcggtggctcat

SEQ ID NO: 351703 - DNA, 597 bp, Homo Sapiens
gcctgccagggctgggaggagggggcacaggagcgccggctgtggggatggtgtttctcccgccgggggtggctggctcaccctggcactgcaccgcagtgggggtggaccggatgccgctgaactgcctggactttcaagaggtaaattccgagctctgctctgaggcctgaccgtccctggccgccaagtgtctgctgactgaaagctccagctccggagaggtgcccagtacctggtgagcagagggacctgaaggagcaggtgcctcttcctcagacatctgcagtcacttcacagtgaatgaggctccagccgggtgccctgagaagtggccaacaccctacccaagaggagaccgcacagccacggccaacgtggagctctaactcagggctccagcctccagcccagtccttttccttgagtagggacgacccccacagcggcctctctgcattgcttaggtggggagcacatgtggtgaagatgggcagcctgcaggtgcctgctacacgtgggggccacggccgatggaaagctcagtcatgagtgaaaacagaggaagtgtttctgaaaatataacaagtcagtggg

SEQ ID NO: 351704 - DNA, 2005 bp, Homo Sapiens
aaggcggtacggtccggaattccgggatatgtcgacccacgcgtcgcccacgcgtcgggaggaggaggaggcggctcgggagtcggctgcccgcccggccgtggggcctgcgctctggcgcctgccggaggagctgctgctgctcatctgctcctacctggacatgcgggccctcggccgcctggcccaggtgtgccgctggctgcggcgcttcaccagctgcgatctgctctggcgccggatagcccgggcctcgctcaactccggcttcacgcggctcggcaccgacctgatgaccagtgtcccagtgaaggaacgagtgaaggtgtctcagaactggagactggggcgctgccgagaggggattctgctgaagtggagatgcagtcagatgccctggatgcagctagaggatgattctctgtacatatcccaggctaatttcatcctggcctaccagttccgtccagatggtgccagcttgaatcgtcggcctctgggagtctttgctgggcatgatgaggacgtttgccactttgtgctggccaactcgcatattgttagtgcaggaggggatgggaagattggcattcataagattcacagcaccttcactgtcaagtactcggctcatgaacaggaggtgaactgtgtggattgcaaagggggcatcattgtgagtggctccagggacaggacggccaaggtgtggcctttggcctcaggccggctggggcagtgcttacacaccatccagactgaagaccgagtctggtccattgctatcagcccattactcagctcttttgtgacagggacggcttgttgcgggcacttctcacccctgagaatctgggacctcaacagtgggcagctgatgacacacttgggcagtgactttcccccaggggctggggtgctggatgtcatgtatgagtcccctttcacactgctgtcctgtggctatgacacctatgttcgctactgggacctccgcaccagcgtccggaaatgtgtcatggagtgggaggagccccacgacagcaccctgtactgcctgcagacagatggcaaccacctgctggccacaggttcctcctactacggtgttgtacggctgtgggaccggcgtcaaagggcctgcctgcacgccttcccgctgacgtcgactcccctcagcagccctgtgtactgcctgcgtctcaccaccaagcatctctatgctgccctgtcttacaacctccacgtcctggattttcaaaacccatgaccgtcagggccacccctgcctctgggccagggaaaccagctactcagggacttctcttgcctggagggtgcagtgatagctcctcctcactgccccactgtgctcctgggcctgtgaccccagtgctcaggcaccttgcactagaggcttctgactcctgggactttggagcttaccagagatgcagtccctcccaggaacctgttggagaggcaggacctgctgctttagagtgcggctgaacccgggccttgcgtccctgtttggccagagcaaggatctggcctggagaggcccatcctataccccttattagagccatgacagcctacagagtgaggtgaggtgctcccaccttcccagatggttcctttctgccccttcctggaaggaaaggtgaggctgccaatagcctcctggcaccagccagacctcacccttgaccaacctctcggggctgggggttcattcctggggcactgtggcctggttttgctttgaaaccaagaaagagcaaagggaacccagcagttctgagtgagttctgagccagccctacctcaggctggctgttgagacatgctacaattttcatttttgtaaaaataaagcttgattgttcacagatctggttcctcactggctgagtagtcctagcaggctccaggagaagggaacagcagacccaagctcagggttgtatggtgctgctgaaaccgacaagaccagcctcat

SEQ ID NO: 351705 - DNA, 1045 bp, Homo Sapiens
  misc_feature (55)..(55): n is a, c, g, or t
  misc_feature (122)..(122): n is a, c, g, or t
  misc_feature (1027)..(1027): n is a, c, g, or t
aacatagaagctgaagtattataggataacagtacataaagcacatctaaattgnatgtgttcaatgcacttttaataaaggtaatgtaatattaaaggtacagtttctaagtacaatatancaacattcatattagaatgaaaattggagtatttaaaagacaacattaaattcaggactcaataaaataaacagctggaaataagcagactagtgtaagagtgaattgaaaagaaaacccaaggtaagtgaaaagttggacgatcctctaataaagatcattagcaaagttttagttcaatactagttttaggattcccataaatggcttgcatttttagtgtggcagaaaaggagtttttacatactgtacacaaaacagacagcatatatttataggtacagtattactgtttccaaacttgcatgtatatttacagaaggctgagtttgtttactcaaacagaagtttgtgaaatttgtgtgcttaatcctcaagacctacacacaattagaatcagcatttcatgtggtctttttaaatgtggctttaatacttggttgtagaggagaatgttaaccgtaaggcttggcttactttgtaaatttaacaaaacaacccaggaaaaacgttttaattggggcacacttgtaatcatttaacaattgtcaaatgctgacatgtgctagccattgtgcagacgcaaaaagatacaatctctaccctcaggaagcttaggatgctaaatcgtgctttaaaaaaaaggtttcaatctctttccaagagaggcagttaaggaatgatgtgatttatattaaaagagatttctccctcaactgtagccaatccactttaaaaggttaactactagcattagctctcattaaccacacaattgcatttataattaaggtaacagcaactcttccacaaaaatggaaaatgtctagaattgtggataaatattgcagtgcatgatagccaataatcatggcttgagaatctcgtgccgaattcctgcagcncggggatcgcactagttc

SEQ ID NO: 351706 - DNA, 1021 bp, Homo Sapiens
  misc_feature (64)..(64): n is a, c, g, or t
  misc_feature (472)..(472): n is a, c, g, or t
  misc_feature (784)..(793): n is a, c, g, or t
gattctcaagccatgattattggcttccatgcactgcaatatttatccacaattctagacattntccattcttgtggaagagttgctgttaccttaattataaatgcaattgtgtggttaatgagagctaatgctagtagttaaccttttaaagtggattggctacagttgagggagaaatctcttttaatataaatcacatcattccttaactgcctctcttggaaagagattgaaaccttttttttaaagcacgatttagcatcctaagcttcctgagggtagagattgtatctttttgcgtctgcacaatggctagcacatgtcagcatttgacaattgttaaatgataacaagtgtgccccaattaaaacgttcttcctgagttgttctgttaaatttacaaagtaagccaagccttacggttaacattctcctctacaaccaagtattaaagccacatttaacacanactttacaaacttctgtttgagtaaacaaactcagccttctgtaaatatacatgcaagcttggaaacagtaatactgtacctataaatatatgctgtctgttttgtgtacagtatgtaaaaactccttttctgccacactaaaaatgcaagccatttatgggaatcctaaaactagtattgaactaaaactttgctaatgatctttattagaggatcgtccaacttttcacttaccttgggttttcttttcaattcactcttacactagtctgcttatttccagctgtttattttattgagtcctgaatttnnnnnnnnnntattttgattcattttgtaaatacaagctgtacaaaaaagagagatttaatgttgtcttttaaatactccaattttcattctaatatgaatgttgttatattgtacttagaaactgtacctttaatattacattacctttattaaaagtgcattgaacacatcaattttagatgtgctttatgtactgttatcctataataaaacttcagcttctaatggaaaaaaaa

SEQ ID NO: 351707 - DNA, 872 bp, Homo Sapiens
tgtgggagcgatcccggtgtatatacattatacgaagtgagggatcaggccaaatcgggcgagctcgaattcgtcgatgagcgggacgggtgctcccctcctttcctcccgccacaagcgctcgctgtggttctggcagcgaagtgccgagactgggctcgccaggcggaagtggttggagactgcgtgttttcctagaaagtcctcgaccttcgtcggggagaggaggggagtgataaatcggaaggcggacaagcgacaagtgcggtactggaaagacccaaacatacttggttgtgacctcaggactcaataaaataaacagctggaaataagcagactagtgtaagagtgaatggaaaagaaaacccaaggtcacatctcccaagaagcagtaatgttccagcaataagaaaaggacagttttttggtcgttttgcatgggtgagccttatatgaattacatcaattttgtcaccaatatccatcatcagaacatttgtggcactgtggctcgaaccaatgtccagcttccacactatctgcttggaagaggattacccttatttggaagtctcagtttgaggatttggggaaagcaggcacgcaagcagatacaccttattctctacagcatcatttatacctcaactaagtcaagctgaacaaatgcctgctgaaaaagttctgggagtggcatagctaagaaccagaaaggcgatctttctttgggattaagtcaacagagtcatacccacaaggagaactatcaaatatcagatgcgagaggtgaaagtgcggttataagattctactaacacattgcaatggtcacacaatcagactatatccataggatgtcccgaaatatt

SEQ ID NO: 351708 - DNA, 475 bp, Homo Sapiens
gagggtaaacgtaggagcgctgagataggaacagggagaggtaggaaaatcttgggattcctggagtgacagcgaagaagaattttttggaatgcctaagtgatactgaagaacttaaaggaaatggacaagagagtggcaagaaaggaggacctaaggagatggcaaatttaaggccggaaggacggctctatcagcatgggaaacttacactgctgcataatggagaacctctctacattccagtaacccaggaaccagcacctatgacagaagatctgctagaagagcagtctgaagttttagctaaattaggtacatcggcagagggggctcaccttcgagcacgcatgcagagtgcctgtctgctctcagatatggagtcttttaaggcagctaatccaggttgctccctggaagatttcgtgaggtggtattcaccccgggattatactcgaagaggaggtgattgatg

SEQ ID NO: 351709 - DNA, 1126 bp, Homo Sapiens
  misc_feature (1046)..(1046): n is a, c, g, or t
gaggaaagagagcgaagggtggtattgggggtctcaaagaggtgtttttcgcgaaagagggtggcgaagacgcgctcccaatatagggggcgcttgcccagccattaattgcattgtgtcaataatttaggaggtgaaggctgggggtattttttgcggggtggcctttaaagggcagggtaaatgaaaaagtgcaggcccttcccttcaagatacgggcggctttggccccatgtctgggataggagaaggtgttgtaagggatgcccaatatgctgaacagctggacagattgcgggggaggaccaactttgactgacatgtcccacattcggtgtacggaaggtctactgacaagagacaagacaataaacgcggtaaagggtatagtaggcacatacgtaagacaatctaagtgctttaaaaaatgttttagatattttaagatatttaactgtcccctgtggcttttaaggaaaaaataagtataaattcttgaatattaagaattttaaatcagctaaattcagggccaagaactatttaagatgattcaatgagaaagaaaaggacctaacctggaaaaagagtttcaaatatgccagtacgtagggtatttatggaaatacacagtctaaaattaaaaattaaaactaatcaatggaatttaaatctatagcactttaaggctgtggagcccaacaatagggaatactttgggaacacatgatctttcaaaacataaattagggccttagatgttgactattttgtgaagtattctacacgtgataagaatgtgaatgtgcaaacatttagcctatgtccactagtatagcaatctaagtgatctgtctgtccctttgcacaaataatgattccaatatgaaatcactgtatcaaaaatattaattacacattgttgaaatactatcacttgtaaaatattctttgttaagtacttaatgattatgggttgaattaagaagacttgatgtctttttgtttttctataaaaaggggtctcagcatttttagttaacagnacaactgtgacaatatactgatacatctttagataacacagaacaaattcttattttatgaaataatgttgatgatttaa

SEQ ID NO: 351710 - DNA, 1233 bp, Homo Sapiens
  misc_feature (60)..(60): n is a, c, g, or t
  misc_feature (1136)..(1136): n is a, c, g, or t
  misc_feature (1167)..(1167): n is a, c, g, or t
  misc_feature (1194)..(1194): n is a, c, g, or t
acactatccagtatcatccccatcttccccatcaccaccagcccagccaggaggggtttntagaaacagccctttggattgtggatcagcatctccaaataaagtggcatcttcctccgaacaggaagcaggtagtccaccagtagtagaaacaacaaacactagacctccaaacagcagcagttcttctgggagttcatcagctcattctaatcagcaacaacctccgggatctgtttctcaggaaccaagaccacctcttcagcagtctcaggttcctcccccggaagttagaatgactgttcctcctttagcaacaagttctgctccagtggcggtgccttctactgccccagtgacttaccctatgcctcagacaccaatgggatgcccccagcctactcctaaaatggaaacccctgctattagaccaccccctcatggcacaactgcccctcacaagaattcagcttcagtgcaaaattcatctgttgcagtcctcagtgtcaatcacattaaaagacctcacagtgttccctcttctgtccagctaccttcgaccttaagtacacaaagtgcttgtcagaattcagtacatccagcaaataagcctattgctcccaatttcagtgcccccttaccatttgggccctttagcacattgtttgaaaacagcctacttctgctcatgccttctggggaggatctgttgtttcatctcagtcaacaccagaatctatgctatcaggaaaatcctcatatttgccaaattcagatcctttacatcagtctgatacttccaaagctccaggttttagaccaccattacagagacctgctccaagtccctcaggtattgtcaatatggactcgccatatggttctgtaacaccttcttcaacacatttgggaaactttgcttcaaacatttcaggaggtcagatgtacggacctggggcaccccttggaggagcacccgcagctgctaactttaacagacaacatttttccccgcttagtttgttgactccgtgttcatcaggcatcaaatggggtggcactgaaatcaacaaggacaagcaacttcaattggattaatgctttggatccaagggttccaggacaaaggaaattgnatggaacttatttccaaaggattcgttttgnaaaggttcctcaggcaaatttccaaantaggggttcatcaggcacctaaccaccattggttgttaa

SEQ ID NO: 351711 - DNA, 1939 bp, Homo Sapiens
  misc_feature (14)..(14): n is a, c, g, or t
  misc_feature (1072)..(1082): n is a, c, g, or t
  misc_feature (1222)..(1251): n is a, c, g, or t
cttctggggagganctgttgtttatctcagtaacaccagaatctatgctatcaggaaaatctcatatttgccaaattcagatcctttacatcagtctgatacttcaaagctccaggttttagaccaccattacagagacctgctccaagtccctcaggtattgtcaatatggactcgccatatggttctgtaacaccttcttcaacacatttgggaaactttgcttcaaacatttcaggaggtcagatgtacggacctggggcaccccttggaggagcacccgcagctgctaactttaacagacaacatttttccccgcttagtttgttgactccgtgttcatcagcatcaaatgattcttctgcacagtcagtatcctcgggagttcgtgcaccatctcctgccccatcatcagtaccgttaggtcagaaaagcccagcaatgtgtctcaggacaggaaagttccagtccctattgggactgaaacgttctgcacgtatcagggcaaactgggaacgtcagctccatctgttattggggagcaatttgtctacatcagtaggacatagtggcatctggtcctttgaagggattggtggcaatcaagacaaagtagactggtgtaaccctgggatgggaaatcctatgatccacagaccgatgtctgacccaggagtattttcacaacatcaagcaatggagcgagatagtacaggaattgtaactccttctggtacattccatcagcatgttcctgcaggctacatggactttcctaaagttgggggtatgcctttttctgtgtatgggaatgcaatgattcctccagtagcacctatccctgatggtgctggaggacccatatttaatggccctcatgctgcagacccttcttggaactcactgataaagatggtttccagctccacggaaaataatggccctcaaacggtgtggactggaccctgggcacctcacatgaacagtgtgcatatgaaccagcttggctgatgaggatcagcttgttagcctgcagattccttttcatttggaggaaatcacaagtggccgnnnnnnnnnnnttatgctcccaaatcattctactgatgtgcttgactgaagtgtgtaggctttttgcagaagatcttactaactgacctattttctgtgaacatttgtgactgcccattccccatcatcatccgttttaccttagttagcnnnnnnnnnnnnnnnnnnnnnnnnnnnnnnccctcttcccctttggacataactttctgttgaagctgttctttggctggttggttttagtactgtaaactgcttctgagcaaacacggaaatttagcaaaattatgtaaacttgatcctgaagttttagaatggcaaataaatgtacaattgtttacataacagaaaaggctaagcagaaagtaaatttcaatatgtcagtatagaggctctactttatgtagacttaaattaatgtgagatatgtaccttcatattcagaaatctggatgtttccttcatacattaaactattaataagcataactttttctactggtgtaatttaagtataaagtaaaataatgggcattatcattggatgtttccccacattggcttttaaaatacccatcttgctttctttttggtttatttgtagcaaggcacatatagaagaagaaatttctggcttttccatgttgttttattaccttttctcacttttaaaactaatacagacttatctcctcactcctttttctctccttacctttaccactaataccagtaaaattatctttctgatagtgaaaaggttctgtcaagattttcactgtaatggctgctacagagatggaccatcttcatcatcaccagtggtttcttctaattataaaatgtttaaactttctgagaatttaaaaag

SEQ ID NO: 351712 - DNA, 500 bp, Homo Sapiens
  misc_feature (11)..(11): n is a, c, g, or t
  misc_feature (30)..(30): n is a, c, g, or t
  misc_feature (37)..(37): n is a, c, g, or t
  misc_feature (46)..(46): n is a, c, g, or t
  misc_feature (86)..(86): n is a, c, g, or t
  misc_feature (107)..(107): n is a, c, g, or t
  misc_feature (481)..(481): n is a, c, g, or t
ccctcgggtantgtcaataaggactcgccnaaatggntcctgtaanaccttccttcaaaacatttgggaaaactttgcttcaaaanatttcgggaggtcagaatgtncggaccctggggcaccccttggaggagcaccccgcagctgcctaactttaacagacaacatttttccccgccttagtttgttgactccgtgttcatcagcatcaaatggggtggcactgaatcaacaagacaagcaactcaattgattaatgctttgatcaaggagccagacaaagaaattgatgaacttattccaaagaatcgtttgaaaagctcctcagcaaattccaaaatagggtcatcagcacctaccaccactgctgctaacacttccttaatgggaattaaaatgacaactgtagctctgtcatcaacatctcaaactgccacagcactcactgtgcctgcaatttcttctgcatcccacccccaanaagaactgaataccccatt

SEQ ID NO: 351713 - DNA, 470 bp, Homo Sapiens
  misc_feature (433)..(433): n is a, c, g, or t
agacagtttaattggaggcgtggctcggacgtaaattcaaggagctgcggctagaaagtgaatttaaggggcggggctgagacaatttctatggagagtctctaaccgctttctccgcctcttcaatcccctagcctttatcgttctgggctgtaaggacaataatgtcatggatagtcgtctgccccacagacccccttgcctttcatgcagaggttctatcatgacaaatacagccaggcgtgaaaaaccttgggtacttttctggagctgtgaacagtacgtggctctggagtctgccttaatgaaccttgggggcgggaggcttacaagggtatggggaaggatggaaggtgaagaagggcagtggacaaagcttaggctgaaaacatagcacaagccctgagccaatatggagaatttggtaagactncaaactcttggtgctaggcagcctgggttcaagtctg

SEQ ID NO: 351714 - DNA, 409 bp, Homo Sapiens
  misc_feature (38)..(38): n is a, c, g, or t
  misc_feature (389)..(389): n is a, c, g, or t
  misc_feature (398)..(398): n is a, c, g, or t
gtcaaaagtaatgaagaaggaatccagcgagtcctcanctctgattatgctttcctaatggagtcaacaaccatcgagtttgttacccagcggaactgtaacctgacacagattggcggccttatagactctaaaggttatggcgttggcactcccatgggttctccatatcgagacaaaattaccatagcaattcttcagctgcaagaggaaggcaaactgcatatgatgaaggagaaatggtggaggggcaatggttgcccagaagaggagagcaaagaggccagtcccctgggggttcagaatattggtggcatcttcattgttctggcagccggcttggtgctttcagtttttgtggcagtgggagaatttttatacaaatccanaaaaaacgntcaattggaaa

SEQ ID NO: 351715 - DNA, 2676 bp, Homo Sapiens
  misc_feature (2093)..(2171): n is a, c, g, or t
  misc_feature (2323)..(2357): n is a, c, g, or t
agcgggtttgcggcggagcgggcgggctgcgcgtgcggcggcttcaactgtcgcgggtacggcagcagcaggctgaagggatcatggtgcagtacgagctgtgggccgcgctgcctggcgcctccggggtcgccctggcctgctgcttcgtggcggcggccgtggccctgcgctggtccgggcgccggacggcgcggggcgcggtggtccgggcgcgacagaggcagcgagcgggcctggagaacatggacagggcggcgcagcgcttccggctccagaacccagacctggactcagaggcgctgctagccctgcccctgcctcagctggtgcagaagttacacagtagagagctggcccctgaggccgtgctcttcacctatgtgggaaaggcctgggaagtgaacaaagggaccaactgtgtgacctcctatctggctgactgtgagactcagctgtctcaggccccaaggcagggcctgctctatggcgtccctgtgagcctcaaggagtgcttcacctacaagggccaggactccacgctgggcttgagcctgaatgaaggggtgccggcggagtgcgacagcgtagtggtgcatgtgctgaagctgcagggtgccgtgcccttcgtgcacaccaatgttccacagtccatgttcagctatgactgcagtaaccccctctttggccagaccgtgaacccatggaagtcctccaaaagcccagggggctcctcagggggtgaaggggccctcatcgggtctggaggctcccccctgggcttaggcactgatatcggaggcagcatccgcttcccctcctccttctgcggcatctgcggcctcaagcccacagggaaccgcctcagcaagagtggcctgaagggctgtgtctatggacaggaggcagtgcgtctctccgtgggccccatggcccgggacgtggagagcctggcactgtgcctgcgagccctgctgtgcgaggacatgttccgcttggaccccactgtgcctcccttgcccttcagagaagaggtctacaccagctctcagcccctgcgtgtggggtactatgagactgacaactataccatgccctccccggccatgaggcgggccgtgctggagaccaaacagagccttgaggctgcggggcacacgctggttcccttcttgccaagcaacataccccatgctctggagaccctgtcaacaggtgggctcttcagtgatggtggccacaccttcctacagaacttcaaaggtgatttcgtggacccctgcctgggggacctggtctcaattctgaagcttccccaatggcttaaaggactgctggccttcctggtgaagcctctgctgccaaggctgtcagctttcctcagcaacatgaagtctcgttcggctggaaaactctgggaactgcagcacgagatcgaggtgtaccgcaaaaccgtgattgcccagtggagggcgctggacctggatgtggtgctgacccccatgctggcccctgctctggacttgaatgccccaggcagggccacaggggccgtcagctacactatgctgtacaactgcctggacttccctgcaggggtggtgcctgtcaccacggtgactgctgaggacgaggcccagatggaacattacaggggctactttggggatatctgggacaagatgctgcagaagggcatgaagaagagtgtggggctgccggtggccgtgcagtgtgtggctctgccctggcaagaagagttgtgtctgcggttcatgcgggaggtggagcgactgatgacccctgaaaagcagtcatcctgatggctctggctccagaggacctgagactcacactctctgcagcccagcctagtcagggcacagctgccctgctgccacagcaaggaaatgtcctgcatggggcagaggcttccgtgtcctctcccccaaccccctgcaagaagcgccgactccctgagtctggacctccatccctgctctggtcccctctcttcgtcctgatccctccacccccatgtggcagcccatgggtatgacataggccaaggcccaactaacagtcaagaaacnnnnnnnnnnnnnnnnnnnnnnnnnnnnnnnnnnnnnnnnnnnnnnnnnnnnnnnnnnnnnnnnnnnnnnnnnnnnnnngagaggggcgcgcgcgcgcgtcctcatcagtatcgtctctctccctgcgtggggcggaccctactagtcccctcctcgccgccccgcgctcttttctgtttctatcagcgggcgctccgccctctctgctagtgggcgtcgttctttatttnnnnnnnnnnnnnnnnnnnnnnnnnnnnnnnnnnntcattcgtctttctcccacccgctcgcgatcgcggcgcgctgagtggaacaacagacagacgggaggctcacggaggggcgctcactcctcctcgctgctggtagtacaaccgcggccgccggcgcgccggccgccatcctatgcagtatcctgctgctccagtgggagagcggggcggcggtggaggaggaccagaaaatagtgctgcggtggcgggcgcagaagatcttctcttatctcccgtgcggggaggggtatagttttctctacgaggggcgcgcgctcttgcgcagggggggcgcggggatagtgggtcta

SEQ ID NO: 351716 - DNA, 311 bp, Homo Sapiens
cacaaaaacagagggatcctcagtctccgaatgactaaatggaatagaacactttctatgctctggacaaagcacattagattataaaatgcataagcaataaatttttagtgtgtcactaataaagaacttggtacatcagttgaacctctgcacatgagaataacatagactgtaagatcgtggcccagttcacatgaatttgaaataataaaatgtatacccaagaaactctctggccaacttcagaactggaacactgccagtccctttatgctgtttatctgggtgcctggttctcctctagcctt

SEQ ID NO: 351717 - DNA, 1081 bp, Homo Sapiens
  misc_feature (855)..(855): n is a, c, g, or t
  misc_feature (900)..(900): n is a, c, g, or t
  misc_feature (910)..(910): n is a, c, g, or t
  misc_feature (923)..(923): n is a, c, g, or t
  misc_feature (927)..(927): n is a, c, g, or t
  misc_feature (929)..(929): n is a, c, g, or t
  misc_feature (943)..(943): n is a, c, g, or t
  misc_feature (947)..(947): n is a, c, g, or t
  misc_feature (949)..(949): n is a, c, g, or t
  misc_feature (960)..(961): n is a, c, g, or t
  misc_feature (963)..(963): n is a, c, g, or t
  misc_feature (966)..(966): n is a, c, g, or t
  misc_feature (972)..(972): n is a, c, g, or t
  misc_feature (985)..(985): n is a, c, g, or t
  misc_feature (996)..(996): n is a, c, g, or t
  misc_feature (998)..(998): n is a, c, g, or t
  misc_feature (1000)..(1000): n is a, c, g, or t
  misc_feature (1003)..(1003): n is a, c, g, or t
  misc_feature (1005)..(1006): n is a, c, g, or t
  misc_feature (1012)..(1013): n is a, c, g, or t
  misc_feature (1016)..(1016): n is a, c, g, or t
  misc_feature (1018)..(1018): n is a, c, g, or t
  misc_feature (1021)..(1021): n is a, c, g, or t
  misc_feature (1023)..(1023): n is a, c, g, or t
  misc_feature (1025)..(1025): n is a, c, g, or t
  misc_feature (1030)..(1030): n is a, c, g, or t
  misc_feature (1033)..(1033): n is a, c, g, or t
  misc_feature (1037)..(1037): n is a, c, g, or t
  misc_feature (1040)..(1040): n is a, c, g, or t
  misc_feature (1042)..(1042): n is a, c, g, or t
  misc_feature (1045)..(1045): n is a, c, g, or t
  misc_feature (1049)..(1049): n is a, c, g, or t
  misc_feature (1063)..(1063): n is a, c, g, or t
  misc_feature (1073)..(1073): n is a, c, g, or t
ctcggatccaacagcaacctcagtgcgtgaactctgttatccagaaggcctcgccctgccgccgccgaagctggaattcgtcggctagtagttctcgccggcaactagaggaacctgttggcgtggcccagaaggcttagcgggattgcacgaggttagttgctaagcaaggtggtctttggtcaactgccgcctggaccaaggcaacaggaaccctcagattcatcgctaccccgaggctaagcgccatgcctcatattgacaacgatgtgaaactggacttcaaggatgtccttttgaggcccaaacgcagtacccttaagtctcgaagtgaggtggatctcacaagatccttttcatttcggaactcaaagcagacatactctggggttcccatcattgctgccaatatggatactgtgggcacctttgagatggccaaggttctctgtaagttctctctcttcactgctgtccataagcactatagcctcgttcagtggcaagagtttgctggccagaatcctgactgtcttgagcatctggctgccagctcaggcacaggctcttctgactttgagcagctggaacagatcctggaagctattccccaggtgaagtatatatgcctggatgtggcaaatggctactctgaacactttgttgaatttgtaaaagatgtacggaagcgcttcccccagcacaccatcatggcagggaatgtggtaacaggagagatggtagaagagctcatcctttctggggctgacatcatcaaagtgggaattgggccaggctctgtgtgtactactcggaagaaaactggagtggggtatcacagctcagcgcagtgantggagtgtgcagatgctgctcatggcctcaaaggcacatcatttnagatggaggntgcagctgtcctngggntntggccaggcttttngggnangagctgacttnntnatnctgggnggcattctggctnggcacaatgantnanggngnnagctcnncananggntngnaaaantanaacnctntnttnaatnattcttaaatagcnataaaaaaantctggggg

SEQ ID NO: 351718 - DNA, 1611 bp, Homo Sapiens
cctaaatcagcctcttgccccattgctctttgcaggggtagaagaaggaagtgtagcgggccctcagattcatcgctaccccgaggctaagcgccatgcctcatattgacaacgatgtgaaactggacttcaaggatgtccttttgaggcccaaacgcagtacccttaagtctcgaagtgaggtggatctcacaagatccttttcatttcggaactcaaagcagacatactctggggttcccatcattgctgccaatatggatactgtgggcacctttgagatggctaaggttctctgtaagttctctctcttcactgctgtccataagcactatagcctcgttcagtggcaagagtttgctggccagaatcctgactgtcttgagcatctggctgccagctcaggcacaggctcttctgactttgagcagctggaacagatcctggaagctattccccaggtgaagtatatatgcctggatgtggcaaatggctactctgaacactttgttgaatttgtaaaagatgtacggaagcgcttcccccagcacaccatcatggcagggaatgtggtaacaggagagatggtagaagagctcatcctttctggggctgacatcatcaaagtgggaattgggccaggctctgtgtgtactactcggaagaaaactggagtggggtatccacagctcagcgcagtgatggagtgtgcagatgctgctcatggcctcaaaggccacatcatttcagatggaggttgcagctgtcctggggatgtggccaaggcttttggggcaggagctgacttcgtgatgctgggtggcatgctggctgggcacagtgagtcaggtggtgagctcatcgagagggatggcaagaagtacaagctcttctatggaatgagttctgaaatggccatgaagaagtatgctgggggcgtggctgagtacagagcctcagagggaaagacagtggaagttccttttaaaggagatgtggaacataccatccgagacatcctaggagggatccgctctacgtgtacctatgtgggagcagctaagctcaaagagttgagcaggagaactaccttcatccgagtcacccagcaggtgaatccaatcttcagtgaggcgtgctagacctgagcagttctaccctcccaaggcaccagtactctaccatggggcatcccaagtggggtcctcacccatcccagctactgcagctctgtattactttgtcatttcctgttgtctcactcctgagggctcctgcagtaactctgtacttctctatctgcacacacaaaatgcccaaggcactcactggggaggaagcaaggaagcaaacagtctgagaaaatgatgcaagaaaatcaaatgggaatctggggacccaacacaacatcctgaagattattaaaaggaaaagatgctgattggtacataaatcttttacatggccttggtctagaggaggcaggcttttagaatcatgttttgttaatccgcttcactaaattggaccttcacatatctaaaaagctctgaagtgtttgtatatttgaaatacctcaataaagagagagctcattgactgtaaaaaaaa

SEQ ID NO: 351719 - DNA, 935 bp, Homo Sapiens
cctaaatcagcctcttgccccattgctctttgcagggtagaagaaggaagtgtagcggggtaaggaatgcaccgtcagggtctctcacaaccctttcccagctctcctccccaacaaacagtacctgggatggagccctagggtaatcgcagccacgggatgggtcgaggtgacaggcttcagggaccacacttcggcctttgcccgaccttccacaacttaagcgaagagaggccaccagccgtaacagggcgttaaagcccaggggaagattggtccttatgacttcctgccttccagccctcagattcatcgctaccccgaggctaagcgccatgcctcatattgacaacgatgtgaaactggacttcaaggatgtccttttgaggcccaaacgcagtacccttaagtctcgaagtgaggtggatctcacaagatccttttcatttcggaactcaaagcagacatactctggggttcccatcattgctgccaatatggatactgtgggcacctttgagatggccaaggttctctgtaagttctctctcttcactgctgtccataagcactatagcctcgtacagtggcaagagtttgctggccagaatcctgactgtcttgagcatctggctgccagctcaggcacaggctcttctgactttgagcagctggaacagatcctggaagctattccccaggtgaagtatatatgcctggatgtggcaaatggctactctgaacactttgttgaattcgtcaaaagatgtacggaagcgcttcccccagcacaccatcatggcagggaatgtggtaaccaggagagatggtagaagagcttcatccgtttctgggggctgaccatcatcaaagtgggaattgggacaggctcctggtgtactactcgggaagaaaactggaggtggcggtatcca

SEQ ID NO: 351720 - DNA, 308 bp, Homo Sapiens
ctgacctccagaactggtaaggataagaattccttttgtgttaggccactaaatttgtggtaattgatactgtaataggaagtgaatacatatactttcaagaatgcatataaacagaaaattttaacttgaagattaacagagatttgaaggggaaaagggtgtttcaaggtcttagcaataatcaactaaagaatattaaaatttaaaatgtatagaactatggagaaagaataagtatttttttctcactcagtaaagccttcaaaaattgcttagattttcctattcccagtaaaatatttaac

SEQ ID NO: 351721 - DNA, 1578 bp, Homo Sapiens
  misc_feature (145)..(145): n is a, c, g, or t
atttatggccgaaagtgtggcaggaaaccgtactggatccttttggtggcattcgattatacctgcaggagttaattactattacccagaaggctttgcagtctcagtcctggaaaatgaaagcccagggtgcaattgcatggcnatcaattgcaaaacagactagctctctagtacctccatatctcggaatgatactgaccgcattgctgcaaggcctggctggaagaacgtgggcaggaaaggaggagctattgaaagccattgcctgtgtggtgacagcttgcagtgcagagctggaaaagtctgtgcccaatcaacccagcacaaatgaaattcttcaagctgttctgaaggaatgtagcaaagagaatgtcaaatacaagattgtagcaatcagctgtgcagctgatatcttgaaggccaccaaagaggacagattccaggagttctctaacattgtcatacctctcatcaagaagaactcacttgaaagcagtggggtccggacaaccaaaaatgaagaggagaatgaaaaggaaaaggagctccagctggaatatctgctgggtgcctttgaaagcctgggcaaagcctggccgcgaaacgcggagacccaacgttgttatcgtcaggagctgtgcaaactgatgtgtgaacggctaaaactcagcacgtggaaagtgcagctaggagtcctgcaatcaatgaatgccttttttcaggggttaatgcttttggaagaagaacatgccgatcctgaggctttggctgaaattctgcttgaaacttgtaaatcaatcacatattctttagaaaataagacctactcatctgtgagaacagaagctttatctgtgatagaattgctgcttaaaaaacttgaagaatctaaacagtgggaatgtttgacatctgaatgcagagtgctcctaattgagtctttagctactatggagccagacagcagacctgaactgcaggagaaagcagcgttactgaagaaaacacttgaaaatctggaataaattagaaggggaagaaacaaacaagtgccatgttcattgggggttgaagtggtggtgttctttgaaaaaccaagtgggaaaaagtaaagattaatctgtagcatgcatcattccttggctgaaataaaaagaaaaagccttaaattttgttccttattagctttattttactttatgtttttaaagtatctgggctgagtgagcttaatggaaccttggatgtttgaggggtggttgtaaaggaaactggcagaaatagttactaaaagagttcaagctgttattaaaggaattaatagacagagttgcagagcaagctggataaaaatcttagaactgcattcaaattagttatttcaggaaggggccctataaataacttattttaacctccctcttacacctgaagaaatagggaagctgtgtcatctcagaggctttctgaggcctgtgccaaagtcagaacccagggtgtttaatgtctggccctggatactttcttttatgggccctcttgcccaaatccagtgcttaaccccgggctttaccc

SEQ ID NO: 351722 - DNA, 1881 bp, Homo Sapiens
  misc_feature (1575)..(1588): n is a, c, g, or t
  misc_feature (1637)..(1637): n is a, c, g, or t
  misc_feature (1639)..(1641): n is a, c, g, or t
ggtgcgtctcttacgtgttcgctgtcatcctgtcttgtttctttgtctgcaagtatttgtcatcaaggttgcttctttctgctctatggtctccgcctactgtggtgtgtcagtttctcttccagtggtcatcttggttgttttccgccgcgcctacatgttttcgcgcatttgtccgggctactgtgtgttttagatagaaggtggattgtttccgacggtgttgaccgtagtttcacgtcatgcttgctgtctgtggggtctgtgtcttctggttctactccctatagttttattgttccgcggtgttggctacggaacaaatatcggctggaaagcaagtgtcgacaccgtgtgacaacccggccccaatcacattgtttgacatttcccgcagtcttgtgaaagccgtgttagacagggtcacgttatgattgtatcatagttttagaactccattgtcccgtccagtgtaattagatgttccacttatgtacatttaaagacgaccatttacaagcttgtgcagttgcctccttggctcacaggagggggaaacattgtggaaagcctcaggataaacagaagacttggtttttgctccttgttctctgtacggtacagtacgttttggtttacaaccatgagtacatacaattaagaaatccctcatgcaaattgtagaaaaaattttctttccttgaagctggcagtgaaaaataaagattcatgtcattttctttgtgcacacccctgtgcgcttcttcctgtcagattcttccctaagtattaagagaaataggggaaagccacagagcacgctggatttcaacaagtggtcttgtctttttaaagttcaacacttcttgaacaattagctcctggctgtaggaccagtaatcccttaaacaggcatgctctccatctaacaggatgaagttcagtaaagcagggactgcccctgggggcttacaggatgaagactcaaactgggaatggcttccaccctaaaactgtttgatcgcttcagtatctcttgcttgctaataacacctgtatgatcctttgtccagagggatggatggtgttgagaatggggaaaggggccaaggatcacaagtgcaaaaaatattgtttatgtcatgttttggagggaaggtggtgaggaaaagacaaatctattcattctggataattaaaggtggtttcatgcatttttaaagccacaattttatatctagggttgctgtagaaaccaacatctctggagagggaaggaaagaaaaggagaaggaagagagagttcagtgggactttttttccattttcaattttatataaaagtgttaagaccacaatgaaaaaagttttttatccatatatataataaaccagtttgtgagctacataatttgtctttcccatcttcagaaatgttctcacattaacaatgattagatagcatcatgcccaaagacattggccacacaataaaacaaacaaaaaaacccagtactatgatacaattgaggtaaaaggggaaacaaaaaaatttaacatttgcccacaaataannnnnnnnnnnnnncttaattttgtcagaaaaataccaaacacagtgatttaaatttaaaaanannnaaagtcacaaaaacctgtttttagcagaagtgaatgaccaatgggccagctccttggctcagacgtgattactattggttttcctaattaatccacaaatccacagggaagtgtaagtcaacttcaggggggagtggtggtataaaattaaaaaatagaaaccaaataccccacctggtatgcccccttttccctaagcccctttaccctccctcaccctcgtgccgaattcgccaccca

SEQ ID NO: 351723 - DNA, 2841 bp, Homo Sapiens
  misc_feature (2509)..(2699): n is a, c, g, or t
  misc_feature (2703)..(2704): n is a, c, g, or t
  misc_feature (2713)..(2714): n is a, c, g, or t
  misc_feature (2722)..(2738): n is a, c, g, or t
gtcctgctcagtcgtcagggcccggccaatccggagggcgctcggcgcgtggtcgggggccaggagcgcgtctggcctgcagtgcgcagaggacgcggcgggagcatgttccggctcctgagctggagcctgggccgaggcttcctgcgggccgcggggcggcggtgccggggctgctccgcgcgcctgctcccggggctggcaggaggtccggggcccgaggtgcaggtgccgccatcccgagtcgcgccgcacggccggggcccaggcctgctgccgctgctggcagcgctcgcctggttctcgaggcccgctgcggcagaggaggaggagcagcagggagccgacggggccgctgccgaggacggggcggacgaggccgaggcagagatcatccagctgctgaagcgagccaagttgagcattatgaaagatgagccagaagaggctgagttaattttgcatgacgctcttcgtctcgcctatcagactgataacaagaaggccatcacttacacttatgatttgatggccaacttagcatttatacggggtcagcttgaaaatgctgaacaactttttaaagcaacaatgagttacctccttggagggggcatgaagcaggaggacaatgcaataattgaaatttccctaaagctggccagtatctatgctgcgcagaacagacaggaatttgctgttgctggctatgaattctgcatttcaactctagaggaaaaaattgaaagagaaaaggaattagcagaagacattatgtcagtggaagagaaagccaatacccacctcctcttgggcatgtgcttagacgcctgtgctcgctaccttctgttctccaagcagccgtcacaggcacaaaggatgtatgaaaaagctctgcagatttctgaagaaatacaaggagaaagacacccacagaccattgtgctgatgagtgacctggctactaccctggatgcacagggccgctttgatgaggcctatatttatatgcaaagggcatcagatctggcaagacagataaatcatcctgagctacacatggtactcagtaatctagctgcagttttgatgcacagagaacgatatacacaagcaaaagagatctaccaggaagcactgaagcaagcaaagctgaaaaaagatgaaatttctgtacaacacatcagggaagagttggctgagctgtcaaagaaaagtagacctttgacaaattctgtcaagctctaaatccatttttgtgtagggagaataatgtctagtaatgtggaagaatagctatcattcctgtctctgtggcacccgatcaatggcttaaatctgtcgtttttgatattcaggtttcctcaatttagccttagtgaaggaggggttgtacacactgccatttttgtattttaaaggaaaaatgactttcattcccaactgattatgacctttcaggatgtcgtcaagtgatgctttcagttgtaacacgtgacttggtgctgtccctgctggtctaagtagaactgtagattcatatgggctggtgttcctgtgcgctgtgggtgtggtgattcagcctggcatttctaccataagtttttggtctgctgatttgctgccctgtcttctcttactttactttatcaatacctggcaaactgaccagaattaccttcctcatggcaaagggggattatggtgaattgttgttcttatagtctgtttcatgaagcacaagtggaatttaatacataaaagagaaaaatatcttagtttgctaccagcatccagcatgaagttgtaaagtggggattaggcacgtgacagtatagcacccatttgaatttaaataaaagtgaaccatatttatctggttatataaaactaaaaatgggggtgtttatataaaactaaaaactaagaatgatgtaaccttttgtctgtgttatctgaacactctacctcctttgcagccttagtcacacaactgagtcatctcaagtactctttaaggacacacagcccaggctgttctgagtcagaataggcccctacaggtatattttaaaactcttcgtaattctaatgtgtactgctggtatagctgaactactgacctggatcttagtcctagcctttttgcttttgcaatttcagtatcttcatctctaaactagggaaacactgggattctttcttagctgtgggggaaggtatttggttagatgactttgaatgaatagactgctgtgctgaaagagctttatcacactgtctcaaagtatgtaaagatacataggtggatgctcttactgcagcagtcatgaatacatttttagccatttacctaaggaaaaagacagtttttctaggtaccatgaaggaagattgaccctgttggtatgcctgtgggggtgggatgtgagtgggactgataaactgatacttttggttcgtatgtacatactggaagaatcttcataataaatgagactacacaacnnnnnnnnnnnnnnnnnnnnnnnnnnnnnnnnnnnnnnnnnnnnnnnnnnnnnnnnnnnnnnnnnnnnnnnnnnnnnnnnnnnnnnnnnnnnnnnnnnnnnnnnnnnnnnnnnnnnnnnnnnnnnnnnnnnnnnnnnnnnnnnnnnnnnnnnnnnnnnnnnnnnnnnnnnnnnnnnnnnnnnnnnnnnnnngggnnggaggccanncccccccnnnnnnnnnnnnnnnnnccacccggggggggccgggcggccccgaaaaaaacagaaaaaggggcctcttttgttttccaaaggaaccacccgacacgaaaacccgcggtttctccccccc

SEQ ID NO: 351724 - DNA, 746 bp, Homo Sapiens
  misc_feature (34)..(34): n is a, c, g, or t
  misc_feature (89)..(89): n is a, c, g, or t
  misc_feature (141)..(141): n is a, c, g, or t
  misc_feature (728)..(728): n is a, c, g, or t
ctgcctcatcctctaaccctgcagggcctcgctnaggcacggcccctagactgggcaagagagctgacccgactctctctgcccccttnatttgggacccatgcagatccccccaggtagacgatgcatgggtccaggganagaggcagcaggacactcaggtgctggccagggtccaccactgagctctgagaccttggacaagttctcccctcgtctttgggcctcaaatttcctcatctataaaatgggatggaaaagctggactatctagatgacctctgaggcccttccagtccttgtttctggatgcctcctgaccctcgaatctggcatgaggatcagggttcagctgcgggcccaggagggtctgaggcagagtcttctggcccacgtggcctttggaagggactgggtgaaagttgagaagcctctgggcccacagactgaagctgcccagtgcttggttctcaggccgagggttccccatgggggcaggcctgtctgccacctcacacccaaaagaatattccccagaaacagtacctggcacttcatgctacaggtacacatctaggtggaagttaggctagggccccttttcaggggttgcagaaagggggaagcaatgtcgaccaagtcagggggatccatatctttgggtcacctgcccaccaaccctcagtgtgttcctccaggggacagggcgggtgctcccatgaaacacnccaggaactccgctgggc

SEQ ID NO: 351725 - DNA, 1138 bp, Homo Sapiens
  misc_feature (254)..(254): n is a, c, g, or t
agggtctggttggaatgacaccacgagatctgggaacagtggctggggcaacagcacaaatacaaaggccaatccaggtacaaactggggggagactttaaaacctggcccccaacagaactgggctagcaaaccccaagacaacaatgtgagtaactggggaggagctgcttctttgaaacagacaggaacagggtggatcggggggccggtaccggtcaaacagaaggacagcagtgaagcaactggctggngaagaaccctatccaccgtccattcgccgcaaaattgggaaattgatgatggtacctcagcttggggggaaccaagcaactataacaataaaactgtaaacatgtgggatagaatcaacccggtcatccagagcagtactctgaacaataccaccaccaccaccaccactaccacgagcaacaccacacacagggtcgagacgccgcccccgcaccaggccggtactcagctgaatcgatcaccgttgcttggtccagttccatcaggctggggagaaatgcctaatgttcactcaaagactgaaaactcttggggagaaccatcctccccttctaccctggtggataatggcacagcagcatgggggaagccacccagcagtggcagcgggtggggagatcaccctgcagagccgccggtggcatttggaagagctggcgcacctgttgctgcctcagccctgtgcaaaccagcttcaaaatctatgcaagaaggctggggcagtggtggggataaaatgatcctcagtaccaggcagtgggaggatgaagaaggggacgtgtggaataatgctgcttcccaagaaagcacctcctcctgcagctcctgggggaacgcccccaaaaaaggacttcaaaagggcatgaagacgtctggcaagcaggatgaggcctggatcatgagccggctgatcaaacaactcacagacatgggcttcccgagagagccagctgaggaggccttgaaagagtaacaatatgaatcttgatcaggccatgagcgctctgcctggaaaagaaggtggacgtggacaagcgtgggctgggagtggccgaccataatggaatggccggcaagcccctcggcagctcgcccctgagtt

SEQ ID NO: 351726 - DNA, 2479 bp, Homo Sapiens
agcggaggggctgctcaggagaatggctccgagcaatctacagtctccggggcagggagtttcccccagcgagcagtcccagcagccatcaccggaagaggggttgtctgaggaggaggaagaggaggatgaggaagaagaggaagatgtgactgatgaagattccctggcagggatgaggctcagagagtggaggtgagaaggcaatatcagtgagatggtgattcagaagaggcatctggggcagaggaggaggtggggactgtggcggcagcaagcctacagcttgggaaggagatggacagtaatgagaaaactactcaacagtcttctttgccaccaccaccaccacctgacagcctggatcagcctcagccaatggagcagggaagcagtggtgttttaggaggcaaggaagaggggggcaaaccggagagaagctcaagtccggcatcagcactcaccccagaagggaaagccaccagcgtgaccttggtagaggagctgagcctgcaggaggcaatgagaaaggagccaggagagagcagcagcagaaaggcctgcgaagtgtgtggccaggcctttccctcccaggcagctctggaggagcatcagaagacccaccccaaggaggggccgctcttcacttgtgttttctgcaggcagggctttcttgagcgggctaccctcaagaagcatatgctcctggcacaccaccaggtacagccctttgccccccatggccctcagaatattgctgctctttctctagtccctggctgttcgccttccatcacctccacagggctctccccctttccccgaaaagatgaccccacgatcccatgagcctgtttttctgaacctgcggctctttgtcccacagaagcagaaacagctttcacaaaaggacctcccaagagttatgagccctgattttgtctttttctctaagttcttaacatgttatgtccctagtggcttttctgtagtccctgagcttggaaattactgtgcttacaaggggatggccccctaaggaatttttcttccctcctcattctttgtacctgaggaacatagattctctgcagctttctcaaggggaaccctctccagcttccctggtgtgacccttcttccccctcctctctcctctccctttccctttggtaggtgcacctgagcacctacatttggcattgcagcctagccaaaaagggctggcagctgtctctggagggcccagtgccactcctctggggtgacctttctgctcagctggtgggtatgggtcccctatctttctagaaccagtatgtggcattcctgtcaaatggcctgcccatgaagccctggaattccagctccacctccactaccactccaagcctggccccaccagtgctgtttggcctaggaactgtggctgggaaggtgcctccaacaatgggatccagggaagccaaggagaagacagcccccctcctatttcagcctcctgcacccaaggcagtgcctgagaagcccatcatagacaagaagtagcaaactgtacattccttcttcctccccctgctccagaaggtgccggtactgaagatgctccagtaattggtgacccaaccctaggaagtagggagaaatgaaggaagggcataggaaaattttcccagtaaatcccctgatggtcacattaaggtaaaggttttggctggtcagtgtgccaagacctctccagcttctcattcatgatgacctctcaaagttgggaaacaagctgatttcttgccaagaggtctcccaggagatatttgggaaatgtgaagttcgtatctttaaggagcatttttggtcagcatggttgatgaactaatgatgagagagttaaggaatgttgctagaacatagggcttgctggtacctatgtgactaagaaagggacatgatgtaagggaaaaggcctcaaattcttgtgaatgtggacattctcgttaatattcttttgggctaatagtgacatagtgtgcagaggtgtaccagggatcatgggggatttcctagcactagtatgcttctagttttagataactccctcctttattccctggccccttgtattttccttatcttcctctttcaagacccctacccattttgcctatccgtaggctggggcttgtgtctttgtcattgtctggttcttaagagtcccagactttgggagaccagctccaggtggcgtcctccctgcctctccgtcttgtaatgagttgtagtatttactcttaacataggatcatttggaacaggagttctgaggaggagagagtgagggttttgctattgactgacttgaacgatggcttctcctcaagctgtaggctccagagcttcctaacctagtaaaatgtcaagaacagacgggagatattagtgtctttccctctatcattaaaggtgttttaaccaaaaaaaa

SEQ ID NO: 351727 - DNA, 953 bp, Homo Sapiens
  misc_feature (872)..(908): n is a, c, g, or t
cgttccttcaattcgtccctacttcctaggtttgggtcacccaattactggagcatcttcagtaccggcaccttctggatcagggtgaggtaagaaggaatgtacagtttgctacttcttggtctatgatgggctttctcaggcacttgcctttgggtgcaggaggctgaaataggaggggggctgtcttctccctggcttccctggatcccattgttggaggcaccttcccagccacagttcctaggccaaacagcactggtggggccaggcttggagtggtagtggaggtggagctggaattccagggcttcatgggcaggccatttgacaggaatgccacatactggttctgtggcagcgaccaggaaatgccctggagactcctctcctctcctctctgggccccaggtgggatccgtgggcacggaggacccagaatctggggggttgctatgctctgtgtccatgacctgaggattattgtgaccctcaggccggggttcagaggaggccgaagagttgttggggttctcctggcccccaattatcaccattacaggagggtcagtagaacatgcgttctggtgggcgaggaattcagttgggtcagtgaattgtgcgcagcacttggcacagacttgggggtgatcctcctcgctagcatcacctccgagctctgccggctccccgcagggcaccccgagacgagagctcctctcggattcgtgcgccatggttgtgggggaagtggagggccaggtggggtgggagacaatggatattgtgattgagggaggcgatggccgctgggtctgcggcagcctctgcccgctctcgacgaattcgagctcggccgatttggcctgatnnnnnnnnnnnnnnnnnnnnnnnnnnnnnnnnnnnnncgccgccaccgcgtgaactccagtcgcccatatatctatacatcg

SEQ ID NO: 351728 - DNA, 2795 bp, Homo Sapiens
  misc_feature (43)..(43): n is a, c, g, or t
  misc_feature (70)..(71): n is a, c, g, or t
  misc_feature (96)..(96): n is a, c, g, or t
  misc_feature (122)..(122): n is a, c, g, or t
  misc_feature (209)..(209): n is a, c, g, or t
  misc_feature (366)..(366): n is a, c, g, or t
  misc_feature (625)..(633): n is a, c, g, or t
  misc_feature (2653)..(2705): n is a, c, g, or t
cagcgttaatttgttgccgcaagggccacaacatggttgaacnattcccttttttccctcttgttcgttnntctgcacccgccttggtcgtggctncctcagaaaatctaatgtgggggganatagtacttcggcggtgggcgccgccctgcctatgtgttttgtgcggagttccctcgcccccccaggggtgggtttacaaagaaaanaatatttttttcgggatcccattcttgtcctggcatcctccaggggagatttttatagccataagggacccctccccctctcctccttcaattctcccccgttcgagatccccccaatcatacgggagtggggtctttcagctctgggtccacacanatcgtcgtgacgggactttttttatctcccctacttctctcgaaaagcgagggttcgcccccttcttttacctgcactttggcgcctactgggctggcggcccctctataatattagacagggggctctaaatgggcgccacgagatggctccagggcttaagctcccttttcggggtgcccgggaaggagccccgcctcgtttaaggttcccagaaagaggtcttgagggatggaagggttcaaggggccaggcggtnnnnnnnnnattcctgagggcggcggaagttcaccggcccacagctcctttgcgcggtcaatcttttctacccagttgctccagctatgatgtctcagaggatgaggcccccaagtggctatagcacataggggaaggggaagctgccagtcgacttgaagtggttggtaagcagtgcccagcttggtagtgaagtcaccaacttactaagttgcatgcgagttgccgtgctactttctgccactccactgatggctgagccctcactccctgggggggtgttttcatcagctttattcttgggttccactgctttcatgagcacaaacttattgaaagcagggagtcctggagccgtggctgtgcctgcactggtggagagcagagtcaggctctctgtggcactgagtgctgttgtggaggccaccagaggcttgcgctcaaccccctccacctggagtggctgcctcctcctcggccttctctggtggcacggacataccataaggcaagccactgctggtaatgacatagtctaggtgctctggtactgggtgtgggttcatctgcacatgtgggtacttctcacgatgccggtggaaatgcactttgaggttgccacgggtggtaaaacggtttccacagacattgcacttatagggcctctcacccgtgtgggaacgaaggtggatctgcagggcactgtcactgccaaatactttggcacagaagcggcatttgtgccttccaccaggcttctccaagggacccatcacttctccgtagctcagctcaccacttccattctttggcttcaggagccctggggaggcagtggcctcaaggcctcgggctgccccaagacactgtgctgccagtagtcccgtggtgcttgggaatgccagatgaggcgaggcaatcagctgatctgtgctgcctggcaaggctggggaaggggcaggggtgggtttgtggcttcgcccaacccctccagcagagaaaggatgctgtgaccccagtgggtggtaaaggtggaagaaggcctgcttgggcgtttctgcccctgaagaggaagaggaggaggaggaggaagatgccagtgtcttgctggtttggacaggcttgatggggctgaagaggggtagtaggggcttggtggaagaggcagtccctgtcccaggtagctctgagggactggcaggggcacccaccgtctggcctaaggaacccaagcaacagcacctgcctgcagatttgctcagtcatcggcatctgatggatctgcccgctgctgcagcacccggagctcttccaagatcagggggatattcagagtggccactgcctacccctggggacgaagggggtggtgaagaagaaagggggagcagggagtcgattctggaggtaatggggttgctcccagcttgggactggccaagatcaggcccccgcctcccccagccgctgtacctgtggcagcgaccaggaaatgccctgaagactcctctcctctcctctctgggccccaggtgggatccgtgggcacggaggacccagaatctggggggttgctatgctctgtgtccatgacctgaggattattgtgaccctcaggccggggttcagaggaggccgaagagttgttggggttctcctggcccccaattatcaccattacaggagggtcagtagaacatgcgttctggtgggcgaggaattcagttgggtcagtgaattgtgcgcagcacttggcacagacttgggggtgatcctcctcgctagcatcaccgttctcagacgcgctgggaccttcgcagtccgagattaactgttggggtttccgctgctttcgccgagacattcccgggtagagagttgggagagggaggggcaacgctcacttggtcttaaccggggtgacctggtctcgtctcccccttgggtccgaagccacttgatgcctcgtcccccagcgcacatcactgtgacagcagagagtgttcttcttctcccagagacagcagannnnnnnnnnnnnnnnnnnnnnnnnnnnnnnnnnnnnnnnnnnnnnnnnnnnnaatctttgcaagtctttaaaggggagacgccccctttttttcttcagcttcttccctacgcttcagcagctcccattgtaaaagcccgct

SEQ ID NO: 351729 - DNA, 2665 bp, Homo Sapiens
atgttcaagctaaaataaagcaactcaaggccttccagcaggaaatttcactgaaccacaataagattgagcagataattgcccaaggagaacagctgatagaaaagagtgagcccttggatgcagcgatcatcgaggaggaactagatgagctccgacggtactgccaggaggtcttcgggcgtgtggaaagataccataagaaactgatccgcctgcctctcccagacgatgagcacgacctctcagacagggagctggagctggaagactctgcagctctgtcggacctgcactggcacgaccgctctgcagacagcctgctttctccacagccttcctccaatctctccctcttcgcttcgcttcagcccctccggagcgagcggttcaggacgagacaccccggctagtgtggactccatccccctggagtgggatcacgactatgacctcagtcgggacctggagtctgcaatgtccagagctctgccctctgaggatgaagaaggtcaggatgacaaagatttctacctccggggagctgttgccttatcaggggaccacagtgccctagagtcacagatccgacaactgggcaaagccctggatgatagccgctttcagatacagcaaaccgaaaatatcattcgcagcaaaactcccacggggccggagctagacaccagctacaaaggctacatgaaactgctgggcgaatgcagtagcagtatagactccgtgaagagactggagcacaaactgaaggaggaagaggagagccttcctggctttgttaacctgcatagtaccgaaacccaaacggctggtgtgattgaccgatgggagcttctccaggcccaggcattgagcaaggagttgaggatgaagcagaacctccagaagtggcagcagtttaactcagacttgaacagcatctgggcctggctgggggacacggaggaggagttggaacagctccagcgtctggaactcagcactgacatccagaccatcgagctccagatcaaaaagctcaaggagctccagaaagctgtggaccaccgcaaagccatcatcctctccatcaatctctgcagccctgagttcacccaggctgacagcaaggagagccgggacctgcaggatcgcttgtcgcagatgaatgggcgctgggaccgagtgtgctctctgctggaggagtggcggggcctgctgcaggatgccctgatgcagtgccagggtttccatgaaatgagccatggtttgcttcttatgctggagaacattgacagaaggaaaaatgaaattgtccctattgattctaaccttgatgcagagatacttcaggaccatcacaaacagcttatgcaaataaagcatgagctgttggaatcccaactcagagtagcctctttgcaagacatgtcttgccaactactggtgaatgctgaaggaacagactgtttagaagccaaagaaaaagtccatgttattggaaatcggctcaaacttctcttgaaggaggtcagtcgtcatatcaaggaaactggagaagttattagacgtgtcaagtaggcagcaggatttgtcttcctggtcttctgctgatgaactggacacctcagggtctgtgagtcccacatcaggaaggagcaccccaaacagacagaaaacggtccacaaaaggtggctccgattcctccctttctgagccagggccaggtcggtccggccgcggcttcctgttcagagtcctccgagcagctcttccccttcagcttctcctgctcctcctcatcgggcttgcatgccttgtaccaatgtcagaggaagactacagctgtgccctctccaacaactttgcccggtcattccaccccatgctcagatacacgaatggccctcctccactctgaactaagcagatgccatctgcagaagtgctggtagcataaggaggatcgggtcataagcaatcccaaactaccaacaagaggaccttgatcttggcgaaagccatcggtgtggcagctttagccctcctccagatcacatgtgtgcaaattatggcttcagaggtggaagataaacagtgacgggggaacaaacagacaacaagaaggtttggaagaaatctggtttgagactctgaaccttagcactaaggagattgagtaaggacctccaaagttccccggactcatgaattctgggcccttggcccattctgtgcacagccaaggacttcagtagaccatctgggcagctttcccatggtgctgctccaaccatcagataaatgaccctcccaagcaccatgtcagtgtcgtacaatctaccaaccaaccagtgctgaagagattttagaaccttgtaacatacaatttttaagagcttatatggcagcttcctttttaccttgttttcctttggggcatgatgttttaacctttgctttagaagcacaagctgtaaatctaaaaggcacttttttttagaggtataaagaaaaactagatgtaataaataagatcatggaaggctttatgtgaaaaaagttgaatgttatagtaaaaaagaaagatatttatgtatgtacagtttgtaaagccaagttttgtttgtattgatttctttgcatttattatagatattataaaat

SEQ ID NO: 351730 - DNA, 637 bp, Homo Sapiens
  misc_feature (604)..(604): n is a, c, g, or t
cgatgagtaatcttgcccgaggagtaaatcgtggccgatgagtaatcttggtcgatgagtaaatcgtgcctagtgcattctgagtggtagtaccctaagccccctaagaacctcatcgtgtaaaattcaaccaactgctgcttttcattcccctaatctgtcctttctagactggactttttcctaggacactttacaatgccactgctccaaaacatcaagtgttaactcagaaaggaaagtaacctccactcccacacccttgataacaccagcaactctgcctgcaccttctttccactggagagagagatcacagacagagacgaaaaactttctttctccactgatagatgacaaagcaactctatcaagtagttgactaccaagatattagctggtgtctagctctagataacaagacctgccttctctgttctccttgtcaacttgtttttttaaacctttaatatccagtttttctccttagagtcttgtcatatttgaacttggcatctccaaaaatttcttttatgtttctcgaacaattaggaaatacagatttaaaatgcctttttggagatgccaagatttactcatcgancaagatttactcatcgccaagatttactcatcg

SEQ ID NO: 351731 - DNA, 478 bp, Homo Sapiens
cgatgagtaaatcttggcgatgagtaaatcttggtcgatgagtaaatcttggcgatgagtaaatcttggcaagacatgtcgtgcaaagaggctactctgagttgggattccaacagctcatgctttatttgcataagctgtttgtgatggtcctgaagtatctctgcatcaaggttagaatcaatagggacaatttcatttttccttctgtcaatgttctccagcataagaagcaaaccatggctcatttcatggaaaccctggcactgcatcagggcatcctgcagcaggccccgccactcctccagcagagagcacactcggtcccagcgcccattcatctgcgacaagcgatcctgcaggtcccggctctccttgctgtcagcctgggtggccaatatttactcatcggccaagatttactcacgccaagatttactcatcgccaagattactcatcgggaccgagctgatgtat

SEQ ID NO: 351732 - DNA, 506 bp, Homo Sapiens
cgataacgtatatctgtggcccgagtgagaatcttgggtgatcgatctacaagtctcgggcgagtgagtaaatctcgtgagcagatgagtagactcgttgtgtgcgaggagtaaatcggggcgctcatgagtaaatcttggccgatgagtaaatcttggccgatgagtaaatcttggccgatgagtaaatcttggccgatgagtaaatcttggccgatgagtaaatcttggcccgatgagtaaatcctggtcgcatgagtaaatccttggccgatgagtaaatcttgtgccgatgagtaaatcttggtcgcatgagtaaatcttggcctgatgagtaaatcctggtcggatgagtaaatcttggccgctgagtaaatccgggtcgatgagtaaatcttggccccactgtaatcacatagggactctggaagcagatgctgttggcttggtagatctgtggggccaagggttctctgtccctggtacaactgtgatccgggtttccc

SEQ ID NO: 351733 - DNA, 598 bp, Homo Sapiens
cgttgactgtccgtctcagctcgatgatctccgcctggtaggactgcagctgctctgagctggataccacctgcttgttcaagctcctcggtctgcgtggtgaaccattgctccactatcctgcggttggtttccaccagggcctcatactgactcctggtctcgttcagcacccgattcaggtccacagtgggagcagcatccacctccacattgaggcggtctccaagctggcagcgcagggtattgacctcctgctcatggttgctcttgaggcagagcagctcctccttcagggactccacctgggcctcccaggtcggacttgcacagggtcagctcatccaggatcctgcgcagaccgttgatgtccgactccaccagctgccgcagggacagctcggtctggtacttggttctgaaatcatccgcagccagcttggcgttgtcgatctgcaccacaagcctggcattctcagacttggtacacaggatctggggagtgagaggtggcttagtgaggactgaaaataaatatgaaatcatcaacttttttaaaaatgacttaagccattttgaaataaaagaggaagcaatg

SEQ ID NO: 351734 - DNA, 348 bp, Homo Sapiens
  misc_feature (248)..(248): n is a, c, g, or t
  misc_feature (273)..(273): n is a, c, g, or t
  misc_feature (312)..(312): n is a, c, g, or t
gtcactactgcctgcctgcctgcctgctacggtgagtgtggcccccacaatgggatggcgcagggcaggagggccatgggttcccccaccccagactaagggggcactaggggaggggccgagtcatgtgaagagggagaccctctcagacagtcgaatgtgctggtcccactaaggaaaccacctcaccctctccaacttcctgcctgaaaatgggccctggagctcgcagacagggcaggattgtncagggaaggcctgagaatgtgcttntgcccaccccctaccccactccctccccttcggttcttnaacactgggcactcacacacccaccccatggttcct

SEQ ID NO: 351735 - DNA, 1293 bp, Homo Sapiens
aaagcaaggaagaagcataggttaatatgaaacctgggtatttaatgcaggctggtacggtcggaattccgggatatcgtcgacccacgcgtcggaggcggtggcggcgggtcggggcgagaggctgaggggatctggcggtggagcgctaggatcagacgcccccgcgatgaccagctcccccgtctccagagtcgtgtacaacggcaagaggaccagcagcccccgctccccacccagcagcagcgagatcttcaccccagcccacgaggagaacgtccgcttcatttacgaagcctggcagggtgtggagcgagacctgcgaggccaggtgccgggtggcgagcggggcctggtggaggagtatgtggagaaggtccctaaccccagcctgaagaccttcaagcccatcgacctgagtgacctgaagcgccggagcacgcaggatgccaagaagtcctagagcgcccggtgcccctccccggcctccggaagatcagggtgcgaggtgtcggttccctcctgtcctgtggtcctgcccctgggatgggggtgccttgctccagcgggctgcagatcccagcactggcgtgactgacggctgaggcctgcctctccttcccaagcccccttccttcatccttgggggtctcaggctgcccccatcatgggggtctgggccctgcccaccctcctgccctcccccagccacctggctgcatttttgaagctgcctggcccccaggggccctgacctgacctctctcctctcccctcaccctcctgcccctggccactgcaggatcaggaggggagaagaaggagcctctgctgcctcccaggctgctgggactgggctggttttgtccttgaagtggtcaggatacaggacaagggcagccccaccccatccagcctgggctccccgcagacccttgctgctcccgtggcctggacacgctggggagcttctcacacctacccctaccgtccagcctggcctcttccctgaatcagcttcaagatggcaccagctctttgggcctaggatactgccgggccccccaagggggtccccagcaaccaggcctggcctcctggtgtctgcggtcacagtggcccctgggcaggggcacccaggctgaccctgaggtgctgctgctgggtctgtcttggctctggggtgtgctgggagggtcaccaggtcccttttccttcctgtgccctctgaaagctaagtgtctgtgtggctgtggagctcgagggtctgtgaataaaggcggcggcactggg

SEQ ID NO: 351736 - DNA, 744 bp, Homo Sapiens
  misc_feature (358)..(358): n is a, c, g, or t
  misc_feature (410)..(410): n is a, c, g, or t
  misc_feature (418)..(418): n is a, c, g, or t
  misc_feature (438)..(438): n is a, c, g, or t
  misc_feature (452)..(452): n is a, c, g, or t
  misc_feature (522)..(522): n is a, c, g, or t
  misc_feature (527)..(527): n is a, c, g, or t
  misc_feature (539)..(540): n is a, c, g, or t
atttcctccacgtatgtttggaagtcaaaagacccttcagaaccctaaatccacccagtttatacttgttcctgggctatgtcatcctagtcccagaacctgggaagatgccaccatacctagaggaggccatgaggctgtcacatctaacattctgtggatatgacctgcttatgcgctctactggaagtatctgacacttccaagtagaattgaggcccaggcattgtcaatctgctttctttactaaattatgccaagccactggaaaagtgactgcataaattacatttttcatatatatctggtgaatgaatgaacctcaaccagaacctctacagatacctgagtgagcctngggcccctccttcaggacccaaggggaccctgttctttctctgtcaggacanagaccagntagaaagaatcacagacatnctttacaaacgcanaaacagatttgctttctgtgtgcttttccaacagggatatgggccattgagacagcatgccccagagctncattngaggggaagatnnataatgggaactatagcatgctcagcagccttttcacagaggcaagcacttgggaccctgttgcattgcttaaggcatttagttccattaggaccctatggggtcatcttactgcttacaaaagagcaacacggctaaaaggctttggggacatctcaagaaccattagtcgggacagcccactgggagttgagggggagggct

SEQ ID NO: 351737 - DNA, 800 bp, Homo Sapiens
cccgtcagcaactgaagcctggtcaggtgtaaggaaatgccggggggcatcaaatatgggtgagggaggccagtgcccttctcatcccagacctgagccccccccaaaacctgtctggactttgatcaggataagaacgttgcagggcgaggcaagttcctgaagccgaagaggtctgggctggggcctactggagaaagggcatagactggctcgagagaggaagcactgccccacgtggggccaacacaagcagggtcccacccaccaagtgcatcaatggtccgtgtcctccagcaggcaaaaagacacatggaagtgtgtggccaggccctgaggtcagagagagggccaagccagctgaagtttggccacaactctacagagcgctctcctagccccatacggccagaggagccccagggaagccttcaccccgacagctccggacacctgcccttctccgccagccagagctcacagagagctcacacaggcccagaggtctgaggccacagagctagacctccacgggaaaagtgcggaagaagaagacgggagaaagagtacgaggatctctggaaggccctcaccactccccaccgctggagcaccctgagtccaggcttcaagtggcaaggatcctcgaatctggaaggaaaccccatggcaactgctgggggtgagaggacgggtcccaaggcagggaggacatggggaggaggacattgctatgtgtatatatatttttgaaaaaaccgaggaagcaaagagggtgcaaggtccctctcctgtggctc

SEQ ID NO: 351738 - DNA, 1666 bp, Homo Sapiens
gggattccggcttccggcccggactggagctgcctggcgtcggtgcccgcgcccggcccagcccggggcccgccctcccctcttcctgggcagtggccccgcctgcgtttccaggcttcctcttgataatagcgagtagccctggagtggtgtcagcccgccaggctgagcgctctgcgtattcaggcgttgaagttggggagaagaagtgggtgactgtgggtgacacgtccctgaggatatttaagtgggttcctgtgacagacagcaaggagaaagaaaagtcaaaatcgaacagttcagcagcccgagaacctaatggctttccttctgatgcctcagccaattcctctctccttcttgaattccaggacgaaaacagcaaccagagttccgtgtctgacgtctatcagcttaaggtggacagcagcaccaactcaagccccagcccccagcagagtgagtccctgagcccagcacacacctccgacttccgcacggatgactcccagcccccaacgctgggccaggagatcctggaggagccctccctgccctcctcggaagttgctgatgaacctcctaccctcaccaaggaagaaccagttccactagagacacaggtcgttgaggaagaggaagactcaggtgccccgcccctgaagcgcttctgtgtggaccaacccacagtgccgcagacggcgtcagaaagctagcaccatcccggccctccgcctcctggccctgcctctatttattgcattctggttctggccgcgccgcgttgctggggtaagggcaagcactggggtcaagagcctgcacacatgagccttccgggctggaaggctggcgtaggacttggggctgtagcatcatcttcctgaccctggcacctgtgtctacttgctcccgagaagaggagcgctcatgtcttttttgcaccccaagttggctggagcatcggccaccccaagattcatctgtgacctccaggcagcagtctctgctccagaatctctggacggagctgctggcagcttctgcgagaagagagagatgtggaaggcaccttctagaagagagcgtgcctcaggttacttgaacttgaacggagactgtagactcccggactttcccctaggactgggggccctgtaggctgctgttggaggactgggtagagacattggagggaagggaagggcttttctccacacaagggcagagagtccgtctagatttcttgctgtcctgccagctctgcccatgcctgaggtggtcctacctctcacgggcaccctagctgctgacagccctttgtggccgccgtccccatcccctgccctcagcacacacatctgcacacacgcagctttgttctcacctctacctgtcattccagcatccctgcctcttgtcacaaactgccccagcaagaatttgaggttctgacaacagtacccatcccccacagtaccccttcagctcagtttctagaaagctcccttttctttgaaatctgcatgttgaattgaactttgtgattttattttttgtttcaaaaaagtttaagaaaatggaaatgggcaacagtgagtgaagacatattttagcactgaatagaatatttttaaaattaaactatttgaaatatgaaaaaaaa

SEQ ID NO: 351739 - DNA, 993 bp, Homo Sapiens
  misc_feature (152)..(152): n is a, c, g, or t
cgaggcacagaaatcttggtgccaagctccaacacttggggcgcaaaaagaccatgggcgctcctcttatcgggagcaaagaagacacaggggccaaggtcaggaagatggatgctacagcccccaagtcctaacgccagccctgccagccncggaaaggcatcatgtgtgcaggcatcttgacccccagtgccttgcccttaccccagcaacgcggcgcggccagaaccagaatgcaataaatagaggcagggccaggaggcggagggcccgggatggtgctagctttctgacgccgtctgcggcactgtggcttggtccacacagaagcgcttcaggggcggggcacctgagtcttcctcttcctcaacgacctgtgtctctagtggaactggttcttccttggtgagggtaggaggttcatcagcaacttccgaggagggcagggagggctcctccaggatctcctggcccagcgttgggggctgggagtcatccgtgcggaagtcggaggtgtgtgctgggctcagggactcactctgctgggggctggggcttgagttggtgctgctgtccaccttaagctgatagacgtcagacacggaactctggttgctgttttcgtcctggaattcaagaaggagagaggaattggctgaggcatcagaaggaaagccattaggttctcgggctgctgaactgttcgattttgacttttctttctccttgctgtctgtcacaggaacccacttaaatatcctcagggacgtgtcacccacagtcacccacttcttctcccatttccgcactttctcgatggccgccatcaccttcttgatgtcgtccttggcccggctgcgggtctccgcccggaccgaccggcccgacatggcggcggcgggagcggcgggggccggggcactgctcccaagacaccggggatcgcgcgcctcacgcgccgccgcccgcccgccatcccgggaattccggacc

SEQ ID NO: 351740 - DNA, 917 bp, Homo Sapiens
caattgtttttataattctttacctgttccttttaaagacaaggaaactgaggcccaaagttctaagttgtttggcaaatggagtctcctaccctcagctcctgcaagaacctgggggacccccaggtccagcagccacatgattctgcagcagacagggacctagagcacatctggatctcagccccacccctggcaacctgcctgcctagagaactcccaagatgacagactaagtaggattctgccatttagaataattctggtatcctgggcgttgcgttaagttgcttaactttcattctgtcttacgatagtcttcagaggtgggaacagatgaagaaaccatgccccagagaaggttaagtgacttcctctttatggagccagtgttccaacctaggtttgcctgataccagacctgtggccccacctcccatgcaggtctctgtggggtctttgggatggatctcctagggctgggctggaagcctcaatgtactgttgtcttctaggtaaccaccctgaagagaaggggtggcatcaggaaccgcagggaaccaagcagcctttggtccagtgctgctccttggaacagttgagtgtggcctcaaaccattctcctgggtagctcagtcataaaacaccgaatgcctgcctcaaaatagcctctgagggaagggagctgttgacaagtgaagccctcaggttgtgtgggattccagcaggttattacagcttgtggggggagggagggtccattccaccagctttgaatcccagggtcccctcagcttcactgggccacagtgtctgtcccaggaagaagcaaatggacagtgaggatgatggagagactacagctgccttgtctaaaacctgggatcttaaaagtgttattttggcttttatttttt

SEQ ID NO: 351741 - DNA, 411 bp, Homo Sapiens
  misc_feature (367)..(367): n is a, c, g, or t
atgataatctagtttatgattcagatacactacggtggtaaattcctacaattcaacttcatgatttagctctagtgctgtaggaggggtccagagagctgaggtctgccactgcactcaggcttgtgggggctgggtaacaccaccctgcacgtggcagttgagaaaaagaggacttgggtgtcgatatcttctgaggcagcagctgccctgggggctctgcagggaggggacagggggaggcctcggggataggacattcggggcccaccagcctgtgtggcctcagtctcagggagaaagagcacacgcgtggcacgagaagcctccagggagacctcagcttggcatcattgatggggaagtncgggtgccacccagcagtctctcctggctcgctctcctctgcca

SEQ ID NO: 351742 - DNA, 2304 bp, Homo Sapiens
  misc_feature (1993)..(2045): n is a, c, g, or t
  misc_feature (2053)..(2053): n is a, c, g, or t
  misc_feature (2093)..(2131): n is a, c, g, or t
ggtaccggtccggaattcccgggattgaaatggagcccccggacgcaccggcccaggcgcgcggggccccgcggctgctgttgctcgcagtcctgctggcggcgcacccagatgcccaggcggaggtgcgcttgtctgtacccccgctggtggaggtgatgcgaggaaagtctgtcattctggactgcacccctacgggaacccacgaccattatatgctggaatggttccttaccgaccgctcgggagctcgcccccgcctagcctcggctgagatgcagggctctgagctccaggtcacaatgcacgacacccggggccgcagtcccccataccagctggactcccagggacgcctggtgctggctgaggcccaggtgggcgacgagcgagactacgtgtgcgtggtgagggcaggggcggcaggcactgctgaggccactgcgcggctcaacgtgtttgcaaagccagaggccactgaggtctcccccaacaaagggacactgtctgtgatggaggactctgcccaggagatcgccacctgcaacagccggaacgggaacccggcccccaagatcacgtggtatcgcaacgggcagcgcctggaggtgcccgtagagatgaacccagagggctacatgaccagccgcacggtccgggaggcctcgggcctgctctccctcaccagcaccctctacctgcggctccgcaaggatgaccgagacgccagcttccactgcgccgcccactacagcctgcccgagggccgccacggccgcctggacagccccaccttccacctcaccctgcactatcccacggagcacgtgcagttctgggtgggcagcccgtccaccccagcaggctgggtacgcgagggtgacactgtccagctgctctgccggggggacggcagccccagcccggagtatacgcttttccgccttcaggatgagcaggaggaagtgctgaatgtgaatctcgaggggaacttgaccctggagggagtgacccggggccagagcgggacctatggctgcagagtggaggattacgacgcggcagatgacgtgcagctctccaagacgctggagctgcgcgtggcctatctggaccccctggagctcagcgaggggaaggtgctttccttacctctaaacagcagtgcagtcgtgaactgctccgtgcacggcctgcccacccctgccctacgctggaccaaggactccactcccctgggcgatggccccatgctgtcgctcagttctatcaccttcgattccaatggcacctacgtatgtgaggcctccctgcccacagtcccggtcctcagccgcacccagaacttcacgctgctggtccaaggctcgccagagctaaagacagcggaaatagagcccaaggcagatggcagctggagggaaggagacgaagtcacactcatctgctctgcccgcggccatccagaccccaaactcagctggagccaattggggggcagccccgcagagccaatccccggacggcagggttgggtgagcagctctctgaccctgaaagtgaccagcgccctgagccgcgatggcatctcctgtgaagcctccaacccccacgggaacaagcgccatgtcttccacttcggcaccgtgagcccccagacctcccaggctggagtggccgtcatggccgtggccgtcagcgtgggcctcctgctcctcgtcgttgctgtcttctactgcgtgagacgcaaagggggcccctgctgccgccagcggcgggaagaagggggctccgccgccaggggagccagggctgaaccactcgggggtcggagcaaccagagcagaccggcctttctcatgggaggtgctccggaggagccaggggtggcagcgggggtttcggagacgagtgctgagccaagaacctcctagaggctgtccctggacctggagctgcaggcatcagagaaccagccctgctcacgccatgnnnnnnnnnnnnnnnnnnnnnnnnnnnnnnnnnnnnnnnnnnnnnnnnnnnnnccttcctntgccggcaaggcagggacccacagtggctgcctgcctccnnnnnnnnnnnnnnnnnnnnnnnnnnnnnnnnnnnnnnnccttcctccagggaatgtgactttcccaggccccagaatagctcctggacccaagcccaaggcccagcctgggacaaggctccgagggtcggctggccggagctatttttacctcccgcctcccttgctggtccccccacctgacgtcttgctgcagagtctgacactggatt

SEQ ID NO: 351743 - DNA, 745 bp, Homo Sapiens
  misc_feature (330)..(383): n is a, c, g, or t
  misc_feature (632)..(676): n is a, c, g, or t
gtgcccgtcatggcgtggccgtacagcgtgggcctcctgcttcttcgtcgtgaggttctttctaatgattaagacgaaaagggggcccctcctcccccaaccgccggaagaaggggcttcccccgccagggaacccagggctgagccaatcggggtcgaagcaaccagagcagaccggccttctcatggaaggtgcctccggagaagcaaggggtggcaccgggggcttcgaagacgagtgttgagccaagaacctcctaaagcctgtccctggacctggagctcaaggcatcagagaaccagccctgctcacgccatggccgcccccgnnnnnnnnnnnnnnnnnnnnnnnnnnnnnnnnnnnnnnnnnnnnnnnnnnnnnncggcaaggcagggacccacagtggctgcctgcctccgggagggaaggagagggagggtgggtgggtgggagggggccttcctccagggaatgtgactctcccaggccccagaatagctcctggacccaagcccaaggcccagcctgggacaaggctccgagggtcggctggccggagctatttttacctcccgcctcccttgctggtccccccacctgacgtcttgctgcagagtctgacactggattnnnnnnnnnnnnnnnnnnnnnnnnnnnnnnnnnnnnnnnnnnnnncctccgccccaccccatcatctgtggacactggagtctggaataaatgctgtttgtcacatcaaaaaaa

SEQ ID NO: 351744 - DNA, 1536 bp, Homo Sapiens
  misc_feature (1057)..(1065): n is a, c, g, or t
  misc_feature (1462)..(1464): n is a, c, g, or t
  misc_feature (1506)..(1506): n is a, c, g, or t
gtgtgagccactgtgcctgaccaggactcttaaatttttaaaatgaccgttttctttttttggacacaactacagcaagaaataatacagatcttcaagttggcaactcattcaatatctcctacagaaggtcaggaacctagaaactgtgttccttcagggtgcaaacccatgtgttccttaacagcagaaaaaggtcagtggggcaagaccagaacaaattagatatgatttgttttttaagttgaggcttagccagaagggtttgtatggacctcttagattaaggtttgtttcacagtggggataatgtttgctatgtcaataaacaggtacttttctttcatcattctccaaatttggttcttaatgagatctgacatcccctcttccattagaaggtattgaaatccagtggaccagtttctccaagatgtctcttgaaagtaaaactctgcttaaaatctgttttttccagggctctaatcactactctgttaaattcctcaaacttgtaatgccccaaggcttgattttttccagataatggctctatcgttgcacataccctgattctgtcagcatgtgtcattggcaaaatagctttctctgccaaagctttctgacctttggctccatcttagctttgttagcaggaaaggcctgctacccagagtcagagtcaatcagagaattgttcatgtggtccttagaactttactccttacccttttatcttttctttaaactttcgcctctaaatctgccagggaaattgggacttatagaaaccttgtcaacttgtttgggtcaaaagttagatcctgttttagaaactctgcaaagagtgagattcatggcatcattgttcgccaacttctttgttcctttcatccagaagaaagggcagctcattacgtaagaaacttttcatcaggaaaagcaaacaaccgataaaaaacagaaactaagtattctgcaaggaaacctggtttaaggagaatgtattgaaactggatatgtctgttcctttttactcctccctttggcatttccnnnnnnnnnctgtaagataatcatagaaatttagttaatggaggaactacaaagatcacatggctttatggtttgcctattatgctggccaatcccggtggcacgagggcagcagggatgcagacagatgaagaggtcccatagccaagagtgtaggtcctggagccagactgcccacattcacttcaagcaattggtactcctgtattagaagaaaacaaagtcccttctcatctcctcacccagtatactcctctttttactcagcttgataggaatctttccagtcctctctgcatttatatgtatacatcattcgtattcgtgaccctaataatgatacccagtcagctcacaccagcaagaaaaagtattttttcaagcccttctggagcattggaagctnnncagtgagcatagtgaaaatacccttagagatactttcaggtnctagatccccagtgttcattttcccccttg

SEQ ID NO: 351745 - DNA, 216 bp, Homo Sapiens
aaagaaaaactccaattactctgggatattccttaatccttattttagtagctgagtggaaggatcttttccattaaaataaaattctgtcccaaaaatagctaaaatggaaactgaaatatatgaaccatttgtgacactataaaaactacttgtcagagccaactcagtttctcatatctcatatttttaatattgacttcaggccttaaaatt

SEQ ID NO: 351746 - DNA, 240 bp, Homo Sapiens
  misc_feature (37)..(37): n is a, c, g, or t
cgcttcctggggtgaggctctgggtcactgggctggncatctgcccctctcagaaaggggcaaaggggtacatggccgaaacctgcaccctctgcaccttgccaggccctgtgggggtggcatatggcttacatggacaggtgctcatctctgcccctggccaccggtgacccggccatagtccctagaaccctaagttcactcctctgtgtgtaggtccctatgtcaccctaagccaca

SEQ ID NO: 351747 - DNA, 1005 bp, Homo Sapiens
  misc_feature (49)..(85): n is a, c, g, or t
gagtatagatcactatagggcgaatggagcttcaccgcggggcggccgnnnnnnnnnnnnnnnnnnnnnnnnnnnnnnnnnnnnnatcaggccaaatcggccgagctccgaattcgtcgagagcggaaaagccggggggctggcctagccaaaaggggcgggcgagcacggcccgcgggcggcgttcgctggagctggtggaccgggcggctgaccgaggggcggacgcgcggcggggcagaccgctggggactgcgggcggcgctgtgtccgtcgccatgacagatcagacctattgtgaccgcctggtgcaggacacgcctttcctgacaggccatgggcgcttgagtgagcagcaggtggacaggatcatcctccagctgaaccgttactacccacagatccttaccaacaaggaggcggaaaagttccggaaccccaaggcatccttgcgtgtgcggctttgtgacctcctgagccacctgcagcggagcggtgagcgggactgccaggagttctaccgagccctgtatatccatgcccagcccctgcacagccgcctgcccagccgccacgctctgcagaactcagattgcacagagctagactcgggcagccagagcggcgagctgagtaacaggggacccatgagcttcctggctggcctgggccttgctgtgggactggccctgctcctgtactgctatccgccagaccccaagggcctgccagggacccggcgcgtcctcggtttctcgcctgtcatcatcgacagacatgtcagccgctacctgctggccttcctggcagatgacctaggggggctctgacagaccctggacccagggcctcacctgccactcaaccaaagagtcctcgagccggcccgccaaggggactgctgcttctttttctaaatgcatatttttcattatttataatttgtgtaaaaaacacaccttcaccttacaaggtgctgaccatattaaatgttcaagttctcca

SEQ ID NO: 351748 - DNA, 1829 bp, Homo Sapiens
  misc_feature (1123)..(1123): n is a, c, g, or t
  misc_feature (1544)..(1655): n is a, c, g, or t
ggcgagcacggccgcgggcggcgttcgctggagctggtggaccgggcggctgaccgaggggcggacgcgcggcggggcagaccgctggggactgcgggcggcgctgtgtccgtcgccatgacagatcagacctattgtgaccgcctggtgcaggacacgcctttcctgacaggccatgggcgcttgagtgagcagcaggtggacaggatcatcctccagctgaaccgttactacccacagatccttaccaacaaggaggcggaaaaggtgctgaggagttccggaaccccaaggcatccttgcgtgtgcggctctgtgacctcctgagccacctgcagcggagcggtgagcgggactgccaggagttctaccgagccctgtatatccatgcccagcccctgcacagccgcctgcccagccgccacgctctgcgtaagttccacatcaccaaccatgcatgcttggtgctggcccggggagggcaccccagcctgccgttgatggcatggatgtcctccatgaccacccaagtctgctgcaagcccaggcctggcatcccctctcgcctcagcccctaccccagaggccacacctctggccccgaggggagagtgtggcaggcacaggcagtgcagatgtatggtctctgtctcccactttctccccccttcctccgactactctctcatggcagttttcacacagcatggggcatcttatacgtccactcttgcccttccttttctaacctcattccacggggatcccttcatgtctgtgtggacagcaaccttgttcccacagctgcaatggcgctcctaggcggtcccagctgggaattacccaaccccatgacggaccctttcattgcagcgatctgcacacgtgtgggtgtttccataggacattgtcaggcacggatggctggtccgaagcacgtgcatttcagttttgaggctcctgtcctcaggcagtgtggactcaggccctgggagtcatgtggatgccagtagcctgggcccacagagctgctgggatgtggggggcatatcaagttgaagatggcaactctgatctaacgcctctgtgctcagggcccctggaggaggggctactgcccctntggcccttagacaacaggacagagaccagagggactgggcggcttgtcccaggctactgggctgtggtctctgaccccctggaggcctccccacgcctcacagaacacagtgcagacggtgggcggggagagctcgaggggaggcccagccctgcaggtgggactggctctccctccccagccacgagtatgccacagggggctttcaaaaccaggcagggccaagccttggccccactggaggtagagcaccctctggggctcccgggtgcctttaagcccgtcccaggaattgcagcaaacgaataagaccccaactgggcatacttccctgaccacggctagcctccaggcgcaaaacccatgtttccgccctgtccggttccatgcagctcctctcctaaccccctcgcctaccttnnnnnnnnnnnnnnnnnnnnnnnnnnnnnnnnnnnnnnnnnnnnnnnnnnnnnnnnnnnnnnnnnnnnnnnnnnnnnnnnnnnnnnnnnnnnnnnnnnnnnnnnnnnnnnnnacatacgttcccttctccccctgtacatgtttacctctccttctcagccccccaaacccaattccaccctccgcactcgccatgtacccccccaccccttttccgcttccccactccgccgccttctcttcacaaccccccccggtctataactcccacaaaacattccccgcc

SEQ ID NO: 351749 - DNA, 577 bp, Homo Sapiens
  misc_feature (31)..(31): n is a, c, g, or t
  misc_feature (109)..(109): n is a, c, g, or t
attaaacccacagattaaggttttggttttnaaagtgtaaataggaagcttgagctgggggggaatttggaggtagagataatacttaatcgctgtgggaaaggatgangatctagagatagagtgtatgtgggagtaggaacatatgtgtctgagaccatgctttggatgctctagcatttagatattgagaaaatgaggaagacccattaaaggagatggtggctagagttactggtgaaaaccaaagggttgtagtgttcctgaagatacatgaagagtgagattaaaaattaatggggcagcagtggctttggcatggcattgaaaagacacagttcaatttgaaaatggagtatcattgatcgtagtgctcttattatggaaaaggccaaatcaaacaatacctttgagttgatggtctgtactataattaggttaccatggttagcccagcatagacacatgctgataccggtgagtggctttcatcaattagtatgtgaagatgcatcccagtggtacaattttagatcctcttcatcattccacattatatgtatacaagataaaactg

SEQ ID NO: 351750 - DNA, 181 bp, Homo Sapiens
aggccggtactacttttcacagggattagtattatctctacctccaaattccccccagctcaagcttcctatttacactttaaaaaccaaaaccttaatctgtgggtttaatatggatctaaaactggcaaaatagcatttttataaaaaatcatgcactcagagaaaaccaaccctccct

SEQ ID NO: 351751 - DNA, 425 bp, Homo Sapiens
aacattttagggggaaaggggagggaatgtttaaaaagaaagtccttgatttagttttttagtattgtaaagatactgctgacctgtgcttcatttctaactgtgtaaacttttttttaacaaaatgtatcattcgataaagtgaattttaaaaaagttacataactcttcatttttttatttccaaatcgtaggtttttttaagctgtagaactgttatctgtaatatcttgctgtagaaatatcaaatcatttgaaaatttgcacatttttgtgccaaactccatctacagtatcagtctcgtcagatatattaattttacacttcagttctgattggtgagaaagtaccccttctcttcaataatcaaagataattattattttgttttgtttttggaatcaacaggtggcatccgataaac

SEQ ID NO: 351752 - DNA, 586 bp, Homo Sapiens
tatttctgcagatcactcgcactcacccttctagaaggtctaacgaccattagtcatttttgtcttttggaacaagccaaccaaaacaaaaagaccatggctgcaggtgatcctgccaacttgaggaatgccagaaatgccattttggaagagctgcctcgaactgttaacaccatggcccttctctggaatgttctcagaaaggaggagactcaaaagagacctgtcgatctcctaggggccacgaagggatcctcttccgtttactttaaaaccaccaaaaccataagacaaaaaattttagacttcttaaaccccttgacggcccatcttggggttcagttgacagcggctgttgcggcagtgtggagcagaaagaaagcccagcgtcacagtaagatgaagattatcccaacggcaagtgcatcccagctaacccttgtcgacttggtgtgtgcactcagcaccctgcagactgacacgctgctgcacctggtgaaggaggtggtgaagaggccaccccaagtcaaagggggtgatgagaaatcgcccctagtggacattcctgtgttgcagtgtgcttccg

SEQ ID NO: 351753 - DNA, 495 bp, Homo Sapiens
  misc_feature (37)..(37): n is a, c, g, or t
  misc_feature (397)..(397): n is a, c, g, or t
  misc_feature (405)..(405): n is a, c, g, or t
atttgggcctcctgcctgccttctctttgtttctgtncctcttcccatctactcccctacgccccttcaaccttttttctctgtctgcttcacctgagaagaaagtgtatgaagagagtgtcctcctctcgcatgagccagatcagccagaaaatgcaacacttggaagagttaaatgctgttcagtgaagatttcagccccaggcctttgctgcaagtaaccctgtggcaacagtggattctcagacatgatactctcatcatatttgcaactcttctctctctttcttccccacacccaagaggaggattggtggtagggggcaggcagagggggtggggagaagtttcctggggctccatcaatggctgcatcttttctggactcagcagtctncttgattnccatgtagagtgttggaaaggagttactgattgcatttcctctcattaacaattgggtgtgtaataaaaagcattggtacttcatcttaa

SEQ ID NO: 351754 - DNA, 1756 bp, Homo Sapiens
tgactccatgaagatcccttcaggacagcctgagacagcagatgtgtccagggagcaagtggacaaggaattggacagggcaagtaactccctgatttctggactgagtcaagatgaggaggaccctccgctgcccccgacgcccatgaacagcttggtggatgagtgccctctagatcaggggctgcctaaactctctgctgaggccgtcttcgagaagtgcagtcagatctcactgtcacagtctaccacagcctccctgtccaagaagtgactgttgagaggcgaggaggtagtgggtgaggctacctgactcacttcaaatgcatgttttgagatgtttggagattcagcaattctgtcttcattgctccaggatctggtatactgttctcataaaactgagaggagaaaaaaagtgaaagaaagcagctgctttaagaatggttttccaccttttccccctaatctctaccaatcagacacattttattatttaaatctgcacctctctctattttatttgccaggggcacgatgtgacatatctgcagtcccagcacagtgggacaaaaagaatttagaccccaaaagtgtcctcggcatggatcttgaacagaaccagtatctgtcatggaactgaacattcatcgatggtctccatgtattcatttattcacttgttcattcaagtatttattgaatacctgcctcaagctagagagaaaagagagtgcgctttggaaatttattccagttttcagcctacagcagattatcagctcggtgacttttctttctgccaccatttaggtgatggtgtttgattcagagatggctgaatttctattcttagcttattgtgactgtttcagatctagtttggggaacagattagaggccattgtcttctgtcctgatcaggtggcctgggctgatttctttggatccctctgtcccagagccacccagaaccctgactcttgagaatcaagaaaacacccagaaaggccttaatgacctcataggcactcttccaaaaagacaacagaactggaatgagaggcctgggtctgtctcctgccttagcaggcctatcaatttcttgtcaatctctttttttccttgctcacattaaaaggaagcatggagttctaatgctcccataaactatgtattttggcaaaacacttcactactccaggtctcactttccccatctgtaaaacagggtttggactaggtgttccctggtattctgtgatctgcctcttgctgccattctttctctcctctgcttctctgtatttttcttctgttatccctgggggtgctcaggttcacttgattgtctgtatttctgtgtggttgtagcaaggactcagcctcatgtagcacgaataggggtgtggttcatggcgtgttgacccagcagagcactccctcccactaacttgttctgcatgtgtagagtctccccattttttttaacgcaaccctttcccctttttcctaccccacagctctgttccatgtaagttgccaacagtttcactgaacagtggggtatgtgatggttttggcatgacatcttcagtatgagggggacagtttgacttcactttgagggtgtgatgtctgtagctatgtggaaggtaaaaatagtggtgtgatcatgaaccaaaggaatttatgttttgtaacttgggtactttattttgcattttgttatactattaaataattttttcctgtt

SEQ ID NO: 351755 - DNA, 1584 bp, Homo Sapiens
  misc_feature (911)..(924): n is a, c, g, or t
  misc_feature (956)..(1037): n is a, c, g, or t
  misc_feature (1164)..(1227): n is a, c, g, or t
  misc_feature (1457)..(1508): n is a, c, g, or t
tgtatattgaaaaaatggtggccagtttttaagttccttaatagaagagaattatgtctcagcacatataacagtaatgctaatttattgaaactactgctgttagagcacttcttattcattgtcttttagtgaaatttatggcgtaacactttgtcagagaggaggctatataatttggagcggaaattgtctataagtaggcatttatttcatgattgatatgtcacagaaatcatggtagtaaatcacattgctatttgaataccctgtttttgtaagtttttaaaactcatattctgaaaagatttcattctcttagtgttagcttgggagttagattgccatgattaaactattatttatccttgtgtaatattagtttttaactttaacatctgtttctttttaatctataatgagctagttttatggaaaatggaatttcttactatataaagaatacagagactcattgtattagagaatcaagtcagccagctaaagtatcctactgttaaatccttaaacctaattttggaaaagagaaagttaatcaatgtatttaccttacatgttggaaagaactatgttaggtctgattcatgtgaagaagatgttgcaaaggatttatttcacaaattttaaaggagatatgagtaaaagtttttatcttttcttgactttttctcctgaacacttatgtcttaggcaagtgggtcaacatgaggatttgaacgcctaattgttggtaaatggttgaggcatgacaaaaatattaatatccactgtttaccatcatgttatttgaaacaaaagtgaccatgtatactatcttgcttgaagaagtctttgacagaaaaagcaatatcatgtcatttataaattttcttgttctaaagaaagcagtnnnnnnnnnnnnnnaattatgtaaataaaagttattttatatcccnnnnnnnnnnnnnnnnnnnnnnnnnnnnnnnnnnnnnnnnnnnnnnnnnnnnnnnnnnnnnnnnnnnnnnnnnnnnnnnnnntccttgtgggccgccccggccctcaaaaacttttctaaaccattcttttggggccggggcccagaaggaaagggaccttggccatacctgttcccaaggaaatccgggccaggactagggctgggannnnnnnnnnnnnnnnnnnnnnnnnnnnnnnnnnnnnnnnnnnnnnnnnnnnnnnnnnnnnnnntgggggccatcacggggatccaaccaacagggagccccaagcgggagcctccattaattcaaatttaagcccccggggcccttgaccctctcttcggaagaacaaggggggaaaaattcattgaaagcacttccctcccagaatggggagaccccatcccccaagcggggaatgaatgaaacccggaaatccgccccacgcgggcattcaccccccctttcgcccccttnnnnnnnnnnnnnnnnnnnnnnnnnnnnnnnnnnnnnnnnnnnnnnnnnnnnggttctcccctattttgggccacgggtctcaaaatgcacacggggggggaaaactgcccccccgggatattcctcg

SEQ ID NO: 351756 - DNA, 1062 bp, Homo Sapiens
  misc_feature (1037)..(1037): n is a, c, g, or t
  misc_feature (1047)..(1047): n is a, c, g, or t
cggcaattacaggacgtatgattgttcagaagcactgcctgccggctgtttcctaagcaccacatttcacgggagcaccaggttgagatgatggaattatttacttttaaatgtaacatctcgtacagtgctcaaatgcagacgtgaacgtggactgtaaccttaaaaacaaaggcagtacatgccacactactacccttcctgctcttgtgcgcacacctaccctgatgatgcagccttcactggatatcaaaccatttatgtcttttccagtggacagtagttctgctgttgggctctttccaaattttaacacaatggatcctgtgcaaaaagcggttattaaccatacatttggagtatccattcccccaaagaagaaacaagttatttcttgtaatgtctgtcagcttcgctttaactcagatagccaggccgaggcccactacaaaggaagtaaacatgccaagaaggtcaaagcactagacgcaacgaaaaataaacccaaaatggttccttccaaggacagcgcaaaggctaatcccagctgctccatcactccaatcacaggcaacaactctgacaaatcagaagataaagggaagttaaaagccagcagttccagtcagccatcaagctctgaaagctggctcatttctcctcaaatctggcacaaacacccatgccacctggagcagccacttctccctccaagagcacaaatggagctcccggtactgtgttgaatcagaagaagaaaaagccaaaaaattactttattgttcactatgcaaagtggctgtgaactccctgtcacagctagaggcacacaacacaggatctaaacacaagaccatggttgaagctcgtaatggggctggtccaattaaatcctatcctagacctggatcaagattaaagatgcagaatggcagtaaggggtcaggactacagaacaagacatttcattgtgaaatctgtgatgttcatgttaattcagaaattcaactcaaacagcacatttctagccgaagatnaaagatcganttgcagggaaaccac

SEQ ID NO: 351757 - DNA, 462 bp, Homo Sapiens
ttgagttccccagcacagggacctcttagcccatacctgacgacctccccttccccaggcatccccagcagcattgtggccagctgtggtggtttcagtccatccaatgcttcctgccatgagcaagggagtgtgtcccataggttgtctgtgaaaaattcctacagaagaaggggagaagccatcagcaagctactaccactcccattctttcccacaccactctcaactacacacctcattgcctgcctcttcccagcactgctgccacatagggccactgcctgtaactggcaggtacctcctgctaagccgagtcagttctctgaagcctgctccagcctccccgactctggtggcttaactctgtttccctggagtccagattgcattctggacacacttcttttagcaatttctgcacttatttgtgtctgttttctctattaaattgaatttctt

SEQ ID NO: 351758 - DNA, 1245 bp, Homo Sapiens
  misc_feature (104)..(105): n is a, c, g, or t
atcttgaaacgggtaggcagtggagtttcgaaaggccaagggcccaagcttttctgtaggcggctcagcaatatccttccaggggcatggcagggccccctccnngaagccggtagggcagttcatagccaggcagcccagccacccactgactcagtgggtagccgccagggtcactcagcttcaggtagcagcagcccactgaggccagggccaccacctcaggaccagcaggagaagtgtctcagcaaggcaacactcagatccccacaggcgtggaggcctgtgagcagcaagcgggccctgccctgacacgggttctccagtggaagcagaagctcctcacacagggctgtggggtctacccacctaaccacgtggtgtggggagtgacgagggctggtttggaccacctgcgggttcctcttctcctctttctccagagcctgcagaagctcctggtccaggcgctgggctctctccaccagtctctgatccccttcgatgctcttcaccatcaaccccaggccaagagccatgaagcgggagagatggccctggcctgagcccacgtctacaacctgggtgcagcctgtgaaatcactcagcttcttcaccaactctcccagcctccggatctcatgctgcttcttgggcctgacatgtttccggaatggagctgttagtcgggagctctggctggggttctccaggaattctgagggggtctgaaagccaggcatccgggtaaaggccagggcacacgccgtggacttcagggccagcagggtgagtggccacactgacctgtacctgacgacctccccttccccaggcatccccagcagcattgtggccagctgtggtggtttcagtccatccaatgcttcctgccatgagcaagggagtgtgtcccataggttgtctgtgaaaaattcgatgatgtaggcatccaagatggaacggtagagtgccaggacacgggtgaggttaacagctagctgcttcctcccctcatgagagaggcctcgggcggagatgcccggcatcccggggtccagcagggagcgcggggagcgagaacgcagtgaacagggatccagggtcagtactaacgcgggtccaggacccggacggggctcaactctgcaggcagaacaggaagagttttgggtccagtctccgacgctgcctttccgggatccgatgctggagtggaagatttgaggcgccccccagacgtca

SEQ ID NO: 351759 - DNA, 1396 bp, Homo Sapiens
  misc_feature (1081)..(1094): n is a, c, g, or t
gggggagggaggcgctagacgaatcgggggctatgcgtcccctatcgttcacatgttcctggagaaggagtttggatactgacaaatcctgcatcaggcagggctacctgagtccagagatctcatcctgagcctgtctgcttgcctggaaccacaggcaaaaagagtttcagggcagccggaataggacaacatgttcctagtataactaaaatggcctttatcaagttgctttaaagaggtgttctttgactgctgaaagaaatcatagatgacacaaacaaatggaaacacatcccatgctcatggatgggtagaatcaatattgtgaaaatgaccatactgccaaaagcaagctacaaattcaatgcaatccccataaaaataccaacatcattcctcacacagttagaaaaatcaatactaaaattcatatggaaccaaaaagagagccgcatggagccaaagcaagactaagcaaaaagaacaaatctagaggcatcacactacctgatttcaacctatgatataaatccatagtcaccaaaacagcatggcactggtataaaaataggcacatagaccaatggaacagaatagagaacacagaaataaacccaaatacttacagcaaactgatctgcaacaaagcaaacaaaaacataaagtagggaaaagacaccctattcaacaaatggtgctgggataattggcaagccacatgtagaagaatgaaactggatcctcatctctcaccttatacaaaaatcaactcaagatggatcaaggacttaaatctaagacctgaaaccataaaaattctagaagataacatcagaaaaacccttctagacattggcttaggcaaagacttcatgaccaagaacccaaaagcaaatgcaacaaaaacaaagataaatagatgggacttaattaaactaaaaagcttctgcacagcaaaagaaacaatcagcagagcaaacagacaacccacagagtgggagaaaatcttcacaaacgaagcattcaacaaaggaataatatccagaatctacaaggcaatcaaacaaatcacaagacnnnnnnnnnnnnnntccaaccaaatacaaataatcacatcaaaaagttggctaaggacataaatagacaattatcaaaagaagatatacacatggccaacaaacatataaaatgctcagtatcactaattatcagggaaatgcaaatcaaaaccacagtgcaataccaccttacttctgcaagaatggtcataattaaaaaatccaaaaataatagatgttggcatggctgtggtgaaaagggaacactaccctgctggtatggaaaaaaatatggagattccttaaagaactaaaagtagatttgccatatgctc

SEQ ID NO: 351760 - DNA, 1349 bp, Homo Sapiens
  misc_feature (29)..(29): n is a, c, g, or t
  misc_feature (34)..(34): n is a, c, g, or t
  misc_feature (36)..(36): n is a, c, g, or t
  misc_feature (1092)..(1198): n is a, c, g, or t
ccagatatttgatgttacaaactttaggntcctngncagagttggtatcacaaaatcgtttaataaaatttataaaaatgcatctttgagaatacttttctcagcttgaattgttttccttttccacccccaaagaaaatacacaattatcagcacccacacatgtatacactcaaaactacagtgacattctctacacagaactatattcgatatagcttgaactgccgaaaaatcaagacaattccaaaaagtgattgcagggttgatttttttctccaaaacacttgagaaacagtaaagctatttcaacaaaagtcttttctttgattgtcaaaagttgaaattcacatttaaataaaaagagatccaaatcaagatcctcactaccccctacccctcaactaaccccctttagggccacattttcttcttgctcctaagaaaaaaatttggaattttgaatattctcggttttctgtgcacacctggaattgggcaaatgtgttcagctcagccagcattttctgtagacatcatcaaaagcaggcacttggggattctgggctttgagtacaaaccacggatcttgtgtcagaaacacatgttgagactcctccattccttccagaattttcagagatgaggtagacccacctcaatcatcctcagcatcagtttgctaaattgccaggctcaatgacaagctctcctgccatctccaagcccacttttcatagttccgctctgtctttggctgcagcactttaggcactattctaagtcctggagtatatcactcttgcttcagagctaaataaacattaatgaacacacttactcagaacaagtcactggatagctgcccattgcaagttacatactcaggagatgaaagagggaagccattaaaggtcttcagagtagacaatacctagtcaagatgtggccagacaaagacacaaacttcttaccctaaaagagcccaataatttctgcatcagagaactcctatcttgggcaaagcaactgaattcaggagtgagagttgatattaaaacatggaggctgggcacagcagctcatgcccannnnnnnnnnnnnnnnnnnnnnnnnnnnnnnnnnnnnnnnnnnnnnnnnnnnnnnnnnnnnnnnnnnnnnnnnnnnnnnnnnnnnnnnnnnnnnnnnnnnnnnnnnnggaggctggtgggagaactgcttgagccccagagtttgaggttacagtgagctatgatcacatcactgcatcccaggcctgggcgatggagcgaaactgtctcttaaaaaatggcagggagttggggagctgggcaggtgcagtggctcat

SEQ ID NO: 351761 - DNA, 877 bp, Homo Sapiens
  misc_feature (178)..(188): n is a, c, g, or t
  misc_feature (521)..(703): n is a, c, g, or t
  misc_feature (705)..(714): n is a, c, g, or t
ggtactctgtcccattggtcatgtgcctatttttataccagcactatgctgttttggtgactatagctttgtaatatagtttgaagttgggtaatgtgatgcctctagattggttctttttgcttagttttgctttggctttgcagactcttttttagttccaaatgaattttggcannnnnnnnnnnctagttctataaagaatgatgatggtacattgataggaactcattgaatttggagactgcttttggcagtatggtcattttcacaatattgagtctacccatccatgagcatggaatgtgtttccatttgtttgtgtcatctatgatttctttcaacattgttttgtagttttccttgtaggggtctttcacctccttggttaggtatattcctaagtgttttatttttacagctattataaaagggtttgatttgattctcagcctggtagatgttggtgtatagcactgctactgatatgtgtacatagattttatatcctgataaatagnnnnnnnnnnnnnnnnnnnnnnnnnnnnnnnnnnnnnnnnnnnnnnnnnnnnnnnnnnnnnnnnnnnnnnnnnnnnnnnnnnnnnnnnnnnnnnnnnnnnnnnnnnnnnnnnnnnnnnnnnnnnnnnnnnnnnnnnnnnnnnnnnnnnnnnnnnnnnnnnnnnnnnnnnnnnnnnnnnnnnnnannnnnnnnnnaaaaaacttgcagggaatacccccctaacttcttcccttgctttgtcctggaatattggcccatggaaggaacttgacatggcggaattgtgggccacccccccgtggacccagaaaccgggaaaaacaccccccaccctctaaaaaaacctccaaatgagaa

SEQ ID NO: 351762 - DNA, 146 bp, Homo Sapiens
ttcgcgccctccccggagttctggccaggaggctctggctggattccagttgttacagagctcgctggagacttccttctccactgtggcattttccccgctcctctggccgccgaaggagccctgtgccctgtgaaaagtaggac

SEQ ID NO: 351763 - DNA, 551 bp, Homo Sapiens
  misc_feature (209)..(217): n is a, c, g, or t
tatgacgtgtggaaacaaaatggacacttcaaaatacaagaaaggcttaggaaaataacagtgaatgtagctaaaaatacagatcaaagcaattagagagaaactaatagatatgaaagaaagacaaaaatgattaagcataaggacagtttcagtaagggacaaatcaaaaacagtttgtgcaagtaatgtgtacaaacactttatcnnnnnnnnncttactgacatgagttggccgcagattctggatattagtccttttgtcagatgtatagattgtgaagattttctcccactctgtgggttgtctgtttactctgctgactgttccttttgccatgcaaaagctctttagtttaattaggtcccagctatttatctttgtttttattgcatttgtttttgggttcttggtcatgaaatccttgcctaagccaatgtctagaagggtttttccaatgttatcttctataattagtcctttccccactttatgcttttgtttgctttgtcgaagatcaattggctgtttaagtatttgggtttatttc

SEQ ID NO: 351764 - DNA, 712 bp, Homo Sapiens
gtttatcgatgccacatgtagaatgaaactggatcctcatctctcaccttataaaagaaaccaactcaagatggattaaggacttaaacctaagatcagaaactataaaaattctggaagataaaattggaaaaaaacccttctaggcattggctaggcaaaaatttcatgaccaaaaacccaaaagcaaatgcaataaaaacaaagataaatagctgggacctagttaaactaaagagtttttgcatggcaaaaggaacagtcagcagagtaaacagacaactcacacagtgggagaaaatcttcacaatctatacatctgacaatggattagtatccagaatctacaacaaactcaatctatacctccgacaaaagattaatatccagaatctacaacaaactcaagcaaatcagtaaggaaaaaaacaatcccatcaaaaagtgggctaaggacatgaatagaaaattctcaaaagaagatatacaaatggccaacaaacatatgaaaaaatgctcaacatcactaatgatcaaagaaatgcaaatcaaaaccacaatgcgataccacctcactcctgcaagaatggacataatcaaaaaaaatcacaaaacagtagacgctggcatggatgcagtgaacagggaacacttctacactgctggtgggaaaataaactagtacagctgctatggaaaacactgtggagat

SEQ ID NO: 351765 - DNA, 1752 bp, Homo Sapiens
  misc_feature (792)..(837): n is a, c, g, or t
  misc_feature (1182)..(1250): n is a, c, g, or t
  misc_feature (1632)..(1632): n is a, c, g, or t
gcatagtatgacacctttattgtgataaatgattctgtgaaggtatgtctggaagcacacaactaaactattaacagcagttacctctgggaaataggacagggatttcaggttttattttggccatagacacgttattttgattctaaattcatcatttatttactaacttagcattactattgagtaccaaatatttgccagggaattgttctgggaatacagtaataattcagtttaaaaaaataaaatctttggagcttacattcaagtgggaaacaacatgcaaatataaacaacaaaggtaaaccatatagtatgtttaaaagtacaaaagagagccaggagtacaaaatacagcagggagatgagacaggaatgccccagtagctgcagctttagataagcctcagtgagaatgacacttcaggaaagaaatgaagaggctaaagagcctgaagaacatttgggtattgcaaatagtaagtgcaaaggcacgaaggcctgacctgttttggaggcagggaggacggcaggagcagggtgaacacagaggtgatggggtcagagaagggagaaaaggggtgcttcatgttttgcccagcattgaaggctattgtggacttttgagtgccatggtcgtctattggagagttctgagggttggtgtgatctgacttggatctcaagaagaacattctggattcaatgttgaaaacaaatggaaaaggagagagagcaggggcagaggcagcaagctcaggagaaacagcgattaagtaaacaatgggnnnnnnnnnnnnnnnnnnnnnnnnnnnnnnnnnnnnnnnnnnnnnntcatttatcagaaatgttttgcaaatatttttctgccactctacagcttgtctttttgttctccttatggtacctttcaaagagaagttctcaattttgataaagtacaatttatcgatttttccttcatggattgtgcttttggtgttggatttaagaaatcttttcctaacccaaggctgaacacgttttccttgttgtcttctagaaattatacagttttggggaactataatccatttggactttaatctttgccagtgttaagatatggatcaatttgtttttaattttgcatctgatgcccaattattccagcatcattttttcaagacctttgcaccnnnnnnnnnnnnnnnnnnnnnnnnnnnnnnnnnnnnnnnnnnnnnnnnnnnnnnnnnnnnnnnnnnnnnatgcacagccagcagaagggactgatcccaaaaacatatgagtgaatgaagaggagtactgggtatgaagcttctcatctttaggtgtatcctaaagaagagttactgaacaaacacagagaagcagaaaaactccggcactgttacatatgtgaagaaaagtttcaaaatgataactaaacaatgtaaaatgaggcaaaaaggggcctctacgtagtgtttacgtatgagtggtcttagagaagtgtgtgactaagtagaactagattgcagaaggctgaaagagtaatggcagggggacctacatataccaaacagtcactaaggaagtggctaggccatctctcccgggtgaacctttctctgtgttccccatggcatnttattcatacctctgtaatacaatcttttgctcatgcttctgttccattctgagttccttgaagggagacatcatacctcattcaactacagtactaaatacagtgctagcaacaaaaca

SEQ ID NO: 351766 - DNA, 680 bp, Homo Sapiens
  misc_feature (50)..(118): n is a, c, g, or t
  misc_feature (463)..(508): n is a, c, g, or t
ggattcactcatatgtttttgggatcagtcccttctgctggctgtgcatnnnnnnnnnnnnnnnnnnnnnnnnnnnnnnnnnnnnnnnnnnnnnnnnnnnnnnnnnnnnnnnnnnnnnggtgcaaaggtcttgaaaaaatgatgctggaataattgggcatcagatgcaaaattaaaaacaaattgatccatatcttaacactggcaaagattaaagtccaaatggattatagttccccaaaactgtataatttctagaagacaacaaggaaaacgtgttcagccttgggttaggaaaagatttcttaaatccaacaccaaaagcacaatccatgaaggaaaaatcgataaattgtactttatcaaaattgagaacttctctttgaaaggtaccataaggagaacaaaaagacaagctgtagagtggcagaaaaatatttgcaaaacatttctgataaatgannnnnnnnnnnnnnnnnnnnnnnnnnnnnnnnnnnnnnnnnnnnnncccattgtttacttaatcgctgtttctcctgagcttgctgcctctgcccctgctctctctccttttccatttgtttttcacattgtaatccagaatgttcttcttgagatcaagtcagatcacaccaaccttcagaactctgcaatagacgaccatggcactcaaaagtcaa

SEQ ID NO: 351767 - DNA, 497 bp, Homo Sapiens
  misc_feature (475)..(475): n is a, c, g, or t
ctctttcagccttctgcaatctagttctacttagtcacacacttctctaagaccactcatacgtaaacactacgtagaggcccctttttgcctcattttacattgtttagttatcattttgaaacttttcttcacatatgtaacagtgccggagtttttctgcttctctgtgtttgttcagtaactcttctttaggatacacctaaagatgagaagcttcatacccagtactcctcttcattcactcatatgtttttgggatcagtcccttctgctggctgtgcattggtctaatggaacagaatagagtccagaaataacccaacatgtatgtgggacaactggtttttgacagaggtgcaaaggtcttggaaaaaatgatgccggggaataattgggggcattcagatggcaaaatttaaaaacaaattggtcccctatctttaacactgggccaaaggtttaaagtccccantggggttttggttccccccaaa

SEQ ID NO: 351768 - DNA, 926 bp, Homo Sapiens
agttcgacggagactctcaacttatgttcctcagatcgtaacaaatcagctcagctacaagtcttccccaaagtggagctattctagtcatatatttacttagttttcaaagagcaggaatcctgcaaaggtggagaagcgtgggtggtccccatggagagcgccattgcccattcgcagccaaacctcatccccttttggctagcttcagcacagcatgattgctggatgtatctgatttgcccttcatttcatagctgtacatgctgaagactgtgttgccattgtgcataaggtacacatacacttcctcaacatcctcatgcttcatcatgctgaaggtgaagaaatacacacctgatactggggccccaaatctaccagtcatgacatcaaagaagtttccaatgttggtctcaacactgctgaagataatcccactgttctgattgctgaagtgggttgccagagaagccatgaatgcaatctgaagttctggtggaatccccgggtagcccttctctcctttggggccatgctgcccccgctcccctcgaggccccaggtcacctttgtcgcccttctcacctttggctccttcatgaccagtggctccattgttgccattgtttccatggtttcctggaatgccaggagggcccggtggcccaggggggccttggtagcctcgaaagctgtagtctccatgacaacacttactgcagtctgggggtagtcctccggtttgtggagactccatgtattcatcttgacacaggcaaaaagggaggaaaaacaaagccagcagttgccaatagatgagctgcctccaaagcatgattctcaacagagcctcagagtctccctgagaagacagcagagctccaggagcgtggtctcctcgggcagatgccaggactggagct

SEQ ID NO: 351769 - DNA, 598 bp, Homo Sapiens
cagactcctggcctcaggtgatcctcccgccatgacctccaaaaccacagggattgtaggtgtgagcactgcacccagccttatgtttttttctacataaaaaacagcacaggattatcttccagagctaataaatatgttcaaataaccacaaccccattaaggaaaaatatcactgggcagcaaataatcaatccagaccaatatgatcacaattgctgtgaaggtgagaaaagttcatttttattatgtttccacaagagacgcactctattgttctcttgaaaacacacagctcatgtcctcctttagaacacacatcctctttaaagtaacatacaaagatgccaaaacaaggtaaaaaattacatctgaattctcacatttcaaacatatatgaaatatcaaataaaaatttatttttacaagaatttaggggaactactacatagctataaatgtaatatatatgttaactaagtatcacagataaaaaccatgctcccttcagcagcacgtgtaataatagatacaaagattggaaggtaaaagatttaggatgaaaagaatcctctcttaaaaaggaaaacaaaattat

SEQ ID NO: 351770 - DNA, 1063 bp, Homo Sapiens
aagctccttccctgggccggccaaggtggctgctcatccagctgcccaagactcccagtcctggcttccagggccttgttgaggatctccagtcacaagacccccggagctgttgcacagaacatcaaaacagggagctggctgggcccttcacagccatggccagagcagaagtgaggtaacaaggctgggcagagaggtgggaagggagctctctaaatagtgtgcaagtttctgctctgcactatgacagcaagcaggggccttaaaagatggccttccaggaaaatgctcctctcagacccaaaatgcatcttctagaagaaaacacagaggtgaagaggattggggccaacctgctggaggttgggggaatgaaagtcaaggatgtcaaggatgtcaagtggtgaatgggatgattgtcccatagcctagagacaagtggcgaaggtggggagagtcaggaaggggccccggagattcctcctggaggaggcaggcagggtatgaggtgtagggaggccagagccctgccatctgggggaagggagaagagtgctatttctcctgggggcagtaggagaaaagggctggctttggctgccctgaagagcttaaagaagtggcatggtatgacacagaaagtacccttctgggaccacaagcatccagaaagatacttcccctagtcctttctccaggatctcatcttagggatactgcctggaaatgtaataggtatagttcaagtttgggtggggggcagggacacggagagaatccacttctcacaaagcattcctcttgagctctctttgtcctccccatgtcattccaggttcttagtgtcagtgttctaaggcaaacccaagggttttagccaaagcttcatactaaatccaaaccctatcttaacaaaagagaagtgctagaaccagaagtggctactctccactgtttcttctaccaataaagaggaaggatggatagatgaaaggctgaacagaccctagagatagaagatgagctccattgaaaagaatgttcttctcccaacttagag

SEQ ID NO: 351771 - DNA, 188 bp, Homo Sapiens
agctgggtatgaggtgtcggagggtaagccctgccatctgtgggaagggagaagagtgctatttctcctgggggcagatagtgagaaaagggctggctttggctgccctgaagagcttaaagaagtggcatggtatgaccacagaaagtacccttctcccttcccccagatggcagggctccggccta

SEQ ID NO: 351772 - DNA, 776 bp, Homo Sapiens
  misc_feature (63)..(176): n is a, c, g, or t
  misc_feature (180)..(180): n is a, c, g, or t
tcatcctcccatctcagcctcaagtagctggaccacaggcgggtgccaccacgcccagctaannnnnnnnnnnnnnnnnnnnnnnnnnnnnnnnnnnnnnnnnnnnnnnnnnnnnnnnnnnnnnnnnnnnnnnnnnnnnnnnnnnnnnnnnnnnnnnnnnnnnnnnnnnnnnnnnntgancacccatgcccagcccagacttccttctcatccaggaaattccaaaatgtctttacatacatattcttatattgtgtaataaaagattctgaagtccattactggctagaataataactagaaattgcttaatattactatacattgcatttgaacttaatctccacagtaacaattaggtagtattacttggatttcatggatgaagaaaaccaagatacaaaaagttcacacagccagtaagcagatgagcctgacttcatagtcatacatagcctgaattgagtcccagcaggagcacatgggcatggacatctaccagatttgggaactggcgtagccaagcaagaaataggagacggaatcaggagttaggattccatgcttagcaccatcccagatggatggctgcctccctctgggagctgcactcttctgaggatgcaggcatccagggccagggtgcttctgtgaggagtgccagcacgtgccactctgctggatacaagctatcatgttctgagggctgcttccctcagcataagaaggggcttctattgggatgagtaggcttcattgtagggtccacttgagtc

SEQ ID NO: 351773 - DNA, 1514 bp, Homo Sapiens
  misc_feature (762)..(762): n is a, c, g, or t
ctgggattacaggcgtgagcaccgcacccggcagagttttataatgaaaaattaactaatattctagtatgaagtgaggaggatactgaacaggatgtggctaaagccaacctgggacagccatggggtggcttggtttcttcactccagtgttgtccctaccatttcgcagcattgatttaggaggctctgggacaaaagagaagccaaagagcagttttcccagttcactcactctggcaaaatcaggaaaaaaaagtctgcttttgacatcaaattccactaatttggggcagcgttgggtgaggaaagtattgtgaagacaggcttcttggagtaggggcagccacaattcagtagacactctaggctcggaggctgccactgtagttgccaagctcaggttgggtggttctgtgctgtatggatggaataggacctgggctggtcatcttcatgtcgtttcctctctgtatcaatggaagttcaacccgcccctacctcttcagatagttgtaggccacttttctcttgtaactttggaaaacaaaagaggagaaataagtatcataccatatgcgtgtctccaaagtggatgtggttgcctcaaggcaggtggcaggcaggggtgacctgctggccctcagatcaatggtcgtggcaggtctgagagctgtcccactggccagacttctctccagcagcaaagccagcctggggcttgcatgttgatcctgagcaagcttaacggggtgaagctgngctctctcccccctgtgactggagtgcatgttgacaccagcactttttctgcacatgtatcttcaatccaacaaggccgtttttttaatgctgagtaacaggccaccaagcggctactgcgttatatcttctcagcaaccggccgcagtctcttctgcaccattttctacaccagacctgcttggcaccacagggagctcttttcctgccctgcacaatgacattccaaccaccaccagccagacattacagccaaccttgctgattgtcacaagcaggaccttggggccactggcactgtcagatagtaagccatttcttgggtagaggaggaaactcctctccacaaatccacttgggcctgtgcaaatggcacttgaaagagtccccatgcacttggagtccatgagccaatgggatatgcaaagacgcttaaacatttcagggctggtttctctgttcatatccaattctggtgcttaggaacagggacccatgctgatgcccaagggcaaaaagccccacttcctttaaggaagtgaacaggcctgaccctgatgcccaataacgggcaaccctaggctttttgtttttcttgcttttattcctttttgttgttggccttgtgctgcgtttgtttacaaaagatgtattttgtttaaccaaatattaaaaatggaaaactccatatatgtctccttgtctgcctgaattctataattgtgtaaagaaaaataaactttagtatgaaa

SEQ ID NO: 351774 - DNA, 432 bp, Homo Sapiens
  misc_feature (18)..(18): n is a, c, g, or t
  misc_feature (37)..(37): n is a, c, g, or t
  misc_feature (92)..(92): n is a, c, g, or t
  misc_feature (103)..(103): n is a, c, g, or t
ctccctcggaaccccctnccctggttaacgggtaccntttgttggtgtgttttgcccctaacattacagatagacctatccatatatgaccnttatgaataanttccagttaatttgcctttgtataagctgtctgaagccttgctatgcctgtataagttgtgtttgatggatcagtgtgagtataaaataaagcaaatcacttttcttttgtattatctatggatgccactatgaaagctgacattaagccactaaagagttttctatgaataagtgtaagtaaatgctttgatatatataaacctaaataaaaagattgtattgatacagagacattggagaaggagattttaaggcagttctttaggtttaaaaaggcttgctgtaaaatggtgcgttattccgtttattaaagatcatattaatgac

SEQ ID NO: 351775 - DNA, 916 bp, Homo Sapiens
  misc_feature (702)..(702): n is a, c, g, or t
  misc_feature (832)..(832): n is a, c, g, or t
  misc_feature (894)..(894): n is a, c, g, or t
taaaatgaatgaatgaggtaaattattctattagaggtaagtgccgatggcctcaggcttactaaggcataacctttgtagcagcacaattttcagtgaacaacttcacattccctgcatgcacagaagcctcagctttccaggttactcttgggctagaatcactgtgaacggggctgcagtggggctagtggaaagggcacagaagccaggagacctaggtgcaagcctgtcacttgcttcctgtgtgatcttaagttgtttcacttctgagcttccattttcctccataaaatgagggtaataatttctacctatagtgttgttgtgagatttagacacaaaatgtttttaagctgtgaagtacgaaatatataaaaacattggttattatagatgaggccagcccaaaaagggtgattgacttgtccattgttccactgtaacaacaagtagagtggaaaatgtggtacaaatgcatgtcctaattctagtcagggagctgtggccacaagggccaccaaatccaaagtagcagtatcctgccacggccctgcacctgccattttagaacctgctgaaaccgtcagctgcctgcagccagcccatgtctgctggagagatgggagtaggggagccatctctgcaccaaagcaagagtgaggtcatcacagggaccatgcaagaagaagcgcagctgtngtggcactgaagccggcagccgggccttttccaccactccctggctcctcgctttcctggcatcagagctgaattgtggggaggaaccgaaaagagcagacagagaagcttcaggtcttttgcttaaaanatttccattgttccaaactgagttgtcagggataatggctcaggggtgattatatgcatatnatgtatttaatggctgggagtt

SEQ ID NO: 351776 - DNA, 977 bp, Homo Sapiens
cagcccccccttattaaaacccaacatttccccttcacagcaggatcaccagtttctgtccctgggggctcagctgtcccccgccggtccacaaacatggtgtcaatctcattgccatcacaggccagcagctttgcccggcgcccattacactcttccaccagtcgggcctggccctgcagcagcacaggcatgagggccttctgcagcaggtacacagagcctggatacagcatccggcgccctagggtgtgcgccaccaggtagctggtgatctgacaaggcagcttcttaacccggttgaggagggtgtctgctgtcccccggtgcaggggctctgggcgaagcagggccacaccccggcgggaagggccccctcgagactccttccggctgctgggttcttcccagtggaagtcgactggccagctccggaagtcaaagttgtagttggcaagctgcctcttgttttctgaagactggttccgatgtgttgcttccaagatggtgatgaactgccggtactgggggttggtccagcggccaatgcctcggaggcaggccacacctgccagaagtagcagcaatgtcccagcatagtgagaaaacggcaccactttggacaaactcaagtaacctttcctgtacaagtagaagaaggcgaagggagaggagtaataagagatggaccagaatactgaagccagtgccaggatgctgtcagcatgtttctccagggcacggggctgatagtacgtatcccaggagctggaatggggggcagtgactgccgttggcgtctcagggacgctggccggggccctttcagagtccctctcccggtagattttgtagagccgggggcctaggacgcagctcagcagcttcgccatggccccggctcggccgctgctcttccagcagcacgacgcgtggtcgacgatatcccgaaacttccggaccggtaccaggccgct

SEQ ID NO: 351777 - DNA, 1817 bp, Homo Sapiens
ccatggcgaagctgctgagctgcgtcctaggcccccggctctacaaaatctaccgggagagggactctgaaaggggccccggccagcgtccctgagacgccaacggcagtcactgccccccattccagctcctgggttacttgagtttgtccaaagtggtgccgttttctcactatgctgggacattgctgctacttctggcaggtgtggcctgcctccgaggcattggccgctggaccaacccccagtaccggcagttcatcaccatcttggaagcaacacatcggaaccagtcttcagaaaacaagaggcagcttgccaactacaactttgacttccggagctggccagtcgacttccactgggaagaacccagcagccggaaggagtctcgagggggcccttcccgccggggtgtggccctgcttcgcccagagcccctgcaccgggggacagcagacaccctcctcaaccgggttaagaagctgccttgtcagatcaccagctacctggtggcgcacaccctagggcgccggatgctgtatccaggctctgtgtacctgctgcagaaggccctcatgcctgtgctgctgcagggccaggcccgactggtggaagagtgtaatgggcgccgggcaaagctgctggcctgtgatggcaatgagattgacaccatgtttgtggaccggcgggggacagctgagccccagggacagaagctggtgatctgctgtgaggggaatgctgggttttatgaggtgggctgcgtctccacgcccctggaagctggatattcagtcctgggctggaatcatccaggctttgctggaagcacgggggtgccattcccgcagaatgaggctaatgccatggatgtggtggtccagtttgccatccaccgcctgggcttccagccccaggacatcatcatctacgcctggtccatcggcggcttcactgccacgtgggcagccatgtcctacccagatgttagtgccatgatcctggatgcctcctttgatgacctggtgcccttggccttgaaggtcatgccagacagctggaggggcctggtgaccaggaccgtgaggcagcatctcaatctaaacaacgcggagcagctgtgcagataccagggtcctgtactgctgatccggagaaccaaggatgagatcatcaccaccacggttcctgaggacatcatgtccaaccgaggcaatgacctcctgctgaagctcctgcagcatcggtatccccgggtgatggcagaggagggtcttcgagtggtgaggcagtggttggaggcctcctcacagctggaggaagcctcaatttatagccgatgggaggtggaagaggactggtgtctgtctgtcctccgctcctaccaggcagaacacgggcccgacttcccctggagcgtgggggaggacatgagtgcagatggacggcggcagctggctttgtttctggctcggaagcatctgcacaactttgaggccactcactgcaccccactcccagcccagaacttccagatgccctggcacctctagggaccaactgggactcattatggaagaatggggtgagaggagacatgaggaaagaccctcttatttgtgattctctgtgttcatgttgctgtttatagtttgtggaaagtgggggaccatcccccttctcaccactgttcctcttgcacgtttcccctcattcatgtggctgtacttaaccttctccaacatacatcctgcattacatgaatggattattcctaataattaataaaaaggtattttttctactatcaaaaa

SEQ ID NO: 351778 - DNA, 1099 bp, Homo Sapiens
ctgaaaatgtcgcaactcgcccggaggcggagccggtacgggctgacgtcaagggcacacaacacctcagaggcagggagggcggggccggcagggggacctgctgctggaagagcagcggcccgagccggggccatggcgaagctgctgagctgcgtcctaggcccccggctctacaaaatctaccgggagagggactctgaaagggccccggccagcgtccctgagacgccaacggcagtcactgccccccattccagctcctgggatacgtactatcagccccgtgccctggagaaacatgctgacagcatcctggcactggcttcagtattctggtccatctcttattactcctctcccttcgccttcttctacttgtacaggaaaggttacttgagtttgtccaaagtggtgccgttttctcactatgctgggacattgctgctacttctggcaggtgtggcctgcctccgaggcattggccgctggaccaacccccagtaccggcagttcatcaccatcttggaagcaacacatcggaaccagtcttcagaaaacaagaggcagcttgccaactacaactttgacttccggagctggccagtcgacttccactgggaagaacccagcagccggaaggagtctcgagggggcccttcccgccggggtgtggccctgcttcgcccagagcccctgcaccgggggacagcagacaccctcctcaaccgggttaagaagctgccttgtcagatcaccagctacctggtggcgcacaccctagggcgccggatgctgtatccaggctctgtgtacctgctgcagaaggccctcatgcctgtgctgctgcagggccaggcccgactggtggcaagagtgtaaatgggcgccggggcaaagctgctggccttgtgatggcaatgagattgacaccatgttttgggggaccggcggggggacagctgaacccccaggggacaaaagctgggtgatctgctggtgaggggaatgctggggttttaatgaagggggggctggcgtctccaccccccctgggaagctggaataattcccgtcctggggctgggaatcatcccgg

SEQ ID NO: 351779 - DNA, 757 bp, Homo Sapiens
  misc_feature (457)..(466): n is a, c, g, or t
ggtgttgatgatgaaagtttacaggtggatcagagtatgctggaactcagtgtgcataaaatttcagtcagtgaatatcactgaacgtcatatactacttggtatgtgactttggtttgtgttaagaaagcttgtatataatattttttgccatagtaagtgagaaattgtccttaatcatgcctgtttgatggtactaggaaagaaaggggtagagattaattcttgcacagtataagcaacagtgcaacaaactatgccatttaccttttacctcttacttgaaggcagaatcgcaaaacgtttgaaatggcttttctaaactactctactctggtgagagctcatttaccacaagaagccttataaaaaagtatattttgtaataaccccgtagatactgtacctaacaaaacatgactcgtattagctctataaaatatttgtggcttaggannnnnnnnnnacatatatctttttataactttccaggaactaagcacattatctgataattgttgtaaatttttttgtcagtgctttagttcaggatgggcaataaattatttctaaaggaggtctaaaagtggaaagaatggtttgattttataaaatgagttgctagttcattacagctttttacttttgtacatattttgcaaaacatttgcctcttgctattaatatttgctttgtaaaaattactgacatttaataaacatttgtaaacaattcaaaggcaaaaaaaagggccaca

SEQ ID NO: 351780 - DNA, 729 bp, Homo Sapiens
  misc_feature (397)..(397): n is a, c, g, or t
  misc_feature (564)..(564): n is a, c, g, or t
ggcatcataggtgcttaaatatgtactggttaactagaggggggtaggaaagcaagcggttttatcttgttcttacctttttgcaggaaaagtggctttaaaaaaatttatataataaaactattttggaaattcattcttttagaaagagaccttgagataaatattttttgactctggatatttctatagttctgaacacagattttaaacccactatcaaaatgaaaacaatataaagctatattagtgagtctccatgtagcagtttgtttttatagttactgtttcatgcttaaaacttcattcttactttcattaatgttacccttcactggtatagccactcactaaataagtatatttaaaacatcaaaattttgaactaaagtttgtngattctcttattcagcaatccttatcttatgctggctgcatgagttaattcaacatccagattaaatatcctgaagtaggttctatatatttcctcatacaacagacatggaatggaaatgccactagaaactgccctgctacttttaagtctgacctttgcaggangtacactttgctgttctgtgattgtattcacctacctaaaatacaaatgaagaccgaacatatcatttactgcacgatgaatttttcatttattaaatgaaaaacgtttggctaaacattttaaatattaaagtatttttgactacacgggattaaatttaaaac

SEQ ID NO: 351781 - DNA, 362 bp, Homo Sapiens
aggtgatacagtgactggggcaaaaggagccattgtgaccaggggctgcgggaggcctttcctgggaccttccttgggactggtctgggcccctggggcttgtcgcctgccctgagtccggagccctttgcctccttcctctcccctggggctgggaggctccatccgaccaatgtctgtaaagtgctttgaggatctccccagcaaagcaccttcagaatgtatcgacaacagctgggttagggtcaagggtgcctggggagggtgagtaatcctgcattgctaaaagagagggtctgtcccctcctctccacgtcccagaactggcccagctgcaggcacttaagaagcttcctcccctg

SEQ ID NO: 351782 - DNA, 1288 bp, Homo Sapiens
  misc_feature (18)..(18): n is a, c, g, or t
  misc_feature (20)..(20): n is a, c, g, or t
  misc_feature (40)..(40): n is a, c, g, or t
  misc_feature (50)..(50): n is a, c, g, or t
  misc_feature (73)..(73): n is a, c, g, or t
  misc_feature (85)..(85): n is a, c, g, or t
  misc_feature (90)..(90): n is a, c, g, or t
  misc_feature (126)..(126): n is a, c, g, or t
  misc_feature (1086)..(1086): n is a, c, g, or t
  misc_feature (1238)..(1238): n is a, c, g, or t
  misc_feature (1269)..(1269): n is a, c, g, or t
tgtgtcacgtgagacacntntactgtgcctgttgacgatntgacctatgncagtgcctctgtcgcagacacantactgtatgcantgcantgcaagcagctggcgtggtgagctgcacgacaacanacagcccagacggtggcccagcagaggcggccacactgctgtcatcgctcagcaacctcatgttcctggcccccatcgccgtctcagtgcggcgattcttcctggtggaggcctccgtctacgcctacaccatgttcttctccacgttctaccacgcctgcgaccagcccggggaggcggtgctgtgcatcctcagctacgacacgctgcagtactgcgacttcttgggctccggggcggccatctgggtcaccatcctgtgcatggcacggctcaagacagtcctgaaatacgtgctgtttcttctgggtacactggtcatcgccatgtccttgcagctggaccgcaggggcatgtggaacatcctgggggccctgcctctttgccttcgtgatcatggcctccatgtgggcttaccgctgcgggcaccggcgccagtgctaccccacctcgtggcagcgctgggccctctacctcctgcccggcgtctctatggcctctgtgggcatcgccatctacacctccatgatgactagcgacaactactactacacccacagcatctggcacatcctgctggccgggagcgcagccttgctgctgccgccacctgaccagcccgccgagccctgggcctgctcgcagaaattcccctgccactatcagatctgcaagaacgatcgggaggaactgtacgcagtgacgtgacactggcctggggacagctgctgctctgatgacctcttcagccaggagctgtatcgagggggaggcgcctggtccagccctggacagattgatttccagctgaataaattggcctagataccctcttacttcctcctactgaggagagggccacccctccctcacacgcacctctcctcgccagctgcctgctcgctgctgagatccctctgcagatcccagctgctgtctgcagtggcccctgggctgggngcttggttactgggagaccacaggtgcctgtgcgagggtggggctgtgtgctctgctggcctgtgggtggctagagatggggagaaggactccctatggtcctgttccctgggcgaggctgtggttgagacccatgggcgcccagggagccntgagcccaccacttgggggccgggagttttngatttccgagaaccttgtt

SEQ ID NO: 351783 - DNA, 985 bp, Homo Sapiens
  misc_feature (37)..(37): n is a, c, g, or t
  misc_feature (50)..(68): n is a, c, g, or t
  misc_feature (718)..(743): n is a, c, g, or t
  misc_feature (803)..(813): n is a, c, g, or t
  misc_feature (913)..(913): n is a, c, g, or t
gagatggaatttcactcacgtcactgaggctagagtnagactctgtctcnnnnnnnnnnnnnnnnnnngacagtggcatgacaagtacttgtctgtttatgtagtcaggtatcagcatattagttaatacatttacagaaatgaatgccaaacaaaagctttgaattaaaagccttcacagttcaattagtatttccttccaagcctcttcaactttctttctgttttcttcattccaggtcattattccaccgtgacttttgagaagcaattttcttaagagagtacaaattggattatcccctcttactgaattgaaatttttcaggctttccactaatgagatattgtatccacgttaagccagaaaagctagtttgagtcatttagttagcatgtttgaattagaagttattgatgaaaccttcattaataactcaagccaagttgagtctaaaaaggattccacgaggtgctgttaacacagccttgaaaatttgtaaccgatcaaaagcggcaacagcaggaattagaatgagtttgaattagtcacatggtaacatggaaacatttaaccctgtgtcagcgggactgcttgagataaacttgacttgtcttccgggcccagcaaaactgcaggcccaagggaaaggaagctctcctgtgattgtagcgcatcttgctttgataggaagtcatgtctggaacatggaagagnnnnnnnnnnnnnnnnnnnnnnnnnngctctcttgacgtgatagggagaaaagatcagacttgttcatgattttaaaaacattcannnnnnnnnnnctagggatgtttttacttctgacttgacacatttttttcctttccagtttaaaaattgggtggttgaatggccggacattggatcaaattattaacccgntttgccaggagcttcatctcaggaattatgaagcaatggcggtggtatccaaaaacgtttcagtgccaaagg

SEQ ID NO: 351784 - DNA, 1604 bp, Homo Sapiens
ggaattcccgggatgtcagaggcggcgtggagatcgctgggagcggttgcggcgtgccgggagctgagttatagctgtgacttctgccctgccaggccgcacacaagctggctgacccggtttgtaaaaatggaatttcaagcagtagtgatggcagtaggtggaggatctcggatgacagacctaacttccagcattcccaaacctctgcttccagttgggaacaaacctttaatttggtacccattgaacctgcttgagcgtgttggatttgaagaagtcattgtggttacaaccagggatgttcaaaaggctctatgtgcagaattcaagatgaaaatgaagccagatattgtgtgtattcctgatgacgctgacatgggaactgcagattctttgcgctacatatatccaaaacttaagacagatgtgctggtgctgagctgtgatctgataacagacgttgccttacatgaggttgtggacctgtttagagcttatgatgcatcacttgctatgttgatgagaaaaggccaagatagcatagaacctgttcccggtcaaaaggggaaaaaaaaaagcagtggagcagcgtgacttcattggagtggacagcacaggaaagaggctgctcttcatggctaatgaagcagacttggatgaagagctggtcattaagggatccatcctacagaagcatcctagaatacgtttccacacgggtcttgtggatgcccacctctactgtttgaaaaaatacatcgtggatttcctaatggaaaatgggtcaataacttctatccggagtgaactgattccatatttagtgagaaaacagttttcctcagcttcctcacaacagggacaagaagaaaaagaggaggatctaaagaaaaaggagctgaagtccttagatatctacagttttataaaagaagccaatacactgaacctggctccctatgatgcctgctggaatgcctgtcgaggagacaggtgggaagacttgtccagatcacaggtgcgctgctatgtccacatcatgaaagaggggctctgctctcgagtgagcacactgggactctacatggaagcaaacagacaggtgcccaaattgctgtctgctctctgtccagaagaaccaccagtccattcgtcagcccagattgtcagcaaacacctggttggagttgacagcctcattgggccagagacacagattggagagaagtcatccattaagcgctcagtcattggctcatcctgtctcataaaagatagagtgactattaccaattgccttctcatgaactcagtcactgtggaggaaggaagcaatatccaaggcagtgtcatctgcaacaatgctgtgatcgagaagggtgcagacatcaaggactgcttgattggaagtggccagaggattgaagccaaagctaaacgagtgaatgaggtgatcgtggggaatgaccagctcatggagatctgagttctgagcaagtcagactccttccttttggcctccaaagccacagatgttggccggcccacctgtttaactctgtatttatttcccaataaagaagggcttccaaaggcaaaaa

SEQ ID NO: 351785 - DNA, 1221 bp, Homo Sapiens
  misc_feature (103)..(180): n is a, c, g, or t
cagtagctacccttctcttcctcctcatgatagtactttgagaagcagcaatagtgattgaaagtactccggatttaaacttaaatagctttgagagtcgaannnnnnnnnnnnnnnnnnnnnnnnnnnnnnnnnnnnnnnnnnnnnnnnnnnnnnnnnnnnnnnnnnnnnnnnnnnnnnaaatcgattgcatgggaattcaatgatgtagctggtttgtctgaatttctctggtgtgcacaccggaaactcaaagcacgactctatactgtacttttgtaatgtacaatgattgccgtggagagcagcgatggagatgttagtcctctttccttctccatcccccttgccctggtgcctgtgaaacagagcatccccatggcaacagcagcagctggtccctagataagaggagctggagccggccagcagcagccactgccgcagaggagccaggcccagcctcggtgagcacacacgccctccctgtctctcgccttcgcttccctgcatctgcgctgattgtgctggagaagaaatacatccacccaccctcctttgatgatgtccactgagcaaatgcagccactggaactctcagaagacagactggacaagctagaccctcgttgcagccacttagatgatctttcagaccagttcattaaggactgtgatctcaaaaagaagcctagaaagggaaaaaatgtacaggccaccctgaatgttgagtcagaccaaaaaaaaccaaggaggaaagatacaccggcgctgcacatcccacctttcataccaggtgtgttttcagaacatttaattaaaagatacgatgttcaagagagacatccaaagggcaaaatgatccctgttcttcataacactgacctggaacagaaaaagccaaggagaaaagacacacctgccctgcacatgtccccctttgcagcaggtgtgacattgctcagggatgagagacccaaagcaatcgtggaagatgacgaaaaggatggtgacaagatagctatttaaagatagttcccctgagaccacttgtaaataggttagattggttccctgtggtgacctagagaaaaaatagacttgtttctgctctcatttttgtcatcgtctgacttgaagattcagacaccttctccccaggagatgtatgccatcaaattgccagtcacctcttttgtctctctcttctttctgagtatg

SEQ ID NO: 351786 - DNA, 1129 bp, Homo Sapiens
atagccagacctggagggcttgggtaaaaatggctgaatatttagcttcgatattcgggactgagaaggacaaatcggggtctgccggcacggggaccggtgctcccggcttcacaacaagccgacattcagccaggtgagacccggcacggagcctcgggggttaacggctccctggcccttccccttctggggccgtcgtcaccatgtcccgcctattccgggttcctgagtccctccccaccgcccggctttttttctcattggacctttctgcaggctcctcccaccggtcttcgtgccgttttcccgggaacttcgtcgcgcccccatgcgtacaggctacacacggcggctgttcatctttgccagtcccttccatcccgctgttcatccttgccagtcccctccatcccttttctggtttcttaggggcaaaggatcgccgatgcactcatgatgcttaggctggggtgtaaggttccacccccaaccttcatgcctcactctctgttcatgcagccctgccctctgagctcaagccccgccccttttaaattctgtgcagaccatagtgctgctcaacctgtaccggaatccacagaaaacagcccaaactgcagacggatcacactgtgagtaagggaccaggcctggggggcaaagtgaacagcccccccgtaggctccactttgatttcaccctgtccgaccccaccccaggtcatgtgagtcgccaccgaaggcccccgagtactaaaaacccttcatcccagataagggattgcgacgggtatcaccgcaaattcccctagtggaccctaccgtctaaaaactagaaccgatccccataagctatagcccgcccccccctcaatataaaatgtatacgtgccgatcccgtaacaacaagtccgtgattaacagaaaccttgaattcgtaagacacacaggggccgctagcgcccgccaacgatatctatccggcaaatcaccaattccctcgcccacacgcaaaaaacgagcctatcaccactccgtgtatcagagtatacgatcctctagataattacgcaaaaaaatgccctattccgtattcattattgctacgctgcttcccctacacaaag

SEQ ID NO: 351787 - DNA, 906 bp, Homo Sapiens
ctgggtaaaatggctgaatatttagcttcgatattcgggactgagaaggacaaggttaactgctctttttactttaagatcggggtctgccggcacgggggaccggtgctcccggcttcacaacaagccgacattcagccaggtgagacccggcacggagcctcgggggttaacggctccctggcccttccccttctggggccgtcgtcaccatgtcccgcctattccgggttcctgagtccctccccaccgcccggctttttttctcattggacctttctgcaggctcctcccaccggtcttcgtgccgttttcccgggaacttggtcgcgcccccatgcgtacaggctacacacggcggctgttcatctttgccagtcccttccatcccgctgttcatccttgccagtcccctccatcccttttctggtttcttaggggcaaaggatcgccgatgcactcatgatgcttaggctggggtgtaaggttccacccccaagcttcatgcctcactctctgttcatgcagccctgccctctgagctcaggcccccgcccttttaaattctgtgcagaccatagtgctgctcaacctgtaccggaatccacagaacacagcccaaactgcagacggatcacactgtgagtaagggaccaggcctgggggcaaggtgaacagcccccagtaggctacactctgattccaccctgcccgcccccaccccaggtcatgtgagtgacgtggaggtgcaggagcactatgatagcttcttcgaggtgagggttggtaggggcagatgggatttcttgtgggagctcagctgagttcctccccgtcttccacaggaggtgttcacagaactgcaggagaagtatggggagattgaagagatgaatgtgtcgcacg

SEQ ID NO: 351788 - DNA, 696 bp, Homo Sapiens
agcgtggggcttgggtaaaaatggctgaatatttagcttcgatattcgggactgagaaggacaaggttaactgctctttttactttaagatcggggtctgccggcacggggaccggtgctcccggcttcacaacaagccgacattcagccaggaggtgttcacagaactgcaggagaagtatggggagattgaagagatgaatgtgtgcgacaaccttggggaccacgtcgtgggcaacgtctatgtcaagttccggagggaggaggatggagagcgggccgtggctgaactcagtaaccgctggttcaacgggcaggctgtgcacgggaatgtacccgaggtggcttctgcaacttcatgcatctgcggcccatttcccagaacctccagaggcagctctatgggcggggacccaggcgcaggtcacccccgaggttccatactggccaccatccccgagagaggaaccatcggtgttcccctgatcactggcatggccgcttctgaggccctggcccccttacccttcacccccaacagggacagatgttcctggcaggacctctcctcaaagcccccttcactctcctgccccatccttcccaggctcccgggctccataatgtaatctgttcagcatggagaccttcttctaccgcccctgtcttaataaagctgcgtgtttcacttcggcg

SEQ ID NO: 351789 - DNA, 1310 bp, Homo Sapiens
  misc_feature (49)..(49): n is a, c, g, or t
  misc_feature (77)..(77): n is a, c, g, or t
cgcctcaggcatatgctgagggaataaaggtgcaatggatcactgatanactcctaccatgcctaagctactgagtncgagaactggaagagggtctccgggttattgctgtcggcaggattgctgggctgcagtgtcttggtgggtgtagttttaccgtgagaatgagaggaagaagaatgggaactctcactggaccctctgcgcgtctcggtactggtgctagtctttttcatttttcttctcttagccaaaggggccttatcaacattctgaaggcaaaacccctctctcttgtatttgttaaaggcgtggaaggttgctttcacacaggtatgcacggcagctcccggaagatcctagaatatccgaagtcatcagaggattggaggacagctgacttccatcttgtagccattcattgtacctcaagccagacattttaagccttttgtttggatctactgtgagaagtccttggatcaaatctttagcctcttgggatacattcttccaggcttctccttcaaaggagaaatctccctttttaattttcttcatgatttccaccgcgctggtacacgtcaaacttcggtcatgagattggaagggaacctgtcctgacaacattgtgtacaaaatgacgcccaagctccacaggtcacaggactcatcgtagccgttctgattcaagagctctggggcggcataatgaagggtgaagcatggagtcttcaggggctgattatccggtggctttagccgtgcaaatccaaaatcaattattttaatttccaaattgtcattttcatcggtgaacaataaattctcaggtttcagatcccttgtccaccactcccaacatcatgcatgtggcttacagctgaaacaagcttcctcatgatgtagctgggcttcccgtctcactgaagtgcttctttttcttaatgcgctcaaacagttctcctccattcagaagttccatcactagaaattggggtgtccttcacagagtttcagagctgttatttccttttgagtattggcttccatccttttgctgattattttgactgcaaaagcttggttactttttttatgcacacactttcgacaaattgaaaaactaccttctcccaggggtttgtccttcaaatctaggtcatagtgttgatagaatggagagtccttcatcattgcactcctggcaacatttgtcactccaggacgttcaactcccatgtgaaactgaagagggtctatgacagctgcattacgcttgaataggatggaaggagcaacaaaggacc

SEQ ID NO: 351790 - DNA, 1978 bp, Homo Sapiens
  misc_feature (946)..(966): n is a, c, g, or t
  misc_feature (1059)..(1083): n is a, c, g, or t
  misc_feature (1208)..(1208): n is a, c, g, or t
  misc_feature (1356)..(1378): n is a, c, g, or t
  misc_feature (1787)..(1801): n is a, c, g, or t
ctttaataatgaaatattttattatttgttaacagttgaacaatacagtttacatatacacagcaaagattctctaaaacatgtagtagtttctaaaaatgcatgtgctaactgtagtaaaaagcaccattctctatgatcttgacacaggatttacattggcgtcatatttacataaagaaacatctggaaacagaatagcataccctttcatctgctgctcccctgtcaggctgtgtgtagcattaggaagatggccccccaaaaatgatgggtaacagcaatattccaagaggcaccaattctaggggatgggggtaaagggcaagtttgggttgtcaggtaaaagctaaaatgaagaatgctccctcaacttgccaccccacagagagaagaaatcaaaatgtaaaaatctggataaatcttaacattgggtgccttataaattctcacatgagagaaaaggtcaaatactcaatctcttcagccattcaatagctgaatctagcagtgcctgtcaatttcttctttcagaagaatctgagaaaatcatccatgtaatattgataatgaaaaaaaccatgataaatcacctattgcacaccccaccctctaacccagttatctttgaaagcaaagcatcctacagtctatagagatcagaggatgtagaatgagaaaccacctcatcgaaaagggtctttgggttgtcttctaccaggaagagtttttaaataggagtagccagctactagacacgctaaacacactgcatcagagtcaaacatagaaaaagaatagattgacatgcaagaaattgcgtttagccttttactaccctgatgttccaacactcagggaaggcaaagggggacagacaaacttggggaaacaaagaagaaacagaaaagacccaggatgttaaagtctcctgtgtggttcatgnnnnnnnnnnnnnnnnnnnnngaccaagacttgggggaagaaatagactgtaaaggacaatgatagtggtattctcgccaatacagtatggtataaaaacctaaataataatannnnnnnnnnnnnnnnnnnnnnnnnatatagatacttttcaaaaataagttctctcttgaaaggatggggaagaggcaagaagaaataagcccacaaaatctattctcaagctccaagatattgctagatggttattttgagcatcacanatcctacctagtttacacttttttcttatcccccaggatttgctcttggccgctttggggatgcagaagagaggcccataggaaactcaggttgaggcccctttgttgcttttgaaaaagtagaggttaaaggaaaatgcccaccttnnnnnnnnnnnnnnnnnnnnnnnactcaagtggccaactgcaggacgagggcctacttaatgttcagttctgaatcaacactgaaattattttcatcttaggttgacagggaaaatctaggtcctgcctaaaaatgtgatgcattttgaatcactaaactagcattaggtgtgtgactacagaaaggagccagcagttgctatcagcaccttgaagaattcaagatctctgcttagcaaaagaaaaccaaaatacagacgacctgggtgctcggcccaccattcaaagccaacaggggatggaaagctatgttttcaggatgttacagaagcacacatatatattttcccactgcatgaaattaaattagactgcgtactcttatttttcccacttgcgttatgatggtatcaataagagtgcagtttagannnnnnnnnnnnnnnaaaatcaactttcacataaaaatatgcatgtgcctatatttatacacatctgtatttacgtacaattgtcaaagtcttaaaggctggggtttatatctctgcccatcccctcccaaccccaaaatccctaatagaaaggaattcatcctgcttaaacacccatgcggaaaacgcctt

SEQ ID NO: 351791 - DNA, 1418 bp, Homo Sapiens
  misc_feature (26)..(26): n is a, c, g, or t
ggaaaactcatgcatcccagcatgangtaactcctagttttaattttagttattttgagatatatttgagaattgcatctcttctcttgaatttcatttagaagagattaaccagccaaatatccaggaaagtttcaaaacattctagtgtttttcatcctttgctaggatgcactctgtacaaaacattcctctgaaaatctaatatttgcagtatctaaggaattgatccatttctattttcattaaattctgtgggaaaaaattaaatgaatgaaattcaacttcataattcagttcatcagcttttgtatcttgagaatctaaacacgtctttaaatctgaaagaaaccaagctggattttgcagtgcacatgtttgctagcttcccacatcctgaaccatgtcaaaatttggttttatttagttacatataatttaatgcaaagaaattctgttacttaatgttactgtttatctatgagtgcctatcaggaacactaataggaatgccattcaaccagtgtcttctgcccctctcccagctgttaaattagtacttcttcattggctttctgaaatgtcctgagtaaagtagaaaagcaacctttgtatggatgtggggatatttaatagtatgtatcttgtttcatttttttcctatgatgtattaatatttatttttctccaacccctgctccattttcttaaaatattttccagttaataactagttgctttatttcctagctgaagtgagaaaaccaacggaaaacaatacagatttgggcagaggagatagagttacatctttaacaggagtgagccagtcacccaggagaatcacatgtgtaactgatgtaggggtttaagtcttcatactttcactaaaatctgtctactaactctcccaccaacctttgcatcaaacacttaggtacctgcctgattaggggggcccctttaagggaaaaaacttttaaaaaattaatgccttggttttgttatcttctgggaaagaacacttttacttgattagcaagatgattattattatattaagcttgcgcttaaaagcaactccaaaatactgactcctttttctcccaatttacaaatgaggtgtaaagaaattctggtggtatgatttgacccctaataaggttggaatgggtggccacattggaagaaatttaatatagcagatttcctgctggtcttgagtacgctggggtaccccacaaccctagataactcgtttgagcatttccgaaactggtaatgtagagtccaatgggtcgcgatgctatgattctgcgacccgtgtcctcacgccacgtatttgaacccttgttcagtgcccagacgaatgtcaccccgacactgatactgtgcccacaaaattttctctccttcaa

SEQ ID NO: 351792 - DNA, 1762 bp, Homo Sapiens
ctaaaaatatcgaaggtcagatgacaccatactatcctgtgggaatgggaaatggtacaccttgtagtttgaaacagaaccggcccagatcaagtacctgtgatgtacatatgtcatcctgaatctaagcatgaaattctttcagtagctgaagttacaacttgtgaatatgaagttgtcattttgacaccactcttgtgcagtcatcctaaatataggttcagagcatctcctgtgaatgacatattttgtcaatcactgccaggatctccatttaagcccctcaccctgaggcagctggagcagcaggaagaaatactaagggtgccttttaggagaaataaagagggaagatttgcaatcaactaaagaagagagatttccagcgatccacaagtcgattgctattggctctcagccagtgctcactgttgggacaacccacatatccaaattgacagatgaccaactcataaaagagtttcttagtggttcttactgctttcgtgggggtgtcggttggtggaaatatgaattctgctatggcaaacatgtacatcaataccatgaggacaaggatagtgggaaaacctctgtggttgtcgggacatggaaccaagaagagcatattgaatgggctaagaagaatactgctagagcttatcatcttcaagacgatggtacccagacagtcaggatggtgtcacatttttatggaaatggagatatttgtgatataactgacaaaccaagacaggtgactgtaaaactaaagtgcaaagaatcagattcacctcatgctgttactgtatatatgctagagcctcactcctgtcaatatattcttggggttgaatctccagtgatctgtaaaatcttagatacagcagatgaaaatggacttctttctctccccaactaaaggatattaaagttaggggaaagaaaagatcattgaaagtcatgataatttctgtccccactgtgtctcattatagagttctcagccattggacctcttttaaaggatggtataaaatgactctcaacccctttgtgaatacatatgggtatataagaggttattgataaacttctgaggcagacatttgtctcgctttttttcatttttgttgtgtcttataaactgactgtttttctttgcttggatactgtgattccaaaataaatctcatccaagcaagttagagtccagcctaatcaaatgtcataattgttgtacctattgaaagtttttaaataatagatttattatgtaaattatagtatatgtaagtagctaatgaagtaaagatcatgaagaaagaaattgataggtgtaaatgagagaccatgtaaaatatgtaaattctagtacctgaaatcctttcaacagatttttatatagcaactgctctctgcaagtagttaaactagaaactgggcacatggtagaggctcacatgggagttgtcctcacccttgttaatctcaagaaactcttatttataataggttgcttctctctcagaacttttatctattacttttttcttcttatgagtatgtttactctcagagtatctatctgatgtagacagttggtgatgcttctgagactcagaatggtttactctaacaaaacactgtgctgtctatcccttgtacttgcctactgtaatatggatttcacttctgaacagtttacagcacaatatttattttaaagtgaataaaatgtccacaagcagtgttgtcatgt

SEQ ID NO: 351793 - DNA, 1000 bp, Homo Sapiens
gtcatcatgttcgaccatccaacctcgtactcataatttctccacatgcaataatcttccaaatgtccaatacccttgtcatttgactgaagattagtacccgtgaaccttgttcttttaacttagggagcagcttgtctaaaaccaccattttggccactgttggtactaggatgcatatctgttgtataaggtggaccaggttctgctccatcaaagagatatggatgattacaacattttctcaactgcattaggatgttcaataacctcattttgtccatcttgcctgctgagttgagtatatctatatccttcattaatatccgagtataccattccctttgcattttgctgaggcccacatagatttttacttccttctttggaggcaaactcttttcaacatcagccttaattcgacgaaggaggaatggacgcaaaaccatatgaagcctctcaactagtttttgatccccaaggcagttgtttgtatcaaaccaggaatcaaagtcatctgctgaattaaacacatctggcaacagaaagttaagaagtgaccacagctcatgcaagttgttctgaagaggtgttccagttaataatagtctatttgtagtcttgaattccctcactatttctgacaacttagatttttcatttttgatcctgtgagcttcatctattactaagtatctccaattaaatttttttgaacacagacttctctttaataagcatttcataagatgttacacatacatcccattctcccggtaataaaacgtctctgacaaaagcagctctttgttctttatctcctatcaaacaaacagatctaagtgttggtacccatctcttgaattcactcatccagttgtgtaatgtagacttaggaaccaaaaccatatgaggcccaggaatgtttctataatgtttcatgtacccaagaagagaaattgtttgaagagtctttcctaggcccatttcatctgcaagg

SEQ ID NO: 351794 - DNA, 700 bp, Homo Sapiens
tcaagagggcccccctaaccgttcctgataggagataagacaagaccgcttttgcagagacgtttattacccgagcatgggatgtatgtgaacatcttatgaatgcttattaaagagaagtctgtgttcaaaacagttaattggagatacttagtaatagatgtaagctcacacggatcacaaatgaaaaatctaagttgtcagaaatagtgagggaattcaagactacaaatagactattacttaactggaacacctcttcagaacaacttgcatgagctgtggtcacttcttaactctctgttgccagatctgtttaattcagcagatcactttgattcctggtttgatacaaaccactgccctggggatccaaaactagttgagaggcttcatatggttttgcgtcccttcctccttcgtcgaattaaggctgatgttgaaaagagtttgcctcccaagaaggaagtaaaaatctatgtgggcctcagccaaatcgcaaagggaatggtatactcggatattaatgaaggatatagatatactcaactcagcaggccagatggacaaaatgaggttattgaacatcctaatgcagttgagaaaatgttgtatatcatccatatctctttgatggagcacgaacctggtcccccttataccacagatatgcatctagtaacccaccgtggcatcgata

SEQ ID NO: 351795 - DNA, 461 bp, Homo Sapiens
cgccgcctaggtgtctgggcgatctatgggcaagagcaagggccacgatgacagattacggcgaggagcagcgcaacgagctggaggccctggagtccatctaccctgactccttcacaggcagatgtctctcagctatccctgtatagctccagtcctgttcatgttctctctcaccagcagtacatctgtgctgtgaggatgttaaggggatgagtgaagaggggtttgagagtgtcattaactggcttgattgcacattgatccaaccctcctaacaactagtcttccaaaatataaatggactctcctgataccacattctccttcagtagtgcttcacttgacaaggtcctgctaagtattatcagaaaatccacccagcttcaccattactgtgacgtctgaggctggagaaaatgatgaaactgtccagactaccctcaagtttacatacagtg

SEQ ID NO: 351796 - DNA, 1031 bp, Homo Sapiens
  misc_feature (489)..(549): n is a, c, g, or t
atcaggccaaatcggccgagctcgaattcgtcgagagcggctggccgccgcccgctctcccggcgcggcagctgtctgggctgctgcgcgccgcctaggtgtctgggcgatctatgggcaagagcaagggccacgatgacagattacggcgaggagcagcgcaacgagctggaggccctggagtccatctaccctgactccttcacagtattatcagaaaatccacccagcttcaccattactgtgacgtctgaggctggagaaaatgatgaaactgtccagactaccctcaagtttacatacagtgaaaaatacccagatgaagctcccctttatgaaatattctcccaggaaaatctagaagataatgatgtctcagacattttaaaattactagcattacaggctgaagaaaatcttggtatggtgatgatttttactctagtgacagctgtgcaagaaaaattaaatgaaatagtagatcagatnnnnnnnnnnnnnnnnnnnnnnnnnnnnnnnnnnnnnnnnnnnnnnnnnnnnnnnnnnnnncaattattccatggtactccagttacaattgagaatttcttaaattggaaagccaagtttgatgcagaactcttggaaattaaaaagaaaaggatgaaagaagaagaacaagcaggaaaaaataaattaagtgggaaacaactatttgaaacagatcataatcttgacacatctgatatccagttcttggaggatgctggaaacaacgtggaggtagatgagtctttgttccaagaaatggatgacttggagctggaggatgatgaagatgatccagactataatcctgctgacccagagagtgactcagctgactaatggactgtccccatctgcagagaggcttgactgccacagcatctgtggctatgctcagagggttatgattttcctttctttttttctaagaaaaaattattttcaggagaatattcttctgatagctttcatcattgaacttaataaactgaccttaaaatttc

SEQ ID NO: 351797 - DNA, 578 bp, Homo Sapiens
  misc_feature (13)..(13): n is a, c, g, or t
  misc_feature (300)..(300): n is a, c, g, or t
  misc_feature (332)..(332): n is a, c, g, or t
  misc_feature (335)..(335): n is a, c, g, or t
  misc_feature (346)..(346): n is a, c, g, or t
  misc_feature (386)..(386): n is a, c, g, or t
  misc_feature (401)..(401): n is a, c, g, or t
  misc_feature (403)..(403): n is a, c, g, or t
  misc_feature (492)..(492): n is a, c, g, or t
  misc_feature (541)..(541): n is a, c, g, or t
accctgtgatctntcactcatcccaaattctgcatgtggatgtctttcttctgagaacacccgatgtgtgtggatcggaagctcagtgggcttattcgtatttaacctggcaaacctggaagtggaagctgctttgtattacaaggatttccagagcctcagcatcctgctggccggatcgtgtgccctgaggaaccgcacttcggatcaaaaggtgctgtgcttgctggcctccctctttggcgggaagattgccgtgttggagatcaacccggccgcgctagtcagggctcagcagtncccagcatggggcaggagcctctcggtgccanccnagctcctgtgntcctaccgacctctccactgtatctgggaattgccaaggngaagagtaccaaggntnttagttgaacagcggacgtggtcagtacagggtgctgtgagatctaaggaatacaaggcttgttgcgttcttcattgtggttagggctnctgcatttgctttgcggattcttatgttaaaatatgcattccgtacttnccttccatccttctgtccttcatgtctctgcctctcg

SEQ ID NO: 351798 - DNA, 1666 bp, Homo Sapiens
  misc_feature (315)..(315): n is a, c, g, or t
  misc_feature (1537)..(1553): n is a, c, g, or t
aatttccccatttaagggggttttccccataaggaacctggggctttttttaaaccccgtttccaagttttcattgttttaaatgggcccccattggggtttcccttaacaatacccattcaggcttatggctggtgggccaaaaaagaaagtgtttcttgtggggctttggtaattaggtccctttcaaaccaagtaaaacaaagaaaagtgccagaccagtgctgcccagagacagggagggatttttcacatggagactggaaaaagccggacacaccccttacaaattaagttcatggtcgagtcgggccntgccatccacctccacccagtccctggaacccggcaggtcagagttttctctaattctattccccggcatcaagtgaacactagaactccacacggaagggcccccgagcaacccactggcctcggggctgggtgcacccactcctcacccagggagattgtcacaaaacacgctagggggcagagacgctgtaaactggacacacacggaacacaatgccctttccacttacacagcgtggggatgataaaaaggaatcttttgagcaagtctataattttacagaatttagaggtgggaaagatggccaattttccttctttatgcctggggcagaccacctgcttctggggtaaagtgtttgagaaggaaaaagagccactgtacatgtgtttgttttgagacatgggcaggtccggatgtgcagtctcccacagcttcgctaatcccatcctcagatctgtgcacaatgtgaagacggagccgtcccctcctcagtgtacctgtgtgagattacaaggagagacactgtcttcacaaagaaagtggcgattccacagcctggagataaatatggttatttgaataaaaataaattccacagaaatccatgccttgtgagatactggcttgcacattttaaaataattgcttttaattacaaaaaattctccaaaataggaaaagatgatgaaaagttaaattaagactcagaataaaaactgcagttctttggcgtcccttgctgggaagaggtgggcctggcgtacgaccaggtgatgagagctgaggaaggtggtgacgacatccatctggacctgtcgcctcctcatggcacagaacacaccgccccacctgagacctcccactagcaggactctgtccctggcagagctgtacctgagtggtcctgagggacagtgtctttgtggaattaatacttcaggtttagttaacaaaacaaaacaaaacaacagaagccctctcttcccctacttgtcaaaatgtcctcaaaatgtaatattttttcttaaaaaatcaagttcctgcttgtgtcgaattttctgctaagtctctaaaagccacatcaaggacactggatggagagtgacacgtcaatgaaacagctatagtctaaaagtgcacaccgagcgctcagaagggagggattaaagtgctaaggtccccgatctgtctcacggaggagtcagcgttctgtannnnnnnnnnnnnnnnnctgattacagatgagctgtcctaggagcagtgcagagcctctggtcacctgcacgtcaccttcctccccacagccgccccgcccagggctccccgaaaccagttccttcctac

SEQ ID NO: 351799 - DNA, 457 bp, Homo Sapiens
ctgtggaccctctgtctcctcagacaactgaaggatgatgaagaaggggatctctggagccttgaccttctgggccccgaatttctagctagaaaacctcttttcaagacaaaaacataccaaagtacattttgaagtatttcgaagaatgaatcacatgccctaactttataatagaggaaggcacagatctcatttttgtgacaggtgaaacataatccttgccacaggttaactccagaagaaggaactgtacagctgaacagagcagattcttagaaactacaaactaaccaacaaacaaacaaataaggcaaagaacagctgcacatcatcttaagattccttatttaaaagttgtatctctaagccaggctattatataatcaagcaggaaaatactactaaaacttgatagttttgactggtggccttgtcttggatgttaagaaaaaat

SEQ ID NO: 351800 - DNA, 513 bp, Homo Sapiens
  misc_feature (19)..(19): n is a, c, g, or t
  misc_feature (47)..(47): n is a, c, g, or t
tgggtgtgcgaaacacccnttttatcacttttaaatttgcactttantttttttcttccatgcttgttctctggacatttggggatgtgagtgttagagctggtgagagaggagtcaggcggccttcccaccgatggtcctggcctccacctgccctctcttccctgcctgatcaccgctttccaatttgcccttcagagaacttaagtcaaggagagttgaaattcacaggccagggcacatcttttatttatttcattatgttggccaacagaacttgattgtaaataataataaagaaatctgttatatacttttcaaactccatgcctcttggtgattattttattctcccttatccttagaaaggggaaagaaagtgatttctttgtttacctggtagttatttgtaaacaacggctagtactttttaacggtctctttttcattcatcatgtaagctccattccacaaagtatctctctctgtaaacaccagtgttccagggaattc

SEQ ID NO: 351801 - DNA, 517 bp, Homo Sapiens
  misc_feature (62)..(62): n is a, c, g, or t
  misc_feature (252)..(288): n is a, c, g, or t
ctgcatgcttgggggtgccaagggattcgagacctccaacatacttgtctgaaggtggtgantctggccatggcccctctgccaagcctgtgtgcgatgcccttggtgctttagtgcaagaagcctaggctcagaagcacagcagcgccatctttccgtttcaggggttgtgatgaaggccaaggaaaaacatttatctttactattttacctacgtataaagttttagttcattgggtgtgcgaaacaccnnnnnnnnnnnnnnnnnnnnnnnnnnnnnnnnnnnnncttccatgcttgttctctggacatttggggatgtgagtgttagagctggtgagagaggagtcaggcggccttccctgcctgatcaccgctttccaatttgcccttcagagaacttaagtcaaggagagttgaaattcacaggccagggcacatcttttatttatttcattatgttggccaacagaacttgattgtaaataataataaagaaatctgttatatacttttc

SEQ ID NO: 351802 - DNA, 282 bp, Homo Sapiens
attaagcccaaaataaaataatttgtgtatcttattttctcatttttctctaggatgatacacagctaatacccttctagatgcatagaaaaaagttaatttattatatacaatggataccttaaggcaagagttgacaaacttttcctgcaaaggaccagatagtaaatattttaggcttcgtgggtcataaagtgtctattgtaactgtttaaccctaccttgtagcatgaaatacttaaacaaatgagtgtggctcaaataatataaaattttattcat

SEQ ID NO: 351803 - DNA, 953 bp, Homo Sapiens
  misc_feature (497)..(497): n is a, c, g, or t
caaaagcaaatgcttctaaactttattcacactcgagttgcatctctgcgccaccactgccaatgttttgtcatgtcacgggcagtcaaccaggagcagggaaggagagaccaggctgatttctgccttgttgggaacactgtcatggtgcctgtagatagtcacccatttgctaactggaatgcagagagcaaatgccacggttgaaacgctctccttcgtgaatcagctccttccccagggtgttttaagatttaggagtttcagttccccggtttaaaaggaaaagtaaaaaacaatccacagttgagcagttgatgtgcaaatcatcccaggaatccaactttctgtctcttgggccccaggctttcttccttgtgcacaacactctgcaaggaggcatgcagtaccttgcccacacgcttggccagtctccatcatctcgaagatgctctctgggtccaggctgcccttccccactttcctcatgcacgtcncagactcccttgctggtcaccgacaccagcaagctggccagcgagcaggcctcctcctgaagagtagcatccaccacatgccgatagccaatcttgcacagagtgacaatgcaggggacattctcccacacttagtccgtatgcagtcataagggtcatctgaacaattcaatgtccttcgacccctcttcatcctcccaaaactcgaacccttggtatccctggaagcagaagcactagtaaaattcccacttggaggaggaaaaataacttctttttaagattgagaataggagttggaatccctgtgtctcacaagagaaagacacgctatgcctattctttatcatcctcatccctgtcatccctgtcaaaagcacacaggaggcgccgcagtgcaatgaggaaaggcatcttttagaaaatgatgctgggtcaatcagatatcccaatgga

SEQ ID NO: 351804 - DNA, 442 bp, Homo Sapiens
agaagagcgtttcaaccgtggcatttgctctctgcattccagttagcaaatggggtaaggcgtttaggaatttatcaccaaatggaaagaacataatgtgaagctgaagcccttgggactgcttccagaggtcctggtgtgggcgttcctcccagcaaggcccaggtccatccctgtggagagaagcagctgcctagacttgggcttaatgggggagcttctgccctgttgagagcatagcctgggttttcatcttttatgtttcttcagtgactatctacaggcaccatgacagtgttcccaacaaggcagaaatcagcctggtctctccttccctgctcctggttgactgcccgtgacatgacaaaacattggcagtggtggcgcagagatgcaactcgagtgtgaataaagtttagaagcgtttgcttttgaaaaaaaa

SEQ ID NO: 351805 - DNA, 899 bp, Homo Sapiens; identical to SEQ ID NO: 172636
  misc_feature (630)..(630): n is a, c, g, or t

SEQ ID NO: 351806 - DNA, 1562 bp, Homo Sapiens
  misc_feature (1072)..(1132): n is a, c, g, or t
ggcctgggtggcgaattcggcacgagggcgcagatgacgtgcggctcgtggggcagctcggcagcatggcgtccgtggcgctgagcgaggcggagaaggtgtacatcgtgcatggcgtccaggaagacctccgtgtggatggccgtggctgtgaggactaccgatgtgtcgaagtggaaactgatgtggtgtccaacactagtgggtccgccagggtcaagctgggtcacacagacatcttggtgggagtgaaagcagaaatggggacgccgaagctggagaaaccaaatgaaggctacttggagttctttgttgactgttcagccagtgctacccctgaatttgaaggtagaggaggtgatgaccttggcaccgagatcgctaacaccctctatcggatatttaacaataaaagcagtgtcgacttaaagaccctctgcattagtcctcgggagcactgctgggttctctatgtggatgtgctgcttctggaatgtggtggaaatttgtttgatgccatttccattgctgtaaaggctgctctcttcaatacaaggataccaagggttcgagttttggaggatgaagaggggtcgaaggacattgaattgtcagatgacccttatgactgcatacgactaagtgtggagaatgtcccctgcattgtcactctgtgcaagattggctatcggcatgtggtggatgctactcttcaggaggaggcctgctcgctggccagcttgctggtgtcggtgaccagcaagggagttgtgacgtgcatgaggaaagtggggaagggcagcctggacccagagagcatcttcgagatgatggagactggcaagcgtgtgggcaaggtactgcatgcctccttgcagagtgttctgcacaaggaagaaagcctggggcccaagagacagaaagttggattcctgggatgatttgcacatcaactgctcaactgtggattgttttttacttttccttttaaaccggttcgtatatatttttcttcgctgttacgaatttacagcagcatttgtacatgtaaaattaaaggctattttctggnnnnnnnnnnnnnnnnnnnnnnnnnnnnnnnnnnnnnnnnnnnnnnnnnnnnnnnnnnnnncctcatctatatcaaccgccttaccacccgccatcgccccttaccacccttacattaagtatccttgggagctactgcataatatacctctgacagtggaccttatcccccgtcttgaccccaccccccattttaaacatactctttttttgatcccggcccccttatattctcccctctattcccgatcttgccccgttcccctatgcttctttaagcaataccccttttccggcctcccattcttttcccggtcccgtttttccaccgccccaaaactccatcaattattttccccctccccgcaccaccgtcaaagatcatatccgcacaaccatcgcctccatacccaatatccccgtccttttttcgcacccattttacccccataccacttagcaatatattcaccccgggacataaacacaac

SEQ ID NO: 351807 - DNA, 992 bp, Homo Sapiens
ggggagaacgaaagatggcggcgcccgtaaggcggacgctgttaggggtggcggggggttggcggcggttcgagaggctctgggccggcagtctaagctctcgcagcctggctcttgcagccgcaccctcaagcaacggatccccatggcgcttgttgggcgcgttgtgcctgcagcggccacctgtagtctccaagccgttgaccccattgcaggaagagatggcgtctctactgcagcagattgagatagagagaagcctgtattcagaccacgagcttcgtgctctggatgaaaaccagcgactggcaaagaagaaagctgaccttcatgatgaagaagatgaacaggatatattgctggcgcaagatttggaagatatgtgggagcagaaatttctacagttcaaacttggagctcgcataacagaagctgatgaaaagaatgaccgaacatccctgaacaggaagctagacaggaaccttgtcctgttagtcagagagaagtttggagaccaggatgtttggatactgccccaggcagagtggcagcctggggagacccttcgaggaacagctgaacgaaccctggccacactctcagaaaacaacatggaagccaagttcctaggaaatgcaccctgtgggcactacacattcaagttcccccaggcaatgcggacagagagtaacctcggagccaaggtgttcttcttcaaagcactgctattaactggagacttttcccaggctgggaataagggccatcatgtgtgggtcactaaggatgagctgggtgactatttgaaaccaaaatacctggcccaagttaggaggtttgtttcagacctctgatgggccgagctgcctgtggacggtgctcagacaagtctgggattagagcctcaaggacattgtgtgattgcctcacatttgcaggtaatatcaagcagcaaactaaattctgagaaataaacgagtctattactgaaa

SEQ ID NO: 351808 - DNA, 764 bp, Homo Sapiens
agcgggggagaacgaaagatggcggcgcccgtaaggcggacgctgttaggggtggcggggggttggcggcggttcgagaggctctgggccggcagtctaagctctcgcagcctggctcttgcagccgcaccctcaagcaacggatccccatggcgcttgttgggcgcgttgtgcctgcagcggccacctgtagtctccaagccgttgaccccattgcaggaagagatggcgtctctactgcagcagattgagatagagagaagcctgtattcagaccacgagcttcgtgctctggatgaaaaccagcgactggcaaagaagaaagctgaccttcatgatgaagaagatgaacaggatatattgctggcgcaagatttggaacgatatgtgggagcagaaatttctacagttcaaacttggagctcgcataacaggttgtgatccttttaggccagccagaaggaagggaaaaggggtatttgaattcccaaataaaagacagttgcttggcccctgctttgtgttttaagtaacaaataatttcatattcttttctttgttgctcacatctaccataatacgacttaaaaagtctgtcttattttcgggtgagaggtaagggtattggaatagccttttctctcagttaaactttgtgaatgttatctgtgtttaactccaagtttgagactgagagtggggcaaatgaagcctttttcccactaattcctgtgtctatgtgaaatccctcttaagcgggagat

SEQ ID NO: 351809 - DNA, 297 bp, Homo Sapiens
caaaaggtaaaattaatacagacggtgttttggttggccaaggtcaggtagcttgtttttggaacagatatggattgtatatttcaagtaataaccctccattagtctttaatagttatacattttttatttattttacacagatttatctaaatttggatatttattttgaggttggtatatcttataagcagttttgacatgtgaaacatattcagatatagatgattgaggtatttatttaagaaatatagatgttggccttatccactgtggtagcaataataaatgactaaa

SEQ ID NO: 351810 - DNA, 1646 bp, Homo Sapiens
  misc_feature (1029)..(1029): n is a, c, g, or t
  misc_feature (1083)..(1083): n is a, c, g, or t
  misc_feature (1094)..(1094): n is a, c, g, or t
  misc_feature (1106)..(1106): n is a, c, g, or t
  misc_feature (1111)..(1113): n is a, c, g, or t
  misc_feature (1126)..(1126): n is a, c, g, or t
  misc_feature (1128)..(1128): n is a, c, g, or t
  misc_feature (1130)..(1130): n is a, c, g, or t
  misc_feature (1134)..(1134): n is a, c, g, or t
  misc_feature (1145)..(1145): n is a, c, g, or t
  misc_feature (1167)..(1167): n is a, c, g, or t
  misc_feature (1178)..(1178): n is a, c, g, or t
  misc_feature (1180)..(1180): n is a, c, g, or t
  misc_feature (1195)..(1195): n is a, c, g, or t
  misc_feature (1197)..(1197): n is a, c, g, or t
  misc_feature (1199)..(1199): n is a, c, g, or t
  misc_feature (1201)..(1201): n is a, c, g, or t
  misc_feature (1214)..(1214): n is a, c, g, or t
  misc_feature (1217)..(1217): n is a, c, g, or t
  misc_feature (1224)..(1225): n is a, c, g, or t
  misc_feature (1233)..(1234): n is a, c, g, or t
  misc_feature (1240)..(1243): n is a, c, g, or t
  misc_feature (1245)..(1245): n is a, c, g, or t
  misc_feature (1247)..(1247): n is a, c, g, or t
  misc_feature (1249)..(1249): n is a, c, g, or t
  misc_feature (1252)..(1300): n is a, c, g, or t
  misc_feature (1311)..(1311): n is a, c, g, or t
  misc_feature (1313)..(1313): n is a, c, g, or t
  misc_feature (1315)..(1315): n is a, c, g, or t
  misc_feature (1323)..(1323): n is a, c, g, or t
  misc_feature (1327)..(1327): n is a, c, g, or t
  misc_feature (1340)..(1340): n is a, c, g, or t
  misc_feature (1345)..(1345): n is a, c, g, or t
  misc_feature (1352)..(1352): n is a, c, g, or t
  misc_feature (1381)..(1381): n is a, c, g, or t
  misc_feature (1435)..(1439): n is a, c, g, or t
  misc_feature (1444)..(1447): n is a, c, g, or t
  misc_feature (1473)..(1473): n is a, c, g, or t
  misc_feature (1496)..(1496): n is a, c, g, or t
  misc_feature (1509)..(1509): n is a, c, g, or t
  misc_feature (1514)..(1514): n is a, c, g, or t
  misc_feature (1531)..(1531): n is a, c, g, or t
  misc_feature (1549)..(1549): n is a, c, g, or t
  misc_feature (1560)..(1560): n is a, c, g, or t
  misc_feature (1567)..(1567): n is a, c, g, or t
  misc_feature (1574)..(1574): n is a, c, g, or t
  misc_feature (1583)..(1583): n is a, c, g, or t
  misc_feature (1585)..(1585): n is a, c, g, or t
  misc_feature (1598)..(1598): n is a, c, g, or t
  misc_feature (1600)..(1602): n is a, c, g, or t
  misc_feature (1616)..(1616): n is a, c, g, or t
  misc_feature (1618)..(1618): n is a, c, g, or t
  misc_feature (1622)..(1622): n is a, c, g, or t
  misc_feature (1633)..(1633): n is a, c, g, or t
  misc_feature (1638)..(1638): n is a, c, g, or t
cccgggatcccccttccagacccgctcccgaaaccttgtcgaaggaccaaaggcgaccggtgcaggtgcacgacgccagctcccttctggggggccggggcctgggggttgccatggcccccagccacctgtcagtgcgggagatgagggaagatgagaagcccctggtgctggagatgctgaaggtgagaggcaggggccccagggggcctgggagtggctgcagtgggggaattgcaagtggattcagccaccccctcccacccacctgagccagcctggacccctggagcgggatcttttcctcctgagcctcagccgccctgctgctgaaaaccacagcaggtgtggcaggtgggggctcacccccccagccctactgggaccccagcaccaacgccctccctggtctcccatctccagtcggctgtgcacgccagcacaacagccagctctgtgcctcggaccccaactcttcaaagcacagcccagcaccccaacctagcccagcagcctccctccagcctccactccagcctgaggcaacctccctgtccttacttccctggggcctcactgcggcattgctactgaattgagtgcccccacagctcctaattcactcatccatccatcattcgctctcgttcattcattcactccatacccagtgtgccacactgaacatcggactgtgctgccttcccttcccatttgggagctctcaccccgccccgggcagggtctacctcctctctttgtccaggaggccctagcgtttcggatggctgagccacccctcctgcccacaggccggcgtgaaggacacggaaaaccgcgtggccctccatgccttgacacggccgccggccctgctcctcctggcggcggccagcagcggcctgcgctttgtcctggcttccttcgccctggccctcctcctgccggtgtccccgtggctgtggccgcctggggggtgggagggatgctggagggctgtggctaccaggccgaggggaaaagaaaaancctggaaacacgctggtgaggaaaatcagcaaagacctgtgaagctacagactnacagccagggnaggggaggaggnaggannnccagcacctgatnancncctnctttctcgggntttttttcctgtttttctttanttattctttancntccctgggcccaganananantcctgccgagggnagnttttttnnttttttcnncccttnnnnantntnaannnnnnnnnnnnnnnnnnnnnnnnnnnnnnnnnnnnnnnnnnnnnnnnngcccttggggncntntcgagttnagcntctccaacccctncctcngctcctntctgcactgagaaacctccccgggtgatntctgcaaagtctgtgctgtccgtgccccaggctgggagagctatctggggaggnnnnnaggannnngagcagaatacaccccagagttaggntttgcgactccgcctccctgggncctggattggttnagatncctgtccttggagggtntaaggttaactgcttagnaggcgcaacgnacagggnttccagncctggcccntntctgggaaagttnannncttagacgttcatncntatnctttccttaanatccntttgattt

SEQ ID NO: 351811 - DNA, 771 bp, Homo Sapiens
  misc_feature (98)..(157): n is a, c, g, or t
ggaggctgctggccttcgcggaggcccgggctcgggcctgggctgggggcatgggggagccccgggcccggctcgtggtccccgtggctgtggccgcnnnnnnnnnnnnnnnnnnnnnnnnnnnnnnnnnnnnnnnnnnnnnnnnnnnnnnnnnnnncctgggctacacgctggtgagggaattcagcaaagacctgtgaagctacagactgacagccagggcaggggaggagggaggggcgccagcacctgatgatcgcctactgtctgcgggttcttttacctgctctccctcagtgagtcctcaaccaccctgggcccagaaacagaggcctgccgaggggaggagcctggcctctgtccacccgtcagcagtgtgaagtctgttgtgtttgagcttctcagagtggaatgactccttttccttcctggccctcgggggcctctcgaggtcagcctctccaacccctacctcagctcctgtctgcactgagaaacctccccgggtgatgtctgcaaagtctgtgctgtccgtgccccaggctgtggagagctatctggggagggggagaggaggccgagcagaatacaccccagagttagggtactgcgactccgcctacctgggacctggattgggtcacgatgcctgtccttggaggggacaaggttgactgcttaggaggcgcgacgcacagggctgccaggcctggcccctctctgggaaggttgagagctgagacgggcagccctgtcccttcctccagatcc

SEQ ID NO: 351812 - DNA, 1358 bp, Homo Sapiens
aaatcaatggctaggtcgaggccgggttcgaatcggcacgagggtcgaaggaccaaaggcgaccggtgcaggtgcacgacgccagctcccttctggggggccggggcctgggggttgccatggcccccagccacctgtcagtgcgggagatgagggaagatgagaagcccctggtgctggagatgctgaaggccggcgtgaaggacacggaaaaccgcgtggccctccatgccttgacacggccgccggccctgctcctcctggcggcggccagcagcggcctgcgctttgtcctggcttccttcgccctggccctcctcctgccggtgttcctggctgtggccgccgtgaagctgggcctgcgggcccgatggggctcgctgcctccgccgggtggcctggggggcccctgggtggccgtgcggggctccggtgacgtgtgtggggtcctggctctggcccctggcacaaatgcaggggacggggcccgggtcacccgcctgtctgtctctcgctggcaccgccgccggggcgtgggcaggaggctgctggccttcgcggaggcccgggctcgggcctgggctgggggcatgggggagccccgggcccggctcgtggtccccgtggctgtggccgcctggggggtgggagggatgctggagggctgtggctaccaggccgaggggggctggggctgcctgggctacacgctggtgagggaattcagcaaagacctgtgaagctacagactgacagccagggcaggggaggagggaggggcgccagcacctgatgatcgcctactgtctgcgggttcttttacctgctctccctcagtgagtcctcaaccaccctgggcccagaaacagaggcctgccgaggggaggagcctggcctctgtccacccgtcagcagtgtgaagtctgttgtgtttgagcttctcagagtggaatgactccttttccttcctggccctcgggggcctctcgaggtcagcctctccaacccctacctcagctcctgtctgcactgagaaacctccccgggtgatgtctgcaaagtctgtgctgtccgtgccccaggctgggagagctatctggggagggggagaggaggccgagcagaatacaccccagagttagggtttgcgactccgcctccctgggacctggattgggtcagatgcctgtccttggaggggacaaggttgactgcttaggaggcgcgacgcacagggctgccaggcctggcccctctctgggaaggttgagagctgagacgggcagccctgtcccttcctccagatccgtctggttttttacaccgtttgttaataaagcctgaaaccgctgtgaaaa

SEQ ID NO: 351813 - DNA, 871 bp, Homo Sapiens
  misc_feature (564)..(564): n is a, c, g, or t
  misc_feature (568)..(680): n is a, c, g, or t
  misc_feature (731)..(810): n is a, c, g, or t
cccacgcgtccggtttcttagaaaaagctttcctgaatccctctgacgttgcctgggatctttctgttgattcgtcttttctggagattgggacagagcatctgtggtccagggaagttagtcctctggcctcaattctgttgtggatgtgcagtgataagcgggcattgcgtgcctcgggggatgcctagttcgtggcttcctggctgttttgtccttctgtgtcttgtagctgtagggtgccagctcagggagtggggtgttggcggcgtttccgcggttggcctccttgctttgccgcacctccaggttctgggcatgagagacacgtggcctcatttctggtggataacctttttagtttaatagcatctttaattagatcacagcattgaattcaaaatttcttctgcaaagaaagttgtggggcataagacaccgggaatgagggaggaggaagacagttgtgttttctctttaaaccttgagctctagccgatgcatttgtcaggaaatacagcactttgtcttaagaaaacaaggaaggaggccgggcgcaaggtntcannnnnnnnnnnnnnnnnnnnnnnnnnnnnnnnnnnnnnnnnnnnnnnnnnnnnnnnnnnnnnnnnnnnnnnnnnnnnnnnnnnnnnnnnnnnnnnnnnnnnnnnnnnnnnnnnttagccgggcgtggtggcgcatgcccataatcccagctactgaggagactnnnnnnnnnnnnnnnnnnnnnnnnnnnnnnnnnnnnnnnnnnnnnnnnnnnnnnnnnnnnnnnnnnnnnnnnnnnnnnnnagaagagcgaaactgggtctcaagttaaaaaaagaaagcaaggaaagagtaatttacaacg

SEQ ID NO: 351814 - DNA, 1563 bp, Homo Sapiens
  misc_feature (58)..(94): n is a, c, g, or t
gccggatgtaatcgactcactcatagggcgaatcgggttttaccgcggtggcggccgnnnnnnnnnnnnnnnnnnnnnnnnnnnnnnnnnnnnnatcaggccaaatcggccgagctcgaattcgtcgagagcggggatagaggacacgaccaagatggcggcggtgtctggcttggtgcggagaccccttcgggaggtctccgggctgctgaagaggcgctttcactggaccgcgccggctgcgctgcaggtgacagttcgtgatgctataaatcagggtatggatgaggagctggaaagagatgagaaggtatttctgcttggagaagaagttgcccagtatgatggggcatacaaggttagtcgagggctgtggaagaaatatggagacaagaggattattgacactcccatatcagagatgggctttgctggaattgctgtaggtgcagctatggctgggttgcggcccatttgtgaatttatgaccttcaatttctccatgcaagccattgaccaggttataaactcagctgccaagacctactacatgtctggtggccttcagcctgtgcctatagtcttcagggggcccaatggtgcctcagcaggtgtagctgcccagcactcacagtgctttgctgcctggtatgggcactgcccaggcttaaaggtggtcagtccctggaattcagaggatgctaaaggacttattaaatcagccattcgggataacaatccagtggtggtgctagagaatgaattgatgtatggggttccttttgaatttcctccggaagctcagtcaaaagattttctgattcctattggaaaagccaaaatagaaaggcaaggaacacatataactgtggtttcccattcaagacctgtgggccactgcttagaagctgcagcagtgctatctaaagaaggagttgaatgtgaggtgataaatatgcgtaccattagaccaatggacatggaaaccatagaagccagtgtcatgaagacaaatcatcttgtaactgtggaaggaggctggccacagtttggagtaggagctgaaatctgtgccaggatcatggaaggtcctgcgttcaatttcctggatgctcctgctgttcgtgtcactggggctgatgtccctatgccttatgcaaagattctagaggacaactctatacctcaggtcaaagacatcatatttgcaataaagaaaactattaaatatgttagtttggacttgaatatgcaagtagttgaaatttatcttcgaaatacttgctggcactgcacctggattagtactgcaagacctgactattcataaacggaaaacgatttctataagcaacagcaggtatttttgtacagggaagctttaaatgtgtttgtgtatggaaaactctccactctcctctccctagatgccatgcttccttttgtctgttacggttgccatgttctttgaataacaaattatataacattttatcctctctcaccacaaggacaaagtatggatgtggcagagtcctgatgaaagatgtatccaaacaagat

SEQ ID NO: 351815 - DNA, 752 bp, Homo Sapiens
agatggcggcggtgtctggcttggtgcggagaccccttcgggagtgtaggcagcagcgcgcggcctgtattcccacgcgacccctgcccaccctgcgtcccgccgtcatcttcctctctccctgccaggtctccgggctgctgaagaggcgctttcactggaccgcgcccgctgcgctgcaggtgacagttcgtgatgctataaatcagggtatggatgaggagctggaaagagatgagaaggtatttctgcttggagaagaagttgcccagtatgatggggcatacaaggttagtcgagggctgtggaagaaatatggagacaagaggattattgacactcccatatcagagatgggctttgctggaattgctgtaggtgcagctatggctgggttgcggcccatttgtgaatttatgaccttcaatttctccatgcaagccattgaccaggttataaactcagctgccaagacctactacatgtctggtggccttcagcctgtgcctatagtcttcagggggcccaatggtgcctcagcaggtgtagctgcccagcactcacagtgctttgctgcctggtatgggcactgcccaggcttaaaggtggtcagtccctggaattcagaggatgctaaaggacttattaaatcagccattcgggataacaatccagtggtggtgctagagaatgaattgatgtatgggggttccttttgaatttcctccggaagctcagtcaaagatttctga

SEQ ID NO: 351816 - DNA, 1887 bp, Homo Sapiens
  misc_feature (1692)..(1700): n is a, c, g, or t
atcaggccaaatcggccgagctcgaattcgtcgagagcgggacacgaccaagatggcggcggtgtctggcttggtgcggagaccccttcgggaggtctccgggctgctgaagaggcgctttcactggaccgcgccggctgcgctgcaggtgacagttcgtgatgctataaatcagggtatggatgaggagctggaaagagatgagaaggtatttctgcttggagaagaagttgcccagtatgatggggcatacaaggttagtcgagggctgtggaagaaatatggagacaagaggattattgacactcccatatcagagatgggctttgctgaaattgctgtaggtgcagctatggctgggttgcggcccatttgtgaatttatgaccttcaatttctccatgcaagccattgaccaggttataaactcagctgccaagacctactacatgtctggtggccttcagcctgtgcctatagtcttcaggggacccaatggtgcctcagcaggtgtagctgcccagcactcacagtgctttgctgcctggtatgggcactgcccaggcttaaaggtggtcagtccctggaattcagaggatgctaaaggacttattaaatcagccattcgggataacaatccagtggtggtgctagagaatgaattgatgtatggggttccttttgaatttcctccggaagctcagtcaaaagattttctgattcctattggaaaagccaaaatagaaaggcaaggaaggctgccacattcctcagctcactggaatgaagttgaattgaagactttatgaatgaacaagagccacagctggcggcacagtggtgtagcatcttcagtttcaacctgatctctgatctgtgaccactctgttttcaggaacacatataactgtggtttcccattcaagacctgtgggccactgcttagaagctgcagcagtgctatctaaagaaggagttgaatgtgaggtgataaatatgcgtaccattagaccaatggacatggaaaccatagaagccagtgtcatgaagacaaatcatcttgtaactgtggaaggaggctggccacagtttggagtaggagctgaaatctgtgccaggatcatggaaggtcctgcgttcaatttcctggatgctcctgctgttcgtgtcactggtgctgatgtccctatgccttatgcaaagattctagaggacaactctatacctcaggtcaaagacatcatatttgcaataaagaaaacattaaatatttagtttggacttgaatatcaagtcgttgaaatttatttgaaatacttgctggcactgcacctggatttgtactgcaagacctgactattcataacggaaaacgatttctaaagcaacagcaggtatttttgtacagggaagtttaaatgtgtttgtgtatggaaaactctccactctcctcccctagatgccatgcttccttttgtctgttacggttgccatgttctttgaataacaaattatataacattttatcctctctcaccacaaggacaaagtatggatgtggcagagtcctgatgaaagatgtatccaaacaagataacttatatgtataaaattaaagcatataatatacatttactgttagtttgttttgataaggaataaaggaatttctaacctcatcaaacccccactnnnnnnnnngcacagccttgtccggcccgcctcggcctttccaagaacctttctagaaccattccgtttgggccgcgcgcgcccccaactagggtaaaggtgaaacatgggcccattaaccttggcttccctaagggaaaattcccctggcctccttggacctaaggggcctttggggatttcctcccccccaatt

SEQ ID NO: 351817 - DNA, 473 bp, Homo Sapiens
  misc_feature (43)..(43): n is a, c, g, or t
tgaaagttcggtttggcccacttcctagctttcaatctctttnatcctggtacggtattccaggtacatgatgttttactatagcttggactggtattcttagaaaccgagtttctttgaaataccttcccatgatcctggcacagatttcagctccttacgtccaaactgtggccagcctccttccacagttacaagatgatttgtcttcatgacactggcttctatggtttccatgtccattggtctaatggtacgcatatttatcacctaaacaggtaatataatcaagtttacagagctattgcagcacaaatagagccttatccccataataccatttccttttttgtttcctgttaatctttgtatctaggaaaatctaatctgcctatgaatacctattcatgaatgtacaaactgtaaaaggaaaaattttaattaaaacaaagatctgtatgtctaccacaagc

SEQ ID NO: 351818 - DNA, 396 bp, Homo Sapiens
  misc_feature (21)..(21): n is a, c, g, or t
  misc_feature (29)..(29): n is a, c, g, or t
ccgagattaccagggatgttnaattatanggagacgcctaagaaataattggatggagcccttgatgccaaacccgaagtagatttagaaccttatatgaatttgatttatattttgccaagatcaaaaattagatgttaagtatccagattttaagcttgttttaatggtcaaaaaattaggacagaaataatatggacatttattagtatcttccataatttttaagtctgacacatttctattttattctaacataaaaaaacttccattatatatttactaagtatatttaattcacttaactctgtctttataagttcctattttagatggaataagagaaacaaattatatcaaggtaaaactgatcaaaagacataattgaaagttctg

SEQ ID NO: 351819 - DNA, 2383 bp, Homo Sapiens
  misc_feature (1802)..(1956): n is a, c, g, or t
  misc_feature (1964)..(1980): n is a, c, g, or t
  misc_feature (2005)..(2014): n is a, c, g, or t
  misc_feature (2052)..(2173): n is a, c, g, or t
  misc_feature (2199)..(2209): n is a, c, g, or t
ggtccgaattcccgggatccaggtcgccgtcgttgctccgctcgctctgagagagatggccctgagaggcgtctccgtgcggctgctgagccgcggacccggcctgcacgtccttcgcacgtgggtctcgtcggcggcgcagaccgagaaaggcgggagaacacagagccaactggctaagtcctcgcgtcccgagtttgactggcaggacccgctggtgctggaggagcagctgaccacagatgagatcctcatcagggacaccttccgcacctactgccaggagagactcatgcctcgcatcctgttggccaatcgcaacgaagtttttcatcgggagatcatttcggagatgggggagttgggtgtgctgggccccaccatcaaaggatatggctgtgctggggtttcgtctgtggcctatgggctcctggcccgagagctggagcgggtggacagtggctacaggtcggcgatgagtgtccagtcctccctcgtcatgcaccctatctatgcctatggcagcgaggaacagcggcagaagtacctgccccagctggccaagggggagctcctgggctgcttcgggctcacagagcccaacagcggaagtgaccccagcagcatggagacccagagcccactacaactcatccaacaagagctacaccctcaatgggaccaagacctggatcacgaactcgcctatggccgatctgtttgtagtgtgggctcggtgtgaagatggctgcattcggggcttcctgctggagaaggggatgcggggtctctcggcccccaggatccagggcaagttctcgctgcgggcctcagccacaggcatgatcatcatggacggtgtggaggtgccagaggagaatgtgctccctggtgcatccagcctggggggtcccttcggctgcctgaacaacgcccggtacggcatcgcgtggggcgtgcttggagcttcggagttctgcttgcacacagcccggcagtacgccctcgacaggatgcagtttggtgtcccactggccaggaaccagctgattcagaagaagctggcagacatgctcactgagattaccctgggccttcacgcctgcctgcagctcggccgcttgaaggaccaggaacaaggctgcccccgagatggtttctctgctgaagaggaataactgtgggaaagccctggacatcgcccgccaggcccgagacatgctgggggggaatgggatttctgacgagtatcacgtgatccggcacgccatgaacctggaggccgtgaacacctacgaaggtacacatgacattcacgccctgatccttgggagagctatcacgggaatccaggcgttcacggccagcaagtgagccgctccatcaggggcccgaaactctcaagcccctttctggagagatgcctggctggaccgtaggagcgctgtgctctgagcttagaaagggaggtggcggatggagtgggaagtgagagacactgatttttaaatatcaaaatttcccttctgaagtcgttcggatgtgttccttaaaaagaagatggaattctctgtagagcgtctcaatccacttttaaccatggatgagagcagactccatttaccctgaaatagcagcttctcttgagaggagagtgacatggaagcaactccgtctgctgcagctgaccccctcacactgagttcacagtgcgccctccctccctcccatctgggggtagtgccttatgctgggtgttggagcagagtgagggagaggaaaataaagacctgcacatctgnnnnnnnnnnnnnnnnnnnnnnnnnnnnnnnnnnnnnnnnnnnnnnnnnnnnnnnnnnnnnnnnnnnnnnnnnnnnnnnnnnnnnnnnnnnnnnnnnnnnnnnnnnnnnnnnnnnnnnnnnnnnnnnnnnnnnnnnnnnnnnnnnnnnnnnnnnntctttggnnnnnnnnnnnnnnnnnaaaaattttttaaaacctttttttnnnnnnnnnncccccaaaggaaaaggaaatgggcaaaattttttcccnnnnnnnnnnnnnnnnnnnnnnnnnnnnnnnnnnnnnnnnnnnnnnnnnnnnnnnnnnnnnnnnnnnnnnnnnnnnnnnnnnnnnnnnnnnnnnnnnnnnnnnnnnnnnnnnnnnnnnnnnncccccgggggtttttttttatatttnnnnnnnnnnngggcccttctttggagaaggggggggaaatttaataaaaactcccccgcccggtgggaaccctccccaaacgggggagtgtaaaacctgtttttccccgggggggattacaaccccctgtggccccccttggggaaataatatttccccccccgggggaaaaaaagggggggag

SEQ ID NO: 351820 - DNA, 953 bp, Homo Sapiens
tggaccggtccggaattcccgggatccgggaggtactaccaggtcgccgtcgttgctccgctcgctctgagagagcatggccctgagaggcgtctccgtgcggctgctgagccgcggacccggcctgcacgtccttcgcacgtgggtctcgtcggcggcgcagaccgagaaaggcgggagaacacagagccaactggctaagtcctcgcgtcccgagtttgactggcaggacccgctggtgctggaggagcagctgaccacagatgagatcctcatcagggacaccttccgcacctactgccaggagagactcatgcctcgcatcctgttggccaatcgcaacgaagtttttcatcgggagatcatttcggagatgggggagttgggtgtgctgggccccaccatcaaaggatatggctgtgctggggtttcgtctgtggcctatgggctcctggcccgagagctggagcgggtggacagtggctacaggtcggcgatgagtgtccagtcctccctcgtcatgcaccctatctatgcctatggcagcgaggaacagcggcagaagtacctgccccagctggccaagggggagctcctgggctgcttcgggctcacagagcccaacagcggaagtgaccccagcagcatggagaccagagcccactacaactcatccaacaagagctacaccctcaatgggaccaagacctggatcacgaactcgcctatggccgatctgtttgtagtgtgggctcggtgtgaagatggctgcattcggggcttcctgctggagaaggggatgcgggggtctctcggcccccaggaatccagggccaagttcttcgctgcggggcctcagcccacagggcatgaattcatcatggaacgggtgttgggaaggggccccaaagggaggaatggtggctccccctggggggcattcccaaccccct

SEQ ID NO: 351821 - DNA, 481 bp, Homo Sapiens
  misc_feature (23)..(23): n is a, c, g, or t
  misc_feature (35)..(35): n is a, c, g, or t
  misc_feature (52)..(52): n is a, c, g, or t
  misc_feature (89)..(89): n is a, c, g, or t
  misc_feature (100)..(100): n is a, c, g, or t
ggggcccccaaggaaaccccaantagcccaaacangacgaaaaaccccaaancaacagcccaatatccctttgaatggtggggcccccnagcaacacccnaaatcccccccatctcccgaaaatgaatctccccgaatgaaaaaaacttcgttgcgaattggcccaaacaggaatgcgaaggcaatgaatctctccctggcagtaggtgcggaaggtgtccctgatgaggatctcatctgtggtcagctgctcctccagcaccagcgggtcctgccagtcaaactcgggacgcgaggacttagccagttggctctgtgttctcccgcctttctcggtctgcgccgccgacgagacccacgtgcgaaggacgtgcaggccgggttcccggctcagcagccgcacggagacgcctctcagggccatgctctctcagagcgagcggagcaacgacggcgacctggtagtactcccggttcactg

SEQ ID NO: 351822 - DNA, 525 bp, Homo Sapiens
  misc_feature (16)..(16): n is a, c, g, or t
  misc_feature (38)..(38): n is a, c, g, or t
  misc_feature (57)..(57): n is a, c, g, or t
  misc_feature (459)..(459): n is a, c, g, or t
  misc_feature (461)..(461): n is a, c, g, or t
ccgctgttcccttcgncttccaataggcaataaaatanggtgccatgaacgaaggangactggaaaactcaatcgccgaacctgtaacccactgttccacccgctccagctcctcggcccaggaacccataggccacagacgaaaccccagcacagccatatcctttgatggtggggcccagcacacccaactcccccatctccgaaatgatctcccgatgaaaaacttcgttgcgattggccaacaggatgcgaggcatgagtctctccctggcagtaggtgcggaaggtgtccctgatgaggatctcatctgtggtcagctgctcctccagcaccagcgggtcctgccagtcaaactcgggacgcgaggacttagccagttggctctgtgttctcccgcctttctcggtctgcgccgccgacgagacccacgtgcgaaggacgtgcaggccgggctncnggctcagcagccgcacggagacgcctctcagggccatgctctctcagagcgagcggagcaacga

SEQ ID NO: 351823 - DNA, 605 bp, Homo Sapiens
  misc_feature (22)..(22): n is a, c, g, or t
  misc_feature (32)..(32): n is a, c, g, or t
  misc_feature (54)..(54): n is a, c, g, or t
catagtacgagagctgcatgtntatgggagtntggtccctgtgagcagccgggntcctactaaatttcagcatcagggatttggcatgctgctgatggaggaagcagaaagaatagctagagaagaacatgggtctgggaaaatcgctgtgatatcaggggtcggcaccaggaattattatagaaagatcggctacagattacaaggcccgtacatggtgaagatgctgaaataatggccacaccagtccactcttctgcagtatcctccctggcagaacacggagaatcaggatttcttaaatactcaacagagaggctgagcagagcaaatggggggcttcaccctcatcccgcagctgcagagactggaaactgccttcaaggccacggctggtcatctgctgaccacaccccagatccgccctctcctgcgtgcaccccaaaaaatcacttgcgtttttgaggcttaaatcatctatccagtttctacattttgcatgaggcctgcaggtggcctattttgactcagacggtgaaaaaagcaaattaactcatttggacaccataactcatgcaataaaactgattgtcattcgaggagca

SEQ ID NO: 351824 - DNA, 516 bp, Homo Sapiens
  misc_feature (35)..(35): n is a, c, g, or t
  misc_feature (42)..(42): n is a, c, g, or t
ccaggttcctccaatcccaggagtgaatcgcctgncagacgntcaaagtcccagtttccccaaaagcctgatgtgacctccccatatcaacagtaacaacacccacttttgtccccactcagccagcagtgcatctgtgtctgaaatggtcgaacagccatgtggtatacggcgagagagattctgatctgggaatagggatatatcggagtttctttgattgaagatcagtgacttctatataaccagatgtttgtggaggagtaacatcttttgggtagatatcttttagagggacttctcctgggggtaaaatcctcactacctgattcgtatctaaaagagtcacacaattgctttgttttggagtcccccttttcttctttcctctatagaatgatgtatcagtggcccttcgtttatgcaaagatgatggtctcttccaagaataaacttcactgggtgacatgagatctggaaaaccaacaactattgtagcataatttttctcatctg

SEQ ID NO: 351825 - DNA, 415 bp, Homo Sapiens
  misc_feature (285)..(285): n is a, c, g, or t
  misc_feature (394)..(394): n is a, c, g, or t
  misc_feature (404)..(404): n is a, c, g, or t
gtaaaaactgaagttgaaaaaaatgtattcatgctaatagcacaggaatgatccacaattggattccaaggcttcttgtacattcagcatagggtgtatgaaagagtccactattctagcaacagataaaattcctactgacacgcaacctcaggttcccactcgtttagaaggctgcgtatggtcttctacttaaagcctcaagtagcagtcatggcagtgacaaatcctcattgcctccatagaacctctaggctcatgtgtgagcccaggctgggctggggncccctggggagcccagggttgaggggccagtccctggggcagctccgtgagccagggagcagctgtgccaccttggggaagggcttcacggtcgatgggtcttttcttncagaagagtnttgccccagcc

SEQ ID NO: 351826 - DNA, 1101 bp, Homo Sapiens
  misc_feature (970)..(985): n is a, c, g, or t
tccggaattcccgggatgggcctgtggaccccgttcacacagcacttaggagacagcagagctatgcggcaggactcctgtggtgggggcagttacacttctggaactgtttggtcaaatagaaagagaatttgaaaacctttatatcgaaaacttagaattacgtagagaaatcgacactcttaatgaacgtttagctgctgaaggacaagcgattgatggagcagagctgagtaagggccaactcaaaacaaaagccagtcacagcaccagccagctctcccagaaactgaagaccacttacaaggcttccaccagcaagattgtctccagctttaagaccacgacatcgagagctgcctgccagctcgtgaaggagtacatcggccaccgggacggcatctgggatgtcagcgtggccaagacacagccagtggtgctcgggactgcatcagccgatcacacggctttgctgtggagcatagagacagggaagtgcctagtcaagtacgcaggccacgtgggctcagtaaattctatcaaatttcatccctcagagcagttggctctcactgcttctggagatcagactgctcatatctggagatacgcggtgcagctgccgacaccccagcctgttgctgaccctagtcagatatctgggggaaagattgaagtagaagtgctctgacaaggaccagcccgaccctcgatgggggatggtgtccagcgaactgccccaccatccgcgtcccactgacatccctcaagagccacccagggcgtgggtcatcgcctccaactggctgggttggggggaaacccagctgtgaactgcctccctgggaaccggacggcaaaacctgtaacaacgtgggaacacgtccggagctccgttcccttctcctgacaggggccaccaaccagggaagttggacgcccttgcttggacaaaacccccaccccagannnnnnnnnnnnnnnnaccctccctccccgggtgaacccaatttttccccccctcttggggaattttccgggggaacccctctccatccccacttcggggtgggatggttttttcccagggggacaccccgg

SEQ ID NO: 351827 - DNA, 463 bp, Homo Sapiens
cacacagttctggggtttctgcacaacctctacaagcaggtagccgctaaatatattctccaatctcttttactgagcacaatgtgggtaaaactgctctctatagtagcagaattttgtttttcccctttcctagttactgatgaagagacagcttcagatgctctggagagaaactctctatcctctcaagacccacagcagcccaccagtactgtctcagtaacggaagattctagtacatcggagattgacaaggaagagaaagaacaaaccactcaagatcctgacttgaccaccgaagcaaatcctcagtatttaggactggcaagaaagaaaagttggcatcctgctgctcacgctggtgtccttcctcattttcatactcttcatcatagtccagctcttcatcatgaagctgaggaaagcacatgtgatatggtagagagaaacggagttcaga

SEQ ID NO: 351828 - DNA, 2657 bp, Homo Sapiens
  misc_feature (2011)..(2078): n is a, c, g, or t
  misc_feature (2357)..(2365): n is a, c, g, or t
  misc_feature (2434)..(2434): n is a, c, g, or t
  misc_feature (2460)..(2480): n is a, c, g, or t
atgggccggcgcggccagagcaagtgccagcgggaacagagggactgggcgcgcctcaacaactcaccacctctgcccgctggtccttcctggctcgcctggctctgaagctgcacctggaggggacacctcagaacagtaggcgggatttgcctagtatatatctcccattcagggaggccccaggtcgtgtgacgtcgacagttgctgggtagatgaggccaacacaggttgcaagaagagcggggtttagaggcgtgaaactccgcagtgctcagccaagcagggagcaacgctaggaagggcgggcagaaagggcacgctcttgtgggtgactacaggttaggagaccgttgaacctggaggggccctaggatggaccccgtggaaagattcagagactgcgccctctcctggcgccgccttcccctacacgcggcgggtatattctgttgcagttggcccaggacctgtttccaagactctgccccctcgcacttccgtccctcctggttttgtaaagtgatgctcataggaacccccaccccgcgtgacactactcccagctcctggctgacttctagtcttctggttgaagctgcgcctttagatgacacgaccctacccacccctgtttccagcggatgcccgggcctggaggtacctcttactgtaacccatcgccaagtgggcttttgaaggcgcctgttcctttctcgctttcttcggaagacccttgacccatcattcccccgacccccataacgggagagcagagaagccggtccccagtgtgatggtcctggtccaggcactaactgtccttttctcggaaaaggcagggggatgtggaaaagagtcttgttccctccccttcgatctgtggctttcgctttcacttcctcctccgagagcggacagatctctgggtgctgggcggtcatggcgctactagatgtatgcggagccccccgagggcagcggccggaatcggctctcccggttgcgggaagcgggcgtcgctcggacccaggacactacagtttctctatgcgatctccagagctcgctttaccccggggaatgcagcccacagaattcttccagtccctgggtggggacggagaaaggaacgttcagattgagatggcccatggcaccaccacgctcgccttcaagttccagcatggagtgattgcagcagtggattctcgggcctcagctgggtcctacattagtgccttacgggtgaacaaggtgattgagattaacccttacctgcttggcaccatgtctggctgtgcagcagactgtcagtactgggagcgcctgctggccaaggaatgcaggctgtactatctgcgaaatggagaacgtatttcagtgtcggcagcctccaagctgctgtccaacatgatgtgccagtaccggggcatgggcctctctatgggcagtatgatctgtggctgggataagaagggtcctggactctactacgtggatgaacatgggactcggctctcaggaaatatgttctccacgggtagtgggaacacttatgcctacggggtcatggacagtggctatcggcctaatcttagccctgaagaggcctatgaccttggccgcagggctattgcttatgccactcacagagacagctattctggaggcgttgtcaatatgtaccacatgaaggaagatggttgggtgaaagtagaaagtacagatgtcagtgacctgctgcaccagtaccgggaagccaatcaataatggtggtggtggcagctgggcaggtctcctctgggaggtcttggccgactcagggacctaagccacgttaagtccaaggagaagaagaggcctagcctgagccaaagagagagtacgggctcagcagccagaggaggccggtgaagtgcatcttctgcgtgttctctatttgaacaagcatttcccccagggaagtttctgggtgccccactaagtagaataaagaaaaacggttatnnnnnnnnnnnnnnnnnnnnnnnnnnnnnnnnnnnnnnnnnnnnnnnnnnnnnnnnnnnnnnnnnnnngaaaggggcgggcgccgcagcacataaaatctccccgcggaggggcggcccccacgaatagcagccaccccaccacacttgtcgatgacaaaaacggggcggcccccatataaggaggggccattattattatcagcatagtagacgagcgagcgtagccgagaagaaacaaacaacgccgcccgagcagaggagcgggaaccaacagcgcgcacacacggcgaggcgcgaccactcgtgtggcacagagagcagcccacccaccacaccgcacgcgannnnnnnnnagcgacacccaaactaaggtcgcgcggccaccacaaaccaccccctcacagcgacgcaaataactatgngaacggcaccccccacgagagggcgnnnnnnnnnnnnnnnnnnnnntccaccgagcgcaggatcatcggtcggcggatgaaaaccacccaaaccgcccgacacacaaagcgatacgcagacgcgcacgcagactgaaaagacgatggaggagcaactaatcgaacgcagatgatcagctactctgcgaccaccagacaacctctaatctacacccgcgacgga

SEQ ID NO: 351829 - DNA, 1080 bp, Homo Sapiens
gggagaggcgtgaaactccgcagtgctcagccaagcagggagcaacgctaggaagggcgggcagaaagggcacgctcttgtgggtgactacaggttaggagaccgttgaacctggaggggccctaggatggaccccgtggaaagattcagagactgcgccctctccctggcgccgccttcccctacacgcggcgggtatattctgttgcagttggcccaggacctgtttccaagactctgccccctcgcacttccgtccctcctggttttgtaaagtgatgctcataggaacccccaccccgcgtgacactactcccagctcctggctgacttctagtcttctggttgaagctgcgcctttagatgacacgaccctacccacccctgtttccagcggatgcccgggcctggagcccacagaattcttccagtccctgggtggggacggagaaaggaacgttcagattgagatggcccatggcaccaccacgctcgccttcaagttccagcatggagtgattgcagcagtggattctcgggcctcagctgggtcctacattagtgccttacgggtgaacaaggtgattgagattaacccttacctgcttggcaccatgtctggctgtgcagcagactgtcagtactgggagcgcctgctggccaaggaatgcaggctgtactatctgcgaaatggagaacgtatttcagtgtcggcagcctccaagctgctgtccaacatgatgtgccagtaccggggcatgggcctctctatgggcagtatgatctgtggctgggataagaagggtcctgcaatctactacgcggatgaacacggtgactcggctcccaggaaacatgttctccacgggtagcgggaacacttatgcctacggggtcatggacagtggctatcggcctaatcttagccctgaagaggcctatgaccttggccgcagggctattgcttatgccactcacagagacagctattctggaagcgttgtcaatatgtaccacatgaaaggaagatggttggggtggaaagtagaaaagttacagatggtcagtggacctggctgt

SEQ ID NO: 351830 - DNA, 299 bp, Homo Sapiens
  misc_feature (267)..(267): n is a, c, g, or t
acaaaaaggcaaactaaaatgtatctagtgataaactgtaccactactgtaccccatatgttcagttctatctgagtaaaaatagagtctggaatataatattggccccctactcagtctttctggatggtacacaggctctttgaaagaagacagtctcatgttaacaattcaaaaaattgtttgagatcccttaagataaatatcccccaaaacagtgtacctctatttcctgcataaaaatttagatttggaatggtatgaccngagggatagatccacttcatgttactacaaca

SEQ ID NO: 351831 - DNA, 337 bp, Homo Sapiens
  misc_feature (17)..(17): n is a, c, g, or t
  misc_feature (42)..(42): n is a, c, g, or t
  misc_feature (64)..(64): n is a, c, g, or t
aatcaagctccccgganactgccatggttttccatgacgcancctcttcccgttttccctttgnggagagcattttcccgcatgcttaattgttgctgtaactgaattcagttcccctcctctcatgtagggaacccacagcacttattttacctgtaatagagtctctttgtataatgcagcattttgccccccttttggaataaaactggttttaatagaggaagttgttgtgtctgtcaagttgttctttcttgtgtttgggcaggaaaaaaggctgatacctgctggattatgtatgtataaaaattcttggccgggcgcggtggctcatgct

SEQ ID NO: 351832 - DNA, 3690 bp, Homo Sapiens
  misc_feature (3135)..(3146): n is a, c, g, or t
  misc_feature (3380)..(3389): n is a, c, g, or t
  misc_feature (3595)..(3606): n is a, c, g, or t
cacatactgatacacaactctaccaggggcgggccccggcccggaattctcgggatggttgagggaaggggccgtgcccggtgccagcccaggtgctcgcggcctggctccatggccctggtcacagtgagccgttcgcccccgggcagcggcgcctccacgccctgtggggccctgggaccaggcggtccagcgaaggagtcgactccagcgaaggcagagctttgcggtgctccgtggggctgtcctgggactgcaggatggaggggacaatgatgatgcagcagaggccagttctgagccaacagagaaggccccgagtgaggaggagctccacggggaccagacagacttcgggcaaggatcccagagtccccagaagcaggaggagcagaggcagcacctgcacctcatggtacagctgctgaggccgcaggatgacatccgcctggcagcccagctggaggcaccccggcctccccggctccgctacctgctggtagtttctacacgagaaggagaaggtctgagccaggatgagacggtcctcctgggcgtggatttccctgacagcagctcccccagctgcaccctgggcctggtcttgcccctctggagtgacacccaggtgtacttagatggagacgggggcttcagcgtgacgtctggtgggcaaagccggatcttcaagcccatctccatccagaccatgtggtcctcagaacaggagcagatggagcaggcgatccgtgctgagctgtggaaagtgttggatgtcagtgacctggagagtgtcacttccaaagagatccgccaggctctggagctgcgcctggggctccccctccagcagtaccgtgacttcatcgacaaccagatgctgctgctggtggcacagcgggaccgagcctcccgcatcttcccccaactctacctgggctcagagtggaacgcagcaaacctggaggagctgcagaggaacagggtcacccacatcttgaacatggcccgggagattgacaacttctaccctgagcgcttcacctaccacaatgtgcgcctctgggatgaggagtcggcccagctgctgccgcactggaaggagacgcaccgcttcattgaggctgcaagagcacagggcacccacgtgctggtccactgcaagatgggcgtcagccgctcagcggccacagtgctggcctatgccatgaagcagtacgaatgcagcctggagcaggccctgcgccacgtgcaggagctccggcccatcgcccgccccaaccctggcttcctgcgccagctgcagatctaccagggcatcctgacggccagccgccagagccatgtctgggagcagaaagtgggtggggtctccccagaggagcacccagcccctgaagtctctacaccattcccacctcttccgccagaacctgagggtggtggggaggagaaggttgtaggcatggaagagagccaggcagccccgaaagaagagcctgggccacggccacgtataaacctccgaggggtcatgaggtccatcagtcttctggagccctccttggagctggagagcacctcagagaccagtgacatgccagaggtcttctcttcccacgagtcttcacatgaagagcctctgcagcccttcccacagcttgcaaggaccaagggaggccagcaggtgggacagggggcctcagcctgccctgaaatcccgcccagtcagtggttaccctccaggcagtgccgtggtggccaaccggacccaggccttccaggagcaggagcaggggcaggggcaggggcagggagagccctgcatttcctctacgcccaggttccggaaggtggtgagacaggccagcgtgcatgacagtggagaggagggcgaggcctgagccctcacacatgcccacgctcccctgacactgaagaggatccacaactccttggagaaacaccctcacgtctgttgccgcacacattcctctcagctccgaccccatacccgtcactacagcctcacctcccacccctgtcactacggcctcacctcccacccctgtcactacagcctcacctcctacagccttaagtcccaggcccatgtctgcctgtccaagggctcaagactttctaactgggatgtggtagagggactgaaggtacctttgggggcaacagcaccctagtttcattctcaactctagccctgcacactcacctgtggcacggaatgaaaacagagcttcccgtgcaaaaagggtcacgcctcccacccccgccccctccctgcacctcctgtcctctcccagttcattcctggaaccagccaggccaggcaaccagtggcccccaaaggcaggcaggatcctcaggccccagccgcgggaggctggaagggctggcagatcgcttccctcatccacctccaccggtccaggtctttgctgctgtccccagacctcctgtgacaccacgccagatcacagggcaccaggccagagatagtcttctttttgtcctttctgcctctggctagtcagtttttcatagccttacagtatctggctttgtactgagaaataaaacacattttcatatttggttattttcaatgtgacgatgaagccatctgtgttgcagtcagacccttctctgctggctggggaaggtggccgccccttcctcccagcagtctcctcacaattccaaggtggctcgtgacagacctatttgggggagtgccgtgtttgggcgtggcgtgggaggaagattgggtaagagaagagaggaagtcagtgctatctccccatctcctggggcagggcctggtaaatatgacctgctcacacccacccgctcagacaggtcgggcaagggaagaagtcgtcagcgggcagcaggcatgtggctccactgtgagagctggaaggggttactcatgaggaagtgcctacctggacaggaccaagcctgttccaaaagcgaagcctccttgggacactcggcgccaggttctctggcatgttttgggtcccaagaatcaccttcctcctgctacaaagcaaagggcctgactttccaagccaggctattgcgcgcctgggaacaacgccccttggtgannnnnnnnnnnntgcccaggggttcctttcggataatcttcagcggccaacaccacttcaccaatccatttttgcccctgccaattatctataacccagaggggccggttccgtgacgcgttatatttcccccgcaatatgtatgccccccgcgccctacaacagcgcctgcccataccccaagcccggcgaggccctggtacgcctgcccgcccactagtctcagcgggtgttgctcctgcttannnnnnnnnnttaccggcttaccccccagaaagcgcccctcggctacgaatataattcacacccccagatcgcaggggccccgggcagctaaaaaaaccaccaagagtgaaattgcagcctgagcacaccctataccgcctaattccaccacccggctatactacgcgcactcattccccgtatacacccgcccctccaaccactatgatgatcgnnnnnnnnnnnntttgatttgcgcgaccccctccgcaccgttgtaataatgcgtgtgattatgtccccgacctacccctctagtctgagcccgggg

SEQ ID NO: 351833 - DNA, 673 bp, Homo Sapiens
  misc_feature (130)..(130): n is a, c, g, or t
gttttggcaactgaaaactttgtccaactgatactatgtgaggaaggtggttcaaggagttttagggccctcttgtccttctttaaggctctgcaaaccttattttggaaaacttatttttctccctttnatttgaatttcctcccagaaattatcatcttggtatcactgagacaaatctaatatcaatttacttgcctgagaaattaggattatgtctgtccacataaatcgcaaggaagaaggtattctgtttatttcctgtccactgactgatgctttcgtatcaccatgtagctgcacatactaaaattataatacaaggaaaaatttattcttttcaaaatcttattcttcaaatactattctgaaagccatttggcacccagtacagaatttaacttaacggccccaatctggaattcactgaacgcattcaaactgttagaaaggaaaataaaaatggaggacaaacacatttttgttctgtttctgaaaacaatatttaaggtcagaactgtttaaaaagaagcactgctaaaaagttataggattcagagaaacatagtatttttgtacagtatcttataaaatgttcagacctctctctacattctctttacaatgtaatgtctctaagtgactggtttcccaataaactgattttaatgcc

SEQ ID NO: 351834 - DNA, 983 bp, Homo Sapiens
aagcacaagtactttggtttaaaaaaagagaatgtaatcttttttcagcaaggaatgctccccgccatgagttttgatgggaaaattattttggaagagaagaacaaagtttctatggctccagatgggaatggtggtctttatcgggcacttgcagcccagaatattgtggaggatatggagcaaagaggcatttggagcattcatgtctattgtgttgacaacatattagtaaaagtggcagacccacggttcattggattttgcattcagaaaggagcagactgtggagcaaaggtggtagagaaaacgaaccctacagaaccagttggagtggtttgccgagtggatggagtttaccaggtggtagaatatagtgagatttccctggcaacagctcaaaaacgaagctcagacggacgactgctgttcaatgcggggaacattgccaaccatttcttcactgtaccatttctgagagatgttgtcaatgtttatgaacctcagttgcagcaccatgtggctcaaaagaagattccttatgtggatacccaaggacagttaattaagccagacaaacccaatggaataaagatggaaaaatttgtctttgacatcttccagttttgcaaagaagtttgtggtatatgaagtattgcgagaagatgagttttccccactaaagaatgctgatagtcagaatgggaaagacaaccctactactgcaaggcatgctttgatgtcccttcatcattgctgggtcctcaatgcagggggccatttcatagatgaaaatggctctcgccttccagcaattccccgcagtgctacaaatgggaagtcagagaccatcaccagctgatgtcaatcacaactttgaaggatgccaatggatgtaccaattccaattgtgaaaatctcctccctcttattctccccaaggctgggagaaaaggaattaaaacaaggtttatgttgggcac

SEQ ID NO: 351835 - DNA, 1289 bp, Homo Sapiens
  misc_feature (349)..(349): n is a, c, g, or t
  misc_feature (476)..(476): n is a, c, g, or t
  misc_feature (1214)..(1214): n is a, c, g, or t
  misc_feature (1254)..(1254): n is a, c, g, or t
ccgggccgaccagtatagctcctgcagatgctccaagaacaccaatcaagcacaacagcggggaggagcggcgcgcataatacagaggcgagaggtggggcttccctctcgggtcggggggggcgcgctcagaggcaacagccaacgtaccgattctccggagggatcaaatcgccggtataagaggatggttaatagcacctccccgtgggaagtgggggaatcgcatagatgggagaggaatatcttcgggggcgcagcgaatttcattgaccgtccgtgcccagactttggccggagaggaccctgtcttgtgaggtaggcgtctggaggtgaaccttaggagcangggtgtctcaattacaggaatttttaaaactcggttgaggaaggtcggccacaagggggaagtcgcccggttggaaaaatcaagggtgctatcaggatgaagttcagcccgccagacaaagcccagngaggccccaggcgccaggcctgggtccctgcccacctcacccaggccagccagacagcacggactgccctacaaggtcacctcagagagatgggggtgttctctcactgctggcttttgatgagcccaggagggctcagccttcactatcctccctaacaggcatttggggtgcagagatgctgacgcctgaataaggttgggattcggggcccttgggaacactgggcacctggtgggtgggtggaggggcaggacgggctgcagccatgtttccctttaaaaacagactgctggaatttaacgaactaaacaaatgaaccaaggtgcttcaccccccaaaaaagtgagttttgttctgcgtggagcgattgcctttgggaagccaccaaggccacctgccaacaggcaaatgctgtgctgccgtctgcctggctgactccggccctcccagtcctgcaagctcatggccaggacgataacgatgacaggggcaacaccatggtcctcggctgcccttcctggggcaggagggcccagaagactgataagctaaacccagggcctccctcggctgcttatctgcccagcacctttcctctaggtcctctcctcccaccagtacaggggtctgggagggggttgcagggggtcctgaaccacagatccctggagactcagtgggagcagctgtaccaggaatcaggcaccactccgctgctgtaagtcttcgtgaganccactggccagcttcctctgacttccctgtcccctcaccnaaatcgatgacatcaggagctaatggcccaggctg

SEQ ID NO: 351836 - DNA, 407 bp, Homo Sapiens
atcatcaaaaccagcaatgagagaaacccccatctctctgaggtgaccttgtagggcaatccgtgctgtctggctggcccgggtgaggtgggcagggaccaagccctggcgcctgggcctcgctggccttgctctgcgtgctgacttcatcctgatagtaccttgattttcctactgtgacttccccttctgtcgacttcctcaccaactttaaaattccgtattgagagcagtttcctaagttacctcaaatcctattcagaagaaggttctccctggaagttgggagggcggaaaacaagtttagtcacagaagactactccatgtttgagcttctgtttcaagggaagtgagtaactgccggaggagccctgcccctctgcagtgtgtggtgttgccctgatac

SEQ ID NO: 351837 - DNA, 1047 bp, Homo Sapiens
ctttgctgctgctgaagtgtacctgggtgttagatttcagatcctgggctgagcacttgtgagctttcctaaactgtgagactcacagaggggaaagatactgacggtgaaaccagcatggaaaacgtctttaccatgtggttccctcctccccaaatacataaagcaaataagcaggatggggaacagcttgaccttcatccacccctaactccaaaactatcaaggtacgacagtgggcattgtcatcgacactcaatttcatgtgaattttagcaaaacaggaaacaaagataatgactcagttcagaggatcggacaaatgtgtctagtccgggtggacttcggagggagtggggtgggcttcaaggattctgggcgttgggatggcatgagctaccctgtagagtttagttctgcctgcccgccttgggtagtagtgaccagtcagtgtcagcatcagtgtcccaaccccagtctctgtttactgcctttgaacagaacttcttccttccccatgctttgggtcacctcgggctgcaaccctgtctgtgccagattgcccggtctgaccctgcaggaagcaaagaggtgagcttaaagaacaaccaaactctgccaggggtcccagaaagcccagggtccagcagtctcagcacttggccccttgccccttcacaccatcctggggcaggggctgggcctccctggtggcaggggtgggtggagaattacgggagagggtgcaacgagtctgggccccttgcctcgggctggctgggtgtgcttccaagagcctctgctcaacatggtaggcctctggattctggcccttctgcattggctgttgctttggactggactgtggctgagcctgtgtccatggagaagccagatgtcgtgtaaggctggctggctgctgcgaggggaaggggggtggacatccataaggggtgcccttacaatcacaggacaagacctggagcaatcttcatcaaggcagtgactccaactcagggatgtcaagacaggttgaaaaggagaacg

SEQ ID NO: 351838 - DNA, 610 bp, Homo Sapiens
ggcaaatagtagggaaatacaggtaatatgaaattaaatgtatttttatccattatttgattcccacctgttattttatttagaatacgaatacaaccaagtagggaaaaacgtatcagtaactgctattcaacttaaattcagcgaattaatagctgaatagaaatagctaatgacaatgcaaaagagaaaacaagccatattgctaagaaaaggatagtaagctgcttagaaagaaccagcctgtgttggaaataattctcttctagataatttaccccattttcttggcttgtactaattgaatggaagtggttaatttgttcagagtttattgccgtttgatgccaccccagtctatagttctgtgtgactttccatattgaaagagtagggttagtagccaggttgtcagtcttttacaaatgtctacataaatgtctacataaatctgaaagtggtttatattcaaggttagtttttcagtagcgtctcctccttattcattcacttttactgtgaagactgaaatccaaaagccaggttccccaaaaaagtatttttaaaaaattttagggggacccaaataaatagagggaagaccaattat

SEQ ID NO: 351839 - DNA, 461 bp, Homo Sapiens
atttcaatttgctggatggtcccactcgcatcattgtgccttttgtgacctgtggggacctgagctcctatgattcggaccgcagttacccactggacctagagggcggctcagagtacaagtacactccacccacacagccccccatctcgccaccataccaggaggcctgcacgttgaagaggaaggggcagctggccaaggagatccgcccccaggactgccccatcagcagagtggacacgtttccccagcccctggccgcccctcagtgccacaccctgctggcccctgaggtctggaaatgtgactctcagcctgccttgaccccttccccgtgtgcctttttctgacccaaatctcatggtttctggggccaaaattccctttcctgcctcccaatagctataaaaaattggtaaagccaagcataatgaatggaaaagtttcgccaaaaaaaa

SEQ ID NO: 351840 - DNA, 2021 bp, Homo Sapiens
  misc_feature (51)..(87): n is a, c, g, or t
ggatgcaagagcaatgataggggaactgcagcttactgcggtggcggcggnnnnnnnnnnnnnnnnnnnnnnnnnnnnnnnnnnnnnatcaggccaatatcggccgagctcgaattcgtcgagagcggatcaggtcccggcccgccggaacctgggcgatccacgatgccgagtttgccacgctgcgacagcccataggcttgcccccccgggcattcgggtggactacgaacacaaactgaagccctaggacttgtcgcccgtttgcgctctcgccgaggcacaggctgctcgcggaccaccctgctccgaaaactaagaggtaggtggtagcccattcatctggttactgatactggccggcatcagtggactgtcggcaggtccttgagcaactggtgtgtgaaatgggacggacgtcaaaggacaagcgggatgtctactaccgcctggccaaggagaatggctggcgtgctcgcagcgccttcaaactgctacaactggataaggaattccaactcttccaaggcgtgacacgggcagttgacctgtgtgcagccccaggcagctggagccaggtgctgagccagaagatcgggggccaagggtccggccacgtggtggctgtggacctgcaggctatggctccactaccaggtgtggtacagatccagggggacatcacccagctgtccactgccaaggagatcatccagcactttaagggctgccctgcggacctagtggtgtgtgacggggctcctgatgtaaccggtctccatgatgttgatgagtatatgcaggcccagctcctcctagctgctctgaacattgctacacatgtcctgaagccagggggctgctttgtggccaagatattccgaggccgggatgtgacgctcctctacagccagctgcaggtcttcttctccagcgtgctgtgtgccaagcccaggagcagccggaactctagcatcgaggccttcgctgtctgtcagggctatgaccctcccgagggcttcatcccggacctgagcaaacccctgctggaccattcttacgacccagatttcaaccagctggatggtcccacccgcatcattgtgccttttgtgacctgtggggacctgagctcctatgattcggaccgcagttacccactggacctagagggcggctcagagtacaagtacactccacccacacagccccccatctcgccaccataccaggaggcctgcacgttgaagaggaaggggcagctggccaaggagatccgcccccaggactgccccatcagcagagtggacacgtttccccagcccctggccgcccctcagtgccacaccctgctggcccctgagatggaagacaatgaaatgagttgttcaccttaacccattacgctggcaaactgatacaactcagaaactgctcaatgtcaggaaaaccggaacttgttgatgaacttgttttcaaaatatcatctcatcaacgaggcctggacaaacaagccctgaggagggatctgcaacaaccctgaagacaacaaggaaagaaaccatgaaagtctgtctgtactgcagtgggaattcttgagtgaggtcttacctcttctttaaacctcttcaggagtgtcctgattatgtccagaattttccctaaaggcagggattcttaacctggatagaagccaggggtaaccatgaacttgatggaagaaaatgttacatctttattttcagcaatgaaactgaaatttagccttactcccaagttataaatgctggcaacaaatcacagtagtaaaagcagtacctgggattttcccaccaatacaaaccagttacagcaactgtaatgtaacataaaaagggcatcttgaagtattgttcatatttgtcacctcttggaatgatagcagatcctgtaagttgatgtattaattaaaaagcccatatattactgcatctcaattttgtttcaatttaatatatagtaataattgtaattcaatgtaa

SEQ ID NO: 351841 - DNA, 523 bp, Homo Sapiens
  misc_feature (41)..(41): n is a, c, g, or t
  misc_feature (468)..(468): n is a, c, g, or t
ctcacgttgtacgttcacatcaggtcccggcccgccgacancctgggcgatccacgatgccgagtttgccacgctgcgacagccataggcttgcccccccgggatttcgggtggactacgaacacaaactgaagccctaggacttgtcgcccgtttgcgctctcgccgaggcacaggctgctcgcggaccaccctgctccgaaaactaagaggtaggtggtagcccattcatctggttactgatactggccggcatcagtggactgtcggcaggtccttgagcaactggtgtgtgaaatgggacggacgtcaaaggacaagcgggatgtctactaccgcctgggccaaggagaatggctggcgtgcttcgcagcgcctttcaaactgcttacaattggataaggaatttccaactgtttccaaggccttgacacggggcagtttgacctgtgttgccagccccagggnagctgggagccaggttgttgagccagaagattcggggggccaagggttcccgcca

SEQ ID NO: 351842 - DNA, 2211 bp, Homo Sapiens
  misc_feature (1626)..(1634): n is a, c, g, or t
agcgggccttagctcccgcgctagagagaaacatgtatcgttttcgatcacagctcttcacggggatttctgctgccgccaccgcccactcttacccccgccgcttctcgactctgttgttagccgaagactcgcctctcagccgcccgccgcacagacgcacgagtaaaaagtgcagctccatcggctgatcctcgctaagctccgactctgggcggcaccgggcgtcccacgatgccgaagaacaagaagcggaacactccccaccgcggtagcagtgctggcggcggcgggtcaggagcagccgcagcgacggcggcgacagcaggtggccagcatcgaaatgttcagccttttagtgatgaagatgcatcaattgaaacaatgagccattgcagtggttatagcgatccttccagttttgctgaagatggaccagaagtccttgatgaggaaggaactcaagaagacctagagtacaagttgaagggattaattgacctaaccctggataagagtgcgaagacaaggcaagcagctcttgaaggtattaaaaatgcactggcttcaaaaatgctgtatgaatttattctggaaaggagaatgactttaactgatagcattgaacgctgcctgaaaaaaggtaagagtgatgagcaacgtgcagctgcagcgttagcatctgttctttgtattcagctgggccctggaattgaaagtgaagagattttgaaaactcttggaccaatcctaaagaaaatcatttgtgatgggtcagctagtatgcaggctaggcaaacttgtgcaacttgctttggtgtttgctgttttattgccacagatgacattactgaactatactcaactctggaatgtttggaaaatatcttcactaaatcctatctcaaagagaaagacactactgttatttgcagcactcctaatacagtgcttcatatcagctctcttcttgcatggacactactgctgaccatatgcccaatcaatgaagtgaagaaaaagcttgagatgcatttccataagcttccaagcctcctctcgtgtgatgatgtaaacatgagaatagctgctggtgaatctttggcacttctctttgaattggccagaggaatagagagtgactttttttatgaagacatggagtccttgacgcagatgcttagggccttggcaacagatggaaataaacaccgggccaaagtggacaagagaaagcagcggtcagttttcagagatgtcctgagggcagtggaggaacgggattttccaacagaaaccattaaatttggtcctgaacgcatgtatattgattgctgggtaaaaaaacacacctatgacacctttaaggaggttcttggatcagggatgcagtaccacttgcagtcaaatgaattccttcgaaatgtatttgaacttggacccccagtgatgcttgatgctgcaacgcttaaaacgatgaagatttctcgtttcgaaaggcatttatataactctgcagccttcaaagctcgaaccaaagctagaagcaaatgtcgagataagagagcagatgttggagaattcttctagattttcagaacttgaagactattttctaatttctannnnnnnnnctatttcaatgtatttaaactctagacacagtttttatcttggattaacttagataacttttgtagcagtggttatattgcttataatttaatgtacaatactattgaaactggtgagttctgattattaaatattctctgtaaatcagtaaacatgtataaagtatttgtaatgtttggtcataatttatttatgaagacagcaaaagactgatttcatgatggggaaaacaattagccaaagtttaatttcttacactgtggttgtcaagaatactgatttactataatgatatatacatgcaagatatttaacttaatatcttagacaagagttctgggtacaattttgggatctagttcccctggaaaagctgctgtatttttaatttttaatggaatgtagcttttaaaatcctgtcactggcatcaacaaaaggaattataccatgagaccttatagctgtacttaaaagccattcagttcagctattgggagttcatgatgaattagcatatgccagaaaggttgctaaccttaacatctgagagcagtaacactgattttatctgctgt

SEQ ID NO: 351843 - DNA, 2220 bp, Homo Sapiens
  misc_feature (2004)..(2051): n is a, c, g, or t
  misc_feature (2054)..(2061): n is a, c, g, or t
  misc_feature (2063)..(2084): n is a, c, g, or t
agcggtagactgaggaaaaagggtaacatgaagataaatgagacgagagaggacatggatgcacagttgttagaacaacaaagcacgaactcaagtgaatttgaggctccatccctcagtgacagtatgccttctgtagcagattctcactctagtcatttttctgaatttagttgttctgacctagaaagcatgaaaacttcttgtagtcatggttccagtgattatcacacccgctttgctactgttaacattcttcctgaggtagaaaatgaccgtctggaaaattccccacatcagtgtagcatttctgtggttacccaaactgcttcctgttcagaagtttcacagttgaatcatattgctgaagaacatggtaacaatggaataaaagcctaatgttgattctcatattctcggcgatgcactaaaagaaacaaataacaaccactcacatcagacaatggcaattacacacagttgcaattcagactgaaatttaggcccataaatgctgcagaataattaccactgtacaaccgtgtttggagctggttgaactacatgtgactacttaagcttcaggttaccagcaaaagccgggtttcatctatcataatgcagatacaatccctgtgttcagcaaggcattgtgtgtcatgtggatctcaagttaccaaactatgaactgaaggctttaaaagtgcattattttaaggataataaatttgaagagcaaagcatgttttgtgtgtttgccacaaaacattgcttgaagcacatacttagatagaaattggtcttaatttatataatcaatataaaatactaatgcaattctacagcattcaaatgaagaaaacttgaggctttagggataagtggttagtgatattttattgaaaccactaaagagataagtttaaaagaactgcataggttactctcagtatatgatactctgtaacatttctatttatatcggcataaatttcattttttttcttcctatgcaatgtggttatataaagcttaatgcagctcatttgctaccatttggatacttagacactttgagcaagattgtgggcagtttttgcacaaccttgaaataaaaaatacctggcacccaatcttgctttattgctcgatgccatctttagaggaaaaaatgtaaaggtaagtaattaagcatatgacagcaacaaataagatacatagaactacaaaataaagtcccattaggttataagtattacaaaaaatccacctttctctaaggggaagtttgtaccccattgattcttggtgcctttgggatcgactgggttttaatggcctagttatttgaggattttgctgtgttgttttccatgtcttctctggtcaccttggattatatataaaaatacaggaaatagataaacatgaatgtgattaataatgctgaaaaagtattagcctaccaaagacacactcaggctttagtgaataactttacataacctcagtttttaacacatgcatatcttctccaaccatgaaatcaaagcacggtgcagaacttgtaccaagtacaaaaggtccatgtatgattagcattattttcttttgcttttgtttatggacaatgttcagctgacataagcagaagttggccaaaatactgcctgtactgttaatttcctgtataattcacttaaataaaagcaggttaacctcaatgatagcagttaaaatgttctatcttatgtatttcttttaagtattaccattatggtgctactgagcgttttcttttggtaaaaagaaaaatgccatgggctgcagtcttcttccatcacttttccctaccaggtccattaatatgcttataacactagtgccagttattttatttgataatgcttatggtatttgtatatttgtttgcattccaattttgtttaataatgagtgtgtaaactgcatacgttaaataaatgtaaatactaatgtaaaaannnnnnnnnnnnnnnnnnnnnnnnnnnnnnnnnnnnnnnnnnnnnnnnttnnnnnnnnannnnnnnnnnnnnnnnnnnnnnctgggccggccgccctcggcccctcaaaaaaatttttttaaaaacattcggtttggggcggcggggccccgaaagggaaggggaaacttgggcccaaagcgtgttttcccaaagaaaaacccggggcaatagacaa

SEQ ID NO: 351844 - DNA, 979 bp, Homo Sapiens
ggtaacacatcttccccaggcccacacaatacaatcatttttgctggatacacagtatcgtcgctcatgtgcagttgagtatcctcatcaggcccgacctggcaggggatctgcaggtcctcagttacatgggtctacaaaatctcaaagcggaggcagaccagtctctcgaaccaggcagggaccataaggcaaatgagaagaatctatcaggctgcaggaaacacgagatttcatgaagcagtattcagtcatcaagtgatgcagagcttgtatagaagatcgactagaaatcatcttcatgaagagtgattttggcacaagtgaccgaagaacaaaacaccatagcagccaaaaatgacatgagtgttgtttctatctccagttactgtctctttcagcagaaattaacctatcccattggaaaggcaagtttgtacccaaagatgcaacagtgaataatacccaaatcactgctcatgttatctcttaacaatgatcagttcaatcatataggatttgatgagctcacacatacacaaaaagcagcaaatcatcagtgacaatatcactggcttcagaatacttcagcctgtgttcatttctggagagttgtactcagttttaagtcattttgctgttgaaaatctgacctcatcaaatagatgtcattcctaaaactctctttagatgtcctaccctatcagcagattaaaatggaaggggtgtgtaactaaaaacataaatgttaagcattagtataaagtaacttctgtaataaattatatcgcatattttttcagataggacagctcaaccttaccgatgcctacctgatgccaggtgatgcttattttcttcctaaaagtaggttactgggtcatatcttttttccaaatattaaatgcaccttgccagatattctcctgcagctctaatgaaaggtccattatatttgtagaatctactattgagcccc

SEQ ID NO: 351845 - DNA, 343 bp, Homo Sapiens
ggaaactcagactactttttctcaatgtagcttttccttcatagataggcaattctggttcaaccaggaattgtgatgacatcataaacacgtaaactcttagcaatttatttattttaaaatattctcttagagtgctttttacttactatctgttccaaaagaaaccccctcaaaggagaatagagttcactgctctttgggacaagattacctttatatccagcagttatcaaagttggtttagattatggcctcaagcaaattttactaaaatgtgaaaatatgccaccttccaagtcagaaatgaaactttggagtatgttcatttaaaagagttttt

SEQ ID NO: 351846 - DNA, 700 bp, Homo Sapiens
  misc_feature (388)..(457): n is a, c, g, or t
tcgcgtgtgctgccaagcattaggttggaagatgcaaagtttatacctgatgatcagggcagtaggcataattcagcaacaaacaatcttcctttgggagaaacctgttcattccaatcttctaattacagtggttcctatctcagggatactggactttctgacgcagatgaacaattaaggggaaaagcttcccttttccctctgtggcagttacgattttgacttcagtcctgagaaaaacttcaggttttgaaaatcagatgatgtcttctccttttccaaacaccacacgttgaaagcatttataaatccaagtctgaaactctgcgctctagtactgctgttaagatacacaacttgtttcttagttcatataatctcgggnnnnnnnnnnnnnnnnnnnnnnnnnnnnnnnnnnnnnnnnnnnnnnnnnnnnnnnnnnnnnnnnnnnnnnctgatgcccagatttttttcataaatattctgcctactgtaaatatgggttcctctgagttgttttagaaaattagcgcaatgtattaaaatcaagtgttaggaaatttcatggtcttacctacaataacttttattttggaattgaactattattaaattgtatctaatcctggattacagtttaattaattattcttagtgcttaaggcttcataaagtaatttttccaaccttttttttt

SEQ ID NO: 351847 - DNA, 491 bp, Homo Sapiens
  misc_feature (24)..(24): n is a, c, g, or t
  misc_feature (250)..(310): n is a, c, g, or t
tctcagggatactggactttctgncgcagatgaacaattaaggggaaaagcttcccttttccctctgtggcagttacgattttgacttcagtcctgagaaaaacttcaggttttgaaaatcagatgatgtcttctccttttccaaacaccacacgttgaaagcatttataaatccaagtctgaaactctgcgctctagtactgctgttaagatacacaacttgtttcttagttcatataatctcgggatnnnnnnnnnnnnnnnnnnnnnnnnnnnnnnnnnnnnnnnnnnnnnnnnnnnnnnnnnnnnnaatatacctgatgccagatttttttcataaatattctgcctactgtaaatatgggttcctctgagttgttttagaaaattagcgcaatgtattaaaatcaagtgttaggaaatttcatggtcttacctacaataacttttattttggaattgaactattattaaattgtatctaatcctgc

SEQ ID NO: 351848 - DNA, 2745 bp, Homo Sapiens
  misc_feature (872)..(872): n is a, c, g, or t
  misc_feature (1678)..(1678): n is a, c, g, or t
  misc_feature (1688)..(1921): n is a, c, g, or t
  misc_feature (1934)..(1964): n is a, c, g, or t
  misc_feature (1981)..(2046): n is a, c, g, or t
  misc_feature (2063)..(2063): n is a, c, g, or t
  misc_feature (2096)..(2114): n is a, c, g, or t
  misc_feature (2120)..(2120): n is a, c, g, or t
  misc_feature (2132)..(2132): n is a, c, g, or t
  misc_feature (2142)..(2142): n is a, c, g, or t
  misc_feature (2154)..(2154): n is a, c, g, or t
  misc_feature (2182)..(2182): n is a, c, g, or t
  misc_feature (2191)..(2191): n is a, c, g, or t
  misc_feature (2198)..(2198): n is a, c, g, or t
  misc_feature (2203)..(2203): n is a, c, g, or t
  misc_feature (2210)..(2210): n is a, c, g, or t
  misc_feature (2215)..(2215): n is a, c, g, or t
  misc_feature (2561)..(2561): n is a, c, g, or t
taggctaggtacgaggcctgggtgtagaattcggcacgaggcgcccagtggcactgtgagcgattcggaaagtagtaacagcagtagcgatgcggaggagctggagcggtgccgcgaggcggcaatgccggcttggggcttggagcaacgcccgcacgtggcagggaagccaagagccggtgctgcaaatagccagttgtcaacctcccaaccgagcctcaggcataaggtgaatgagcatgaacaagatggcaacgagcttcagaccacccctgaattccgagcccacgtagccaagaagctgggagccctgctggacagcttcattaccatctcagaagcagcaaaggagccagcaaaagctaaggtacagaaagtcgctttggaggatgatggtttccgccttttcttcacatctgtccctggaggccgtgagaaggaagagtctccccaaccccgccgaaagcgacagccctccagctccagcagtgaggacagtgacgaggagtggcggcggtgccgggaggcagctgtgtcggcgtccgacatcctacaggagtcagccatccacagccctggaacagtggagaaggaggcaaagaagaaaaggaagttgaaaaagaaagccaagaaggtggccagtgtcgactcggctgtcgctgccaccacccacaccagcatggccacagtccagaagcagaagtcaggtgagctcaatggggaccaggtgtcgcttgggaccaaaaacaacaaaaacgcaaagaaggccagcgagacctctccattcccaccagcaaagagtgctacactatacctgcaaactgaacccagccatgggcacagggctcagccagctccaaggacaaggtgtnccccccaccctggggacaaggcatttccaagcccacctccctctccaagttcaaggactgggctggcaaacccagactgcccatgagaccctgatggtgatgaaggcttgctcgagagttgggccaaaaaagtggctgtagggtgagaagaccaatcaagggctgcccctctgtgctcccacggagggctggcgggggcgctgtggttccagaacatttcatgacctcaggaaaaaagggaccgtggcaggtatttgagactagtggccaagtggtgaaacctccatctccctagaactgtctgaggtgggcaggggaagggagaccttccccaccacctccttagcctggtgtgagaaacagtttttagaaaatgagagaagggatccccaagaggccaaggcccagagaaacttttggtcttctctccttagcccacaaagacttcacagaatcgtctgagaaaggagagctttttcacccctggctttctagaattttctttggctgcatttgggaatataccacacatgatgggggctctgagccgaccagattatggaaactcaattggcagaggacccaaaacaaaactttagagggaattggatattgcctctctgtcaatgctgaaccttaagacattttaagtaaacatcctcctcctctctacacccccaggatttgtgcgttcaccccacccaagacttcaggaagtgtcatagcactcgtggactaggtttcatgggacaaaggcattctgcaagaagtagaagcttgtggccaggtgcagtggctcatgcctntaatccaagnnnnnnnnnnnnnnnnnnnnnnnnnnnnnnnnnnnnnnnnnnnnnnnnnnnnnnnnnnnnnnnnnnnnnnnnnnnnnnnnnnnnnnnnnnnnnnnnnnnnnnnnnnnnnnnnnnnnnnnnnnnnnnnnnnnnnnnnnnnnnnnnnnnnnnnnnnnnnnnnnnnnnnnnnnnnnnnnnnnnnnnnnnnnnnnnnnnnnnnnnnnnnnnnnnnnnnnnnnnnnnnnnnnnnnnnnnagaccctatctcnnnnnnnnnnnnnnnnnnnnnnnnnnnnnnngaagtagaagctcatgnnnnnnnnnnnnnnnnnnnnnnnnnnnnnnnnnnnnnnnnnnnnnnnnnnnnnnnnnnnnnnnnnnagccgagttccagaccngcctaggcaacatggtgaaacctcgtctctatnnnnnnnnnnnnnnnnnnnttagtngggcatggtagngagcgcctgngaggctgcttgngaggctgaggtgggaggatccctttagnccaggagancaaggcngcagngagctgnataangccactgcaggccagcctgggtgacagtgagaccctgtctccaaaacaaaatttttttaaaaagtagaagcttgaggttaagatgaaatctggctttgtcattagagtctcagcagagcaagaaaagcagagatgtggggtgtgagagcgctggagcctgtctcctcttcgcaggcctctggcctgccccagcctcccgctacctgcccaaaccccatctgaatgatttgtggacaagcaagaagtttccaccgcatttctccttgactttactaaaagttaaataaaccgtgccacttcgcccccggcccttcgtttatttaccacccccccacatttacatatnttaaaatggccggccccgcctctggcccctcgaaaaaagcttttccaaaaatatctctgtttgtggcgcgccggggttcccctcacggataagggaaaaatggggcctatagtttggttttcccaaaggaaaatccctgggacaatgaacataagggcttgggaatctccccactacaaaaaaa

SEQ ID NO: 351849 - DNA, 1073 bp, Homo Sapiens
  misc_feature (627)..(627): n is a, c, g, or t
aacaaagcctgtggccgatgtggcgctcctcggcccgcgcttcagtggttatgacagtgttcgctctaaggggagaaggaatgtgtgaccatttccaacggttaacttgcattccccagatagtttggatgagttacaacctaaatctgcaaactcaatacagccagaccctgggaagtgactctctccaagcctcctgtacaagtcccaggaaaagagcctgttttcccttggacatgtgagcagtgaattactgctcatttcagaatttcatgtgtatgtgttactgatggccaggtttagagataccaacctatttatttctagaggagaggtgatttgataaccttttcagatatcactatcagtaggcagaaaagggttaatagtatgatagggttaatatgtcctgaggagagtaaagaaattgcaaactgcagaagcacctgatctgtggccctggccagcatctctccatatcctgattctgtaagatcaagtgtttatgcagaaagagaagggactgatgatttgaatgtgaccagatgcagggcatgcccttattgccatgccagcatttgctattcatgatgttagtattcaaaaatcaagaaacacccttcctgngccattggtgtctactaatccattggaagaaaagactggaatccaccacttactagcttcttgggcctcagtcccctcttttctgccatagctaaagaccacctaacctagatggctgttgttattgttcaaagggacatctttagagcctcaagccccaggaatagcccgtggcaagcacctgggtaaatggtagtttttcattgtcctatcccaacactatgaaacatgcagcactctctgcaactgcccctgtgggattccataggcaggagagtatccagtgttgagtggaactggtattctcaaaaacgaagccccttttctccatttgcgccaatctctttcagtcattttttacccctaggaggaataatgctttggccaaagtcccttggccatcggagggttaacagttggtttttccccacaaggacttttctaaa

SEQ ID NO: 351850 - DNA, 1203 bp, Homo Sapiens
  misc_feature (865)..(1050): n is a, c, g, or t
  misc_feature (1059)..(1133): n is a, c, g, or t
tgctgtaggcaccattctgcatcttgaacccagactgaagtgtgcctctcacagatggaaggtgcacacgctcctgtctcctcctcactctgccacgttcacttggctttttcattggtacctaggaatttaagaatatcgaagcgagagcagtaacaaaccatagatgagcagactcccacaccgggttttcttgcccgtctttaaggcactgtttctaaattttgaacttagctctgaatccccaagaacttgagcacagcaagggttgctgagctgctgtcgccgcagccctggcccctggtgctggagctgcagcacctttgggagaggtcctgcgtcgtcctcagctgcgtcgctgtgaactcccgctctccactgtgttcctcagtgtctgcttttcaggaagtctgctgtgacctttgcccaacttctgagctcctcagggactaggaacaatttcagtagctttgccctgaaccaaacgagaaaacaaaagggaactcccgtatgacccacgtcacgtggtgcactcagagtgtgtgcggcatgatcctcggttgctcctcctctcactttagtagagtacgcggtggacagctgatctccttcagtcgtctacccacttccgtcattgtcctccgctagaataacagagtagttggtagtcatggccagaaggggggtgggggcagtgtgaggacttggggtttctgtgctgtgtgacacaaggagataagtgacaatcttgaagtcctaacttccactattctagaaagtatagtggtgatttgtgtgcaaagatttgaagttttaaaaaagtaccaagttcctgaaattcaataaaatatttttattaattttnnnnnnnnnnnnnnnnnnnnnnnnnnnnnnnnnnnnnnnnnnnnnnnnnnnnnnnnnnnnnnnnnnnnnnnnnnnnnnnnnnnnnnnnnnnnnnnnnnnnnnnnnnnnnnnnnnnnnnnnnnnnnnnnnnnnnnnnnnnnnnnnnnnnnnnnnnnnnnnnnnnnnnnnnnnnnnnnnnnnnnnnnngttttgggnnnnnnnnnnnnnnnnnnnnnnnnnnnnnnnnnnnnnnnnnnnnnnnnnnnnnnnnnnnnnnnnnnnnnnnnnnngggggtaaatctttttttctttgaaaaaacccccggaggaaaataagagggggtttttttccccccccac

SEQ ID NO: 351851 - DNA, 1439 bp, Homo Sapiens
gaacacctttaaagtcaataacaggtgccgaattattaaggaggaccaaccaatggttagtggatggccgaacagggtaacagaggcagctgagcagcttccgcacttacaaatgcatagaacagtccattgaaagtattattgcgcaagctaatttaataaccatttcaagtcaaagccagttgcaacatactagaactcactgtgcatttctttataatgaaatgtgtgtacagtaagataactcgaagtacgcaggcatcattgtcactgcttgtaatagaatatatagtattttaacttgaatttcaaagaatgtaagattttttattaaaggctctagtccaagtttccagctgttaaagttttaaaaaatataatttgggtctctgatagaacttagctgggctaagctacttggataaccttacaggatagtgaggttcaaacagagatcatttcctgaacatggcgtgatctttaagagaacaatttcctcacccaaagttatgcaggatactgccagatctccaatacaaagaacctgccagaatttctagacaattgtttacaatccatgttaaaaaccttgtaccaccagaggcaaagcagataaagtaaacttgtttctagtctagactattcacctaaataaactcataaagttgtagagaaaaattaatgaatagaaagtaattttatctgatctgtcagccaaaaaaaaattactaattctctataataaagagaaaactcaaccataaaatgtctgtttaagtaaaaatgccaatcttgaaatcttttaacaccaagacatagaaaaaagtttagaaattcaagatgatgcttaaaatgaaagctatggttcgaaattagtattcatagtaagagactaaaatcctgtcactgcaaaattccccttggcttttggcattgacgttgaaagattttagtcttttggtcacttgaagctgctacaaatacaacataagcctttaaaatgggggcgggggaagtatggaattgaaagatagttaaggtgactacatcatatacaagtaaaacatagtttgaaataaacagtcatttctgctaggggatctgaagatataagaacagttttccactatcccttcctttttgaagaggatcctctaaagaaaataattcctttaagttactgttaagtggtgttgcctggcagcagcttcaataggctagtcttcaatccaagtaattaagtaatctcacaaggaataatcatacatggcaacagggtaaaaaagcagggcagttcttccatgcacaaacatttcaggagaaaaaccattaattttaaagataaccatcaggtttcaggtatcctagcacactctaaacctaggttttgctttataccattggtgactaaaattaacaataagttttgcagtgaggtg

SEQ ID NO: 351852 - DNA, 1012 bp, Homo Sapiens
ccctcagtgggagatattttgccaactgccatgtggaagaggtgcctccagctgcccgagacgaccgggcagcccatcggctatgggaggccagcaaaaggctggcaggccttgggcctgggaaggatgctgaacccgatgaagacccccagtctgaggactcagaggccccatcttctctaagcacccccccaccctgaggagcccacagtttctcaaccttaccccagccctcagagctcaccagatttgtctaagatgacgcaccgaattcaggctaaagttgagcctgagatccagctctcctaaccctcaggccaggatgcttgccatggcacttcatggtccttgaaaacctcggatgtgtgcgaggccatgccctggacactgacgggtttgtgatcttgacctccgtggttactttctggggccccaagctgtgccctggacatctcttttcctggttgaaggaataatgggtgattatttcttcctgagagtgacagtaaccccagatggagagataggggtatgctagacactgtgcttctcggaaatttggatgtagtattttcaggccccacccttattgattctgatcagctctggagcagaggcagggagtttgcaatgtgatgcactgccaacattgagaattagtgaactgatccctttgcaaccgtctagctaggtagttaaattacccccatgttaatgaagcggaattaggctcccgagctaagggactcgcctagggtctcacagtgagtaggaggagggcctgggatctgaacccaagggtctgaggccagggccgactgccgtaagatgggtgctgagaagtgagtcagggcagggcagctggtatcgaggtgccccatgggagtaaggggacgccttccgggcggatgcagggctggggtcatctgtatctgaagcccctcggaataaagcgcgttgaccgccgaagctgcgctcactcctgcctcaacgcgccggccccgccctcccc

SEQ ID NO: 351853 - DNA, 1027 bp, Homo Sapiens
  misc_feature (7)..(7): n is a, c, g, or t
  misc_feature (13)..(13): n is a, c, g, or t
  misc_feature (15)..(15): n is a, c, g, or t
  misc_feature (17)..(17): n is a, c, g, or t
  misc_feature (20)..(21): n is a, c, g, or t
  misc_feature (27)..(27): n is a, c, g, or t
  misc_feature (29)..(29): n is a, c, g, or t
  misc_feature (31)..(32): n is a, c, g, or t
  misc_feature (42)..(43): n is a, c, g, or t
  misc_feature (45)..(45): n is a, c, g, or t
  misc_feature (49)..(50): n is a, c, g, or t
  misc_feature (59)..(59): n is a, c, g, or t
  misc_feature (63)..(63): n is a, c, g, or t
  misc_feature (70)..(70): n is a, c, g, or t
  misc_feature (75)..(76): n is a, c, g, or t
  misc_feature (87)..(87): n is a, c, g, or t
  misc_feature (97)..(97): n is a, c, g, or t
  misc_feature (104)..(105): n is a, c, g, or t
  misc_feature (110)..(110): n is a, c, g, or t
  misc_feature (115)..(115): n is a, c, g, or t
  misc_feature (117)..(118): n is a, c, g, or t
  misc_feature (127)..(127): n is a, c, g, or t
  misc_feature (134)..(134): n is a, c, g, or t
  misc_feature (137)..(137): n is a, c, g, or t
  misc_feature (150)..(150): n is a, c, g, or t
  misc_feature (152)..(152): n is a, c, g, or t
  misc_feature (167)..(167): n is a, c, g, or t
  misc_feature (193)..(193): n is a, c, g, or t
  misc_feature (210)..(210): n is a, c, g, or t
cccgagncccaangnantgnncccgcncncnnggatctaatnnanatanntcaaggttnttcnggccatntgtanncccttttgccnggtcagtttngcccgcnngtcanccacngnntttttcagntgctcgngcngcacatagtactntnccttgagttcaaaanaaggcttggacttggtgatgctctcntgagtttcttctccagntgtcgcatgcggccccatggcggcattgtacctggctcccgtctccttatgcaccagctcgctcctggtcttggtctgctccgcctccatgaccctctgagtggcgtgattcagcatctcctgccaggcggagtcgaactgccgcttgtcatcctccagcagccgctgctcggccagggagatggtctccttggcggcacggagcacctctgtggccctctggaagtcctgcgtggctttctgagcttccagctgagcctgcctcgccaccctccgtgcctcccagtagggcttggagtcttccacagctttgccaattttcttcaccagttcatccagtttcaccgttgcttcaaccagaacagagcggaacttctgacgagcatcctcaagttcagtctcccgtctgttgatatcatccgtggactgatttaacttctccagttctccctggatccggggatccacctcttcttcctcctccagcccctgctccatcccctcttcctcctcctcctcctcgtcccgggcaggcggcaggatttcggctggctcctccgagcggctccgcttcagtgccgcgtccatgcaggcagccggcacgcgcgccgcgcagtgggctccggagcgccccgggggtcgcggctgccacaggctgggctggagccgcctcgccacagccgggcacggtcggggagccgccggggccgacacccgggagacgcagctcgccgatgcggatacctccggccgcggcggagcagaggaaatgggcgccctcgtgccgaaatcgccacccaggcctcgctacctagga

SEQ ID NO: 351854 - DNA, 2810 bp, Homo Sapiens
  misc_feature (264)..(315): n is a, c, g, or t
  misc_feature (2061)..(2079): n is a, c, g, or t
agcgggcgcccatttcctctgctccgccgcggccggaggtatccgcatcggcgagctgcgtctcccgggtgtcggccccggcggctccccgaccgtgcccggctgtggcgaggcggctccagcccagcctgtggcagccgcgacccccggggcgctccggagcccactgcgcggcgcgcgtgccggctgcctgcatggacgcggcactgaagcggagccgctcggaggagccagccgaaatcctgccgcctgcccgggacgagnnnnnnnnnnnnnnnnnnnnnnnnnnnnnnnnnnnnnnnnnnnnnnnnnnnntggatccccggatccagggagaactggagaagttaaatcagtccacggatgatatcaacagacgggagactgaacttgaggatgctcgtcagaagttccgctctgttctggttgaagcaacggtgaaactggatgaactggtgaagaaaattggcaaagctgtggaagactccaagccctactgggaggcacggagggtggcgaggcaggctcagctggaagctcagaaagccacgcaggacttccagagggccacagaggtgctccgtgccgccaaggagaccatctccctggccgagcagcggctgctggaggatgacaagcggcagttcgactccgcctggcaggagatgctgaatcacgccactcagagggtcatggaggcggagcagaccaagaccaggagcgagctggtgcataaggagacggcagccaggtacaatgccgccatgggccgcatgcgacagctggagaagaaactcaagagagccatcaacaagtccaagccttattttgaactccaaggcaaagtactatgtgcagctcgagcaactgaaaaagactgtggatgacctgcaggccaaactgaccctggcaaaaggcgagtacaagatggccctgaagaacctggagatgatctcagatgagatccacgagcggcggcgctccagtgccatggggcctcggggatgcggtgttggtgctgagggcagcagcacatctgtggaggatctgccagggagcaaacctgagcctgatgccatttctgtggcctcggaggcctttgaagatgacagctgtagcaactttgtgtctgaagatgactcggaaacccagtccgtgtccagctttagttcaggaccaacaagcccgtctgagatgcctgaccagttccctgcggttgtgaggcctggcagcctggatctgcccagccctgtgtccctgtcagagtttgggatgatgttcccagtgttgggccctcgaagtgaatgcagcggggcctcctcccctgaatgtgaagtagaacgaggagacagggcagaaggggcagagaataaaacaagtgacaaagccaacaacaaccggggcctcagcagtagcagtggcagtggtggcagcagtaagagccaaagcagcacctcccctgagggccaggccttggagaaccggatgaagcagctctccctacagtgctcaaagggaagagatggaattattgctgacataaaaatggtgcagattggctgattcatcctgggccctggccgatgtgcatatcaacatttatacatggaactggagaacattgtgccaataatcatttaatatatgccaaatcttacacgtctactctaaactgctctaatgaagtttcagtgaccttgagggctaaagattgttcttctgggtaagagctcttgggctggtttttcagagcagagttcttgttgtgggtagactgtgactaggttcacagcctttgtggaacattccgtataacggcattgtggaagcaataactagttcctatgaaagaaccagagctgggaagatggctgggaagccaggccaaagtgggggcaacagcttgcttctctttctcttctcaccctcagtttgtatgggaaaatggagatgtcctctccactttatcccacgatatctaaatgaaaaagaaagaaaacccacacacaaagcaaaaactcaagtattaagagcacatatttttgacccagtggaggcttnnnnnnnnnnnnnnnnnnntccaagaacacaattcattttcaccacctctggtgttcagagggggcttttaaaaaagcgtgtatgctgggatacccattaaaaccattttctagaaggctaccatgagctgcactttttggggtgggaaaggtgaatgccagtggggatgcggggggatgagggtaggagggacttatagaaggggatttgtggctgtgggggagaaggttctacagcataagccttatcctgccagccaaggggatttattctaagagaagtgcatgtgaagaatggttgccactgttattagattgacaagatgttaatttctctgtaggttgtaactttaaaaataaatgaaattatttaagggttatgctgcactagtattccttagaggaaacagttctttaaagttaggaaagggagtaggcaggcatgtgttggcaaaggctgttaatagtagttaagtgttaagactgcttttctttaacgttttcatggtaatgcatatttagagcactgtatttttgtcttgttaagaaaatttagcatttctaaaagaaaaaagcaaccctctttcaaactgttaattctgtcacagcctgtatattttagtcatttgtaaatctcttcatacaatagtgacttcttttttgactgatacagtatcttaattacaaggttattttgtacttgtcttaatacactaagtgtaataaaaacggcttgagaaaaaaatagta

SEQ ID NO: 351855 - DNA, 1048 bp, Homo Sapiens
  misc_feature (691)..(724): n is a, c, g, or t
  misc_feature (754)..(754): n is a, c, g, or t
  misc_feature (928)..(937): n is a, c, g, or t
ggtccggaattcccgtggataagaaagaaggctgagtccagctggctttgtttgggatatgttacagaggactagaacctcttcctgtgcacatgaggatgtatttgggggactgagtggcctcggaggcctttgaagatgacagctgtagcaactttgtgtctgaagatgactcggaaacccagtccgtgtccagctttagttcaggaccaacaagcccgtctgagatgcctgaccagttccctgcggttgtgaggcctggcagcctggatctgcccagccctgtgtccctgtcagagtttgggatgatgttcccagtgttgggccctcgaagtgaatgcagcggggcctcctcccctgaatgtgaagtagaacgaggagacagggcagaaggggcagagaataaaacaagtgacaaagccaacaacaaccggggcctcagcagtagcagtggcagtggtggcagcagtaagagccaaagcagcacctcccctgaaggccaggcctttggaaaaccggatgaaacaactctccctacagtgctcaaagggaaaaaatggaaataatgctgacataaaaatggtgcagattggctgattcatcctgggccctggccgatgtgcatatcaacatttatacatggaactggagaacattgtgccaataatcatttaatatatgccaaatcttnnnnnnnnnnnnnnnnnnnnnnnnnnnnnnnnnnaagggcggccggctctagagtatccctcgnagggggccccagcttacgcgtacccccagcttttcttgtacaaaatgggtccctataagggagtcgtatttataaagctagggcacttggcccgtcgtttttacaaccgtcgtggactggggaaaaactgcctagccttgggaatcttttgttgaagggaacctttactttctnnnnnnnnnnaccataatttgggacaaacctaccctacagaagattttaaaggcttctaagggtaaaatattaaaaaattttttaagggggaataaaggggggttaaacctagcctggcat

SEQ ID NO: 351856 - DNA, 319 bp, Homo Sapiens
aagatgcagactaggacagccgcacggccccagggaaggccctgtccagacttacttggacttgttgatggctctcttgagtttcttctccagctgtcgcatgcggcccatggcggcattgtacctggctgccgtctccttatgcaccagctcgctcctggtcttggtctgctccgcctccatgaccctctgagtggcgtgattcagcatctcctgccaggcgggagtcgaactgccgcttgtcatcctccagcagccgctgctcggccagggagatggtctccttggcggcgcggagcacctctgtggccctctggag

SEQ ID NO: 351857 - DNA, 1235 bp, Homo Sapiens
  misc_feature (683)..(683): n is a, c, g, or t
  misc_feature (927)..(927): n is a, c, g, or t
  misc_feature (1112)..(1114): n is a, c, g, or t
ccagaatacaggtgcaattgagaacattatagttgaagtaaaaaaagagccagatgctgagcccgcagagggagaggaagaggaggcccagccagctgccacagatgcccccaacggagacctcacgcccgagatgatcctcagcatgatggaccggtgatggcggacttggtgcgtcgccaggacttctctgggctgtgtttaaacggcccgcatcttaatttttctcccttctttctttttttggctttgggaaaagcatcattttaccaaacataccgagaacgaaaacttcaaggatgatgttagaaaaaaatgtgatttaactagaacttgctgtctgatgttagcaaatcatggaatgttctgagtccctgagggtttactgtgaagtgctgaggacagtgttgacaactaactcgttttcctagatggaaacggagacattgacccctccctccatgtggttaaaccactccagaatggccaccaggcttcccagagttctatggtcttcttcccaagagagtttttaattgtaaatgcatacttgggaaggacttagagttttaaactgttttttgcttttgcttttccctgactccctttgcttggagtcagctgcacaccagtagtatggcatgctacgatcaggttctgtcctgaaagctttgcctcttccnttggcaaagtttctggtatggtcaagcttgtaaataactttttttacattttaatcctttccattaattaagaggttgaaaagaagtgcagtgtaagaaaacccagcattttaattacttgcaaattaagttaccacagactctgtagtgtgtaaatgccgaccacgaattggatccccatcttgtagcagaatggcacccagaccccctgcccaccagtgacggacatgcacctgcgagattntgatttccagcccacggagccaccatttgaaccgtgtataattaactttccgttatgatctgccccccccattttctttgccccgccccgcagctgaatggtggggttttataaatccttctggttacgcgggaacgggggaataatgagcgggcttcacgcgaagccccttaaaagatgggggnnncaaaaactccccctaggccccggaattttcaccccttgcgacctcccaaaaacaccgttatggggaagcccaaccccatttaaaagcgggattcctggcccctccaattggtcccctgctt

SEQ ID NO: 351858 - DNA, 1127 bp, Homo Sapiens
  misc_feature (13)..(13): n is a, c, g, or t
  misc_feature (23)..(23): n is a, c, g, or t
  misc_feature (31)..(31): n is a, c, g, or t
ggaaccccaatcnaccaaccccntaagcatngagcccacagccccctgggggagtgaacagatccagcactgcctctgaaaaaccagatctggtatcacggggccatcagccgaaccgacgccgagaacctgctccggctgtgcaaagaggccagctacctggtgcgcaacagtgagaccagcaagaatgacttctccctctccctcaagagcagccagggattcatgcacatgaagctgtcccgaaccaaggaacacaaatatgtgctgggccagaacagcccgcccttcagcagcgtccctgaaattgtgcaccactatgccagccgcaagctacccattaagggagccgaacacatgtccctgctctaccctgtggccatccggactctttagatgtgaagccagggcactgtgatagacctgtacccagccctgtgcccatcacctggctgagggctgtggctcttgccagggacgtgatctttcaaacctttcttctcctgggatccagtagaagctggagattccttaatttattctaaagggaaagggctcctggggccttggagtaaggggttgtctggagctggggaaagaggaatccctggagagaaaggatagcccctggaggaagggggttccagagctactgggatggtagggagtttcagactggcagctccggctcctttccgaccttagggcagaggtggtgacctccaccaccaccaccctctccccactgggtccgtgcgaggtagtgcagaattcggccccttggggcgccttaccacctctctgcctccgtccccgacttccaccccagaccgtcggagggctccgcccagagtctggtaagaggtttggggaagacaggcccctgggaagcagccggctttggggggtggggagagaaggggaggggctcgggcagagggaactgtgcagtccccaggccgccccggctccgggctagaggcaataaataaacccgatcctgccgggcacagccgcgccccgcctccggcgccgtccccgggctgacgggggagggagcggagaagcgagcgcagattctgcgtataaatcagctctggagcagacacagcccggctgtgaaaagc

SEQ ID NO: 351859 - DNA, 1385 bp, Homo Sapiens
  misc_feature (112)..(156): n is a, c, g, or t
  misc_feature (258)..(261): n is a, c, g, or t
  misc_feature (278)..(282): n is a, c, g, or t
  misc_feature (284)..(284): n is a, c, g, or t
  misc_feature (288)..(289): n is a, c, g, or t
  misc_feature (302)..(302): n is a, c, g, or t
  misc_feature (304)..(321): n is a, c, g, or t
  misc_feature (409)..(409): n is a, c, g, or t
  misc_feature (418)..(419): n is a, c, g, or t
  misc_feature (438)..(438): n is a, c, g, or t
  misc_feature (497)..(498): n is a, c, g, or t
  misc_feature (503)..(505): n is a, c, g, or t
  misc_feature (516)..(521): n is a, c, g, or t
  misc_feature (1234)..(1234): n is a, c, g, or t
  misc_feature (1244)..(1244): n is a, c, g, or t
  misc_feature (1250)..(1250): n is a, c, g, or t
  misc_feature (1261)..(1261): n is a, c, g, or t
  misc_feature (1293)..(1294): n is a, c, g, or t
  misc_feature (1308)..(1308): n is a, c, g, or t
  misc_feature (1312)..(1312): n is a, c, g, or t
  misc_feature (1330)..(1330): n is a, c, g, or t
  misc_feature (1333)..(1333): n is a, c, g, or t
  misc_feature (1336)..(1336): n is a, c, g, or t
  misc_feature (1365)..(1365): n is a, c, g, or t
gacttactggctaggtagcgaggcctggtttgaattcggcacgaggccccatgttactgagcggagctcctccggctggctcccgcccggggccgcgaacgcagggagcgcnnnnnnnnnnnnnnnnnnnnnnnnnnnnnnnnnnnnnnnnnnnnnagccggcccaggagggcgcggcagcggcggagtagccaagtggctccgggagcacctgggcttccgcggggggggcggcggcggagggggcagcaagccggnnnnccccgagcccgactacnnnnncnctgnnccctctccgcccncnnnnnnnnnnnnnnnnnntgacatcctggccgcctacaggctgcacccggagccccacttccaagacccctactccggggggtcgtccggctccaccaccctcacnacccctgtnncccccggacccacgccgtncccgcgccacggctctcccccacaccgccttattcgggtcgagaccccggggcccccgnngccgnnncctgctcatcnnnnnntcttcggacccccctccagcagcgataggctagctatcctagaagactatgcggacccgtttgatgttcaggagactggcgaaggctcagcaggagcttcaggagccccagagaaggtccctgaaaatgatggctacatggagccctatgaggctcaaaagatgatggccgagatccggggctccaaggagacagcaactcagcccttgcctctgtatgacacaccctatgagccagaggaggatggggccaccccggaaggtgagggggccccctgggccccgggagtcccgcctgccagaggatgatgagaggccccctgaggagtatgaccagccctgggagtggaagaaggagcggatttccaaagcctttgcagttgacattaaggtcatcaaagacctaccttggcctccacctgtgggacagctggacagcagcccctccctgcctgatggggacagggacatctccggtccagcctcgcccctccctgagcccagcctggaggacagcagcgcccagtttgaaggaccggagaagagctgcctgtcacctggccgggaggagaaggggcggctacctccccgactctctgcagggaaccccaagtcagccaaacccctaagcatggagcccagcagccccctgggggagttggacagatccagcactgccttctggaaaaccaggtcttggtattcacggggctnttcagccganaccganggccgagaacntgttccggttgttgcaaagagggccagttacnnggtgcgcaacagtnagancagcaagattgatttttnctnttncttcaagagcagccagggtttcttgcacntgaagttgttccgaaccaag

SEQ ID NO: 351860 - DNA, 1465 bp, Homo Sapiens
ggcctgggtggcgaattcggcacgaggtggagaagaagctgaaggaagggccggagcccggggcctccctgcgctcccagcccctcgtgggagacctgcgccagaggatggacaagtttgtcaagaatcgaggggcacaggagattcagagcacctggctggagtttaaggccaaggctttctccaaaagtgagcccggatcctcctgggagctgctccaggcatgtgggaagctgaagcggcagctctgcgccatctaccggctgaactttctgaccacagcccccagcaggggaggcccacacctgccccagcacctgcaggaccaagtgcagaggctcatgcgggagaagctgacggactggaaggacttcttgctggtgaagagcaggaggaacatcaccatggtgtcctacctagaagacttcccaggcttggtgcacttcatctatgtggaccgcaccactgggcagatggtggcgccttccctcaactgcagtcaaaagacctcgtcggagttgggcaaggggccgctggctgcctttgtcaaaactaaggtctggtctctgatccagctggcgcgcagatacctgcagaagggctacaccacgctgctgttccaggagggggatttctactgctcctacttcctgtggttcgagaatgacatggggtacaaactccagatgatcgaggtgcccgtcctctccgacgactcagtgcctatcggcatgctgggaggagactactacaggaagctcctgcgctactacagcaagaaccgcccaaccgaggctgtcaggtgctacgagctgctggccctgcacctgtctgtcatccccactgacctgctggtgcagcaggccggccagctggcccggcgcctctgggaggcctcccgtatccccctgctctaggccaaggtggccgcagtctgcctttgcatcctgtcctccagccacccttgcttgccactgttccccatgacgagagccctcctgtctgcagtggccatcctgaggatagggcagagtgcccagggtggccccagggcttctaaaaccccacctagaccaccctccatgtcaggtactgagcaaggccccagatccttctctctggaggaagagggaagcccaggggtcctgtttgtaaaacaacggtggcaacagctcctcttccagagctgtctctgcctttatcctgggagatggggaggaagccccatctctgctgttccccgcgtggaggaagcccacccagcaagctctctcctaccccaggtaaaaggtgctcctttgcctgggtttgaattccagcgctgccacttcctctctgcacctcctggcaagtttcttctattccccacatttaaagcgatggcacctccgtcccagggtggtgtgaggattacccagtgtggtaggtgctcaataaatgttggtcattgttatcactgaagccc

SEQ ID NO: 351861 - DNA, 1558 bp, Homo Sapiens
  misc_feature (22)..(22): n is a, c, g, or t
  misc_feature (25)..(25): n is a, c, g, or t
  misc_feature (36)..(36): n is a, c, g, or t
  misc_feature (44)..(44): n is a, c, g, or t
  misc_feature (100)..(100): n is a, c, g, or t
  misc_feature (130)..(130): n is a, c, g, or t
  misc_feature (184)..(184): n is a, c, g, or t
  misc_feature (188)..(188): n is a, c, g, or t
  misc_feature (453)..(453): n is a, c, g, or t
  misc_feature (487)..(487): n is a, c, g, or t
  misc_feature (528)..(528): n is a, c, g, or t
  misc_feature (626)..(626): n is a, c, g, or t
  misc_feature (646)..(646): n is a, c, g, or t
  misc_feature (688)..(688): n is a, c, g, or t
  misc_feature (704)..(704): n is a, c, g, or t
  misc_feature (1403)..(1403): n is a, c, g, or t
aaaatcataccaccaaaaaatncangaaaaccaatntttaaaangcagaatttctcttttctttaggctttgttaatacaaaggtcaaaatttcaccttntgaactaaaaaagaaataaagaataggcantgtaagtaacaaaattgtcatcatgaatatatttctaaatttttatttatttanaagncaacattagcccaaaatatttagataactaatacggcccttgaaaacttaaatttcttaaagagaaaagcaaattttcaaaaaatcatcaggtcacaagaacacaattaattgtacagttatacattttatttaacccctatgaccatgtaaactaagactcaaagtttaaattagcattacagaacagaaaaggaaagttttctgtcactcttgaggtatttactattttttaaagaatacacatttaagaatgaatcaatgtnttttagaaaatcaaataatggcatttctgcagcnatcaattttttgatacttttgaaaaaagtcaagtaatgtanatgcttaaatctaaagaaattttttaactattagtactttgacatgctaaagaagaacgtatttggattattaaaacatctgaaatttcaagttaganacaaaattccatactcatanattttacaaattaaaaagacagttaaaatgaaatctttttantgatgtctaagaagcnactattatctagttgggtataactattagatgaaaagaagtttaggtttcttcatttgggtttggtttggttttagttttagggaggaagaaatagttgaaactgtttgtatatttagaaataattttgacctatgataaaatttgtatagatctttgcatcttaccgacaaccaaggacattcaactatgttctaggcagagttaccattgccatttccatatttgatcctgttacaacttcatttttacatatttaaggtaaatgcaatgctactaaaataaaaatttgttgctagtaaaattaatcaaaatatgaataacaatagtttcttcaatagattatatagagcaaatggtaactaatctataatgatggattagtcaagtgaaaactagtttgcagtctcagactacgtttgtaagtgatgatttaaaataaaaaaggttgtttcttagacatttctagaaattattcaaatattgcatagttctagaaagcattccaatcttagatttactgaatgagcagggatatgtttttctatagcagaatgaaaatatgctttcattgtaagtaaacccagttcccctattaaaaacctctggtaagattaagtagcttttggagttttcaaataaagctattttctctcctagaaaagggagtcacacctgtacaatcacttatgcttatatngttttaacctatgaataaaaatttataataaaaacttgggaatattttatacctctaatcatttcatgcctcccacacttcatggttattgggtgggcttctcttagtgctcataggaatgccctcagcagacagggcatacttaccagtagttt

SEQ ID NO: 351862 - DNA, 1195 bp, Homo Sapiens
  misc_feature (49)..(85): n is a, c, g, or t
  misc_feature (1110)..(1110): n is a, c, g, or t
  misc_feature (1125)..(1125): n is a, c, g, or t
  misc_feature (1143)..(1143): n is a, c, g, or t
  misc_feature (1147)..(1147): n is a, c, g, or t
  misc_feature (1171)..(1171): n is a, c, g, or t
  misc_feature (1190)..(1190): n is a, c, g, or t
gaatgatacgatcactatagggcgactggagctcaccgcggggcggcgnnnnnnnnnnnnnnnnnnnnnnnnnnnnnnnnnnnnnatcaggccaaatcggccgagctcgaattcgtcgagagcggggagtttgttgttggtgaaaggtgaggggaacagctgatccgtctgttgggaggacagatatctcaaggccaggatggaagaatcaccactaagccgggcaccatcccgtggtggagtcaactttctcaatgtagcccggacctacatccccaacaccaaggtggaatgtcactacacccttcccccaggcaccatgcccagtgccagtgactggattggcatcttcaaggtggaggctgcctgtgttcgggattaccacacatttgtgtggtcttccgtgcctgaaagtacaactgatggttcccccattcacaccagtgtccagttccaagccagctacctgcccaaaccaggagctcagctctaccagttccgatatgtgaaccgccagggccaggtgtgtgggcagagcccccctttccagttccgagagccaaggcccatggatgaactggtgaccctggaggaggctgatgggggctctgacatcctgctggttgtccccaaggcaactgtgttacagaaccagctcgatgagagccagcaagaacggaatgacctgatgcagctgaagctacagctggagggacaggtgacagagctgaggagccgagtgcaggagctcgagagggctctggcaactgccaggcaggagcacacggagctgatggaacagtacaaggggatttcccggtcccatggggagatcacagaagagagggacatcctgagccggcaacagggagaccatgtggcacgcatcctggagctagaggatgacatccagaccatcagtgagaaagtgctgacgaaggaagtggagctggacaggcttagagacacagtgaaggccctgactcgggaacaagagaagctccttgggcaactgaaagaagtacaagcagacaaggagcaaagtgaggctgagctccaagtggcacaacaggaagaccatcacttaaatttggacctgaaggaggcganagctggcaagagganagagtgctcagctcagcnactnaaaacaaggtggccagatgagganacctaggccagcccagagnggtgg

SEQ ID NO: 351863 - DNA, 1038 bp, Homo Sapiens
  misc_feature (32)..(32): n is a, c, g, or t
  misc_feature (42)..(42): n is a, c, g, or t
  misc_feature (71)..(71): n is a, c, g, or t
  misc_feature (164)..(164): n is a, c, g, or t
  misc_feature (173)..(173): n is a, c, g, or t
  misc_feature (184)..(184): n is a, c, g, or t
  misc_feature (186)..(186): n is a, c, g, or t
  misc_feature (188)..(188): n is a, c, g, or t
  misc_feature (276)..(276): n is a, c, g, or t
  misc_feature (321)..(321): n is a, c, g, or t
  misc_feature (332)..(332): n is a, c, g, or t
  misc_feature (335)..(335): n is a, c, g, or t
  misc_feature (343)..(344): n is a, c, g, or t
  misc_feature (349)..(349): n is a, c, g, or t
  misc_feature (353)..(353): n is a, c, g, or t
  misc_feature (360)..(360): n is a, c, g, or t
  misc_feature (466)..(467): n is a, c, g, or t
  misc_feature (711)..(746): n is a, c, g, or t
  misc_feature (895)..(914): n is a, c, g, or t
gaagagaggtcgacaatgtggcctttttatanaagcgtacanctttgtgaaaagtgtgaagtttagcaagngtcccgaaacatgtgtttgtttgggcattagttagggcttatatgaggccataaggtgttttacacagttagggtgcccctttaataaaggtncacctttgngaagttttttngnantgccattctcaacatttgctcttttttcaaacttgctcaccaagattagtcccaatttttcctttttggttaacaggatttaatatgnccaagatttaaattggggttggttaaatcaaggttgcctggttantttaattcccnttngccacatnnggcantcanttttaanaagagcctatgcaaggtacaagccttacaaagatttctgcaggtgatttgtgtgaaagaaagagaatgtttgtctttttcatatgaagctttgcagatcaccatgnntggttgaaggttttagtttgtggacacagtgggtccctcctaaatgatgaagatcactgccttgggcttcatggaaaacagggcccagcctggggctgcagtttgcatttattgtttttattccacacttcctacttggtctctgaaagttttaccacatgtaacagattcctttatatgtagtgaaaaccactatttgtagaaactgtcaggtcaaaatatttaactgactgttgacatgtannnnnnnnnnnnnnnnnnnnnnnnnnnnnnnnnnnnctgctttaagatatatacccactatgtatatccagttaactgagagaattttgactctcttaataaaactgcattaagtttttgattttgtagaaattagcttttgtctaggcaactagtggttatactctgcaaatattgtaatgaannnnnnnnnnnnnnnnnnnngtaataaaaattggtgcagataaaatgtcaaatgaacaaaccagtgttctaagagtgttactaacattttgttctaaaactgtccttcacaaattgaataaaaaactctcacactcaaaaaaaa

SEQ ID NO: 351864 - DNA, 414 bp, Homo Sapiens
  misc_feature (342)..(342): n is a, c, g, or t
gtgagctccctggaagccccaggatgtgatctttaatcgatgctcctggccctgcctccccacccccagcccaggtggcgtatgtacaggatgctgtgtggaggcccaggcagaggcagcctccactcctccctgggttctgccagggtaggcactcgccagggcggggcaggaggatacagacagctgggagccagggtggactggtcacaggaagtctcatgttccccaccccatatacacgagcacacacagatacacccatatgtgcagaggtattcacacttgtgcagaggtgtgggatccaaaagcttgtgcccagatgcacttgtacctgtgtgncacgggtgcaccaaccaggagggacagatgccttaaggcaagcgcagaaattagttgcaacacccagccttt

SEQ ID NO: 351865 - DNA, 1380 bp, Homo Sapiens
  misc_feature (524)..(524): n is a, c, g, or t
cgaaacgtgacttccatacagatcttcttcgaattagtggtgttttgtgtttgttgttgcgtgtggggcggacatcgttgatggagcggggggatggaaagatagataagatctaaaggctattacagcatgatcgggggtccccagtctcacggatgtagatctggggggcccgatgtcgaatatatttcgccactgattggatagggtaatggagtaggtgacgggccagatgggtcgcgggagcgacgtacctgacataagacagcgcgacaaaaaggagaagagcacggggggagacagacctgcgtgtcttataacgctgcggcgagtgatcggtaagtgtgcgctttatttcgcacagggatggaacgaattataggtacggaggattcatgatcgtaattagcggctcagtggtggttatgctagtggcggtatggttgagcggaagggggcaatgaaggcgtcgggaggtatgagtcgttagagttgggagaggtgctaggggggcgcctaagcangggatattcgtatccgggggcggatactactcgggttgctgttcgtgatacaagatagaggagcgggaacgtctcatggcccggtgatgggtctgggggcagtaaagagattaggcgtatgtcagagaccgcgcgtcgagggcccagcagagcggtatcgcaagaccggctggcatcccactgtacgagagcgcgcgggcgcgcacataatgcagggagccctggcagatccgccccataagggcagagttattgcacacttgtgcagaggtgtggatccaaaagctgtgcccagatgcactgtacctgtgtgcacgggtgcaccaccagaggacaaatgccttaaggcagcgcaacaatagtgcaacacccagcccttcccccgccctgcatcaacttgcagggctggtggaacaaaactggccggaggggcccctcccactcagcccttgagtgggcagtgccagctggagctcagtgtgtggaccccactgctgtcgggtgcatccagctacccaaaatggtgtcagcgggtcccaggcctgtttgcccctgagggtgttgtgaataaacagggggcgatgccctccacaacgcctcctcgaaggtgccccagaaacaggggctcaagcaggtagctcacgggccctggggtgtcagaactccctgccgagtgagggcagggcaaccctggtgacaagaactgtattcacttgtggctttcatccattaggtagctggcccccatcttgcccctgccagctaccttttagggtcaaggagccagtgcatcgaaagaatccggaccggtaccagccggtgtcgcggcccaatatataaactgtaggaagaggag

SEQ ID NO: 351866 - DNA, 1134 bp, Homo Sapiens
  misc_feature (91)..(91): n is a, c, g, or t
  misc_feature (929)..(959): n is a, c, g, or t
aaatttgctatttttcctgtaacatctgctgaacgggcccacccacacgttgtatattcagagagagagagggagtcaaggtgtgaccgtngaccacagccagtgtcaggcctctgcctctgggcctttgctttgtggcctcactgcaacacaaagctccaccaggaggctggttcacgtcccctaccacggaagcgaggtcccagaaggccagcggtggttccaggagcaacagctcccaaaccctgagcaaggcaaccgatcgccaggaccaggaagcatcacccaggagatttggcgcccacttccacctcttctctcagttttggacaagtgacaaaccattttgccccctcactcttcttttttaactgttaaaccaaaggaaagcacaaatgaaggaaatcctgtgtaaagcattgagaaggaaagaagcctggagcagcctctcctgtccacagccaggggttaggtctgcaggcccttctgcggtccccatcgagcatcaaggggacgctgtgtgtgcgtgcaagtgaccccgaaaacaaccacagccgtcacatggtcctcctgaagttggggcaccctcctctcagcaccaaaatggcccccactccttcgtgtcctcccgctatctccaaatcggacgttctttctagctgagatttttatttttccacatctgtagtgccatgaagcgattctgtctttgacttccaatggcaaacctgggtgatcgggaacaagcacgttgtacccttggctggacatggccaagacacaaggcattccacggcggcaagctgaccgcacagcagtctggcttgattttcagccgtcatcattgggttctgttttgacagctctgctgtcccatagggactgcgactgggaccaggtcaaccacggccaggggggtgtcaccagcnnnnnnnnnnnnnnnnnnnnnnnnnnnnnnncctccttaagctgctgtcaatccaaaccattggcatcatcgtttcttttcaattaaaaccaacatatcagcaatagtctgctctccccgggaatctctaacatgctctgtttacatcgataaatgcacttaaggaaaacaaacaaattaaagctcatcttaaagtccatcaaaaa

SEQ ID NO: 351867 - DNA, 2222 bp, Homo Sapiens
  misc_feature (61)..(61): n is a, c, g, or t
  misc_feature (158)..(199): n is a, c, g, or t
  misc_feature (1847)..(1864): n is a, c, g, or t
  misc_feature (1887)..(2117): n is a, c, g, or t
gggggttgtaatttataagctgacgaaggtagccagacttccggaggactgaccatctctnactgtcctccccaccttcttcctcactcacacattttttgtacatctgggcccttagttttaattctgtttattatatgtctctgtctctctctatnnnnnnnnnnnnnnnnnnnnnnnnnnnnnnnnnnnnnnnnnngtgcaggagtgccacccccagggccctgtcaacctctcttttctcctccatggctgtctgcctgcgtatctgtctctgagaatcctcggggcggtcaggggatgtcaggaggggaaggagccgccctccctatcttgctgctcctcttggcactcaggggcaccttccatggagccagaccgggtggaggggcttctgggatttggtgtctgctgctgccagagcaggaacccccagtctaggacttgggcattttaacagggagaaagtagtggcttcccttttctctctctcctcctttttccctttaagcccacagattcaggtcatgccaaaagctctctggttgtaacctggagacatgtggaggggaatggcgatgggattataggactctccccatctcgggccctgaccctgacccttgccaccaacccaaagacagctggtgggtttccccttggagacaatcctgcgtttgcctgggccggccctggctgccctcagctttcgctgatctgcccggcctggagcctcccatcaccccgcttcttgttgggcctcaggcactggttaccagaagggggtctgggtctgctcaggatcatgttttgtagcacctcctgttggaggggtggagggatgttcccctgagccaggctgagactagaaccccatcttccctgagccaggctgagactagaaccccatcttccccaccacgccacccctgtggctgctacaggagcacagtagtgaaggcctgagctccaggtttgaaagacccaactggagcgtggggcgggcaggcaggggttagtgaaaggacacttccagggttaggacagagcatttagccttctggaagaacccctgcctggggtgggactgtgcaggccagagaaggtggcatgggcctgaacccacctggactgacttctgcactgaagccacagatggagggtaggctggtgggtgggggtggttcgttctctagccggggcagacacccagctggctgggtccttcctcagccttgcctcctcctgtccccaaccctttcctttcctcctgcttgcggactgctggtcccctctccttccctccttccagctgtttctagttaccacctacccctggccgtggactgatcagaccagcattcaaaataaaagtttgttccaagttgacagtgtggtgctccctgcccagcccctccaggtggaggtgctgccacgggaacgcagttgctctgcctgccctggggcccctggcgacagctgggagcagggcagtgctgtgaggagcccagctttcccagtcaggcaggcatggcttccgtgttcaggctccctcaccagctggtgacacgggacaagcttacaaaccttctctgaacctcagttttctcatttacaagaggcaaagccatccatcaccttgtgtggattcagagaatgtgaggccctggggtgtcctacacaagggaaaggcttgctcagtgagcggtctgcacaccgttagccaccctgccacctctgtgccctgggcaggctccaaaggaaagctctggctgggactgccaggagtctcacacgctcctgttgacattcccagcagccgcccctgaggtcgatgtttgttctgnnnnnnnnnnnnnnnnnngagacggagtctcgctgtgttgnnnnnnnnnnnnnnnnnnnnnnnnnnnnnnnnnnnnnnnnnnnnnnnnnnnnnnnnnnnnnnnnnnnnnnnnnnnnnnnnnnnnnnnnnnnnnnnnnnnnnnnnnnnnnnnnnnnnnnnnnnnnnnnnnnnnnnnnnnnnnnnnnnnnnnnnnnnnnnnnnnnnnnnnnnnnnnnnnnnnnnnnnnnnnnnnnnnnnnnnnnnnnnnnnnnnnnnnnnnnnnnnnnnnnnngattaccgggattgagccaccccacccgggcctggttctatttttcctagtaaaggggaactgaagcctcgaagaaggtgtcacccagcagggtgtttcattccc

SEQ ID NO: 351868 - DNA, 1350 bp, Homo Sapiens
  misc_feature (444)..(461): n is a, c, g, or t
  misc_feature (484)..(717): n is a, c, g, or t
cccagttgataaaagaggcagtaactcataacggtacctaaggtagcgaggcctggggggcgaagttcggcacgaggctgggagcaggcagtgctgtgaggagcccagctttcccagtcaggcaggcatggcttccgtgttcaggctccctcaccagctggtgacacgggacaagcttacaaaccttctctgaacctcagttttctcatttacaagaggcaaagccatccatcaccttgtgtggattcagagaatgtgaggccctggggtgtcctacacaagggaaaggcttgctcagtgagcggtctgcacaccgttagccaccctgccacctctgtgccctgggcaggctccaaaggaaagctctggctgggactgccaggagtctcacacgctcctgttgacattcccagcagctgcccctgaggtcgatgttggttctgnnnnnnnnnnnnnnnnnngagacggagtctcgctgtgttgnnnnnnnnnnnnnnnnnnnnnnnnnnnnnnnnnnnnnnnnnnnnnnnnnnnnnnnnnnnnnnnnnnnnnnnnnnnnnnnnnnnnnnnnnnnnnnnnnnnnnnnnnnnnnnnnnnnnnnnnnnnnnnnnnnnnnnnnnnnnnnnnnnnnnnnnnnnnnnnnnnnnnnnnnnnnnnnnnnnnnnnnnnnnnnnnnnnnnnnnnnnnnnnnnnnnnnnnnnnnnnnnnnnnnnnnnngtatgagccaccgcaccgggcctgttctatttttctaagttaagggaactgaagctcagagaggtgtcaccagcaggtgttcattcccatgccagcctggccccccggcttttcccaggcaggctcctgcgtgcccactggctccagcctggtcctctgtctcttggctgcttcactcctgctctttgtcccgactctggccctgcttacaggggccactacctgctggtgcctccataacaagcgtctggcgttgagacccctggcatggcaggggctttggggtctggtttccacaaggcttagccatggcagaacctcgttttattttaactctttgcccctacaaacaaacagcagtacttgccagaaccattcttgggattcaggagctcgggcgactgccttggcctctggccgcacccaggagggtggggttggatctgtgtagttgccaggcccacacctgccagcagggggctgactggatccatgctttactgtgtttaatgggggtaacaggggtccctacagccctcccagctaaacatttggaacaaaacaccagcccttttgtagtggatgcagaataaaattgttaatccaatcacctccaatggcaaggcctgaaaa

SEQ ID NO: 351869 - DNA, 262 bp, Homo Sapiens
agaagagagcaggagcattagaacccaagcagctgtcccttcctccaatgccgtccagtgggggcgtgggggtgtgtctgggaaggagcggcctcctcaaggtgtctcgggggctgtcagaagcacaggtcaatcgctgtttccctagtaagccagagccctcactcatgtgcccagctcagccccccacaccccagtctggccctgtctgctgcactaaccttacctcggctaagtcaggaaacagtcggggtcactgaga

SEQ ID NO: 351870 - DNA, 940 bp, Homo Sapiens
  misc_feature (262)..(262): n is a, c, g, or t
  misc_feature (267)..(267): n is a, c, g, or t
  misc_feature (275)..(275): n is a, c, g, or t
  misc_feature (277)..(277): n is a, c, g, or t
  misc_feature (615)..(616): n is a, c, g, or t
  misc_feature (624)..(624): n is a, c, g, or t
  misc_feature (748)..(748): n is a, c, g, or t
  misc_feature (786)..(786): n is a, c, g, or t
  misc_feature (829)..(829): n is a, c, g, or t
cgggctgcaggaattcggcacgagcttactaatctgtgccatttgtaggttaaaggctgcctcttctccctgtggtttggtttaaaaagcattttcattctctctgtgtttactgcacaggtggtacaatttcatggtagaatcatcagaaaggagaaggatatcagatgagggaagaaacaagagagtaattgctcccctggtcctactccccagagagaaccacttttacctttttggtgtgctgcttttccaggctctnttctntccctctntntcctttgctcacccccaccccgccttcccttttaacacaccgttatagaatggttcatgtatgtggtgtttcttaacctgctttttcagcaactaaaaccaaacaaaaatcaacccattgaacttctttccatgttatcaacaggcttatgaaacgtcatcttcagtgcctgcagagtgctccagtgtatccgtggaccttaacatttctgtaatcattcccgcattggtggacattcaggtggtgcctagttctttccttgtgttaagaccaacattgcgtgctctgtgctttgatgagtgaatccttccttgtcaagcaaatctttgtagcatccnngtgtctcntaactgcgacttgaagatccactatagacatttaagacttttctgtggttgcaaaggccccttcatagcatgaccgatgactcgtgccgcagcgcactagtaagagatgccgttcccttgatanttctgtacttgaatgatcgttttttcctccttgttttntctggtgtgggtggtgtttgccaattgcggctccaaggtgttncttgccttgaagttgctgaacaacatggttgacccatcctggcttttctgctttcttgtgacgaagtattcggcttgacgacttttgcccacttgtttttaactcgaacac

SEQ ID NO: 351871 - DNA, 754 bp, Homo Sapiens
ggccaagaagtgctggcaccgatgtttaactcaggccaccttctgttctaaagaaagattgctgggaagtttctccgtggccttaggtttctgacatcctggatagtgtggggaggtaatggtgctcacagtaggttaattggagacaccatgtggggccattggtgttatgagccccccaggccacactgcttctcagaaatgagctgcttgcctttccacctccagggcatgaaccctgcccctttctatccatgctgtgtccaggaggtgaccttgagatcctgataccaccttcaaggaacctcaggcaccaacagtgagcccacgaggatggtcacatgccatgtgcagaatttgacttaagagagagccccagtgacacatctctccatggtgggctccagtcagtcttacactgcccttctgacccctacaaatgggtcctttgctatccaggtgagacagcaagagtgttcttaatcagatggaaccacacccaaaatggacccccactaccttcccagaccatatatctccccttgatcatagtccaacagggccagcttcccttgggggccctttaaggaatggggtgaatgaaattgtgtcatttctatacaaacactgctctcttgatgctgaaatgcaaaccgaaggattctgaggacctaaatcacggagcatcatcttacaagtgttggcagagtccatctcttcccaacctggatccgtgcttccaccagtcaaactg

SEQ ID NO: 351872 - DNA, 526 bp, Homo Sapiens
ctggtacaggccggagtaccgggatatcgtcgaccacgcgtcgccacgcgtcgcaacaatatgttttcaagagccagtataagttggctccaatacagcatgagccagctccagcatagcactgcctgaacaatttttaagtcagtgagtaccaaataggagaggctagcagaggctttggagggacttttaaatgtcccctccaccaagggaagcatttccatgttggttagttttactgatttttagtaaaagagcatattattggatcccaaggtgttcaaatattccacgtgactcttaggaacctctcaacagactccccagtatcttgggagattaccaactgtggcttttctaatttctaagggtgaccctccaggaaaacattctttaatttaactaccagttaaaaccatgtttggctgatcttttttaaaaaatctataccgatagttcattcacttggttttcccaaactttggcattttccctatccacttgcccctcatccttctgacacaat

SEQ ID NO: 351873 - DNA, 2442 bp, Homo Sapiens
ccttaccccgctgcctgaagcccggaggccacgcctgttggggctgattcggagagggcgccccgccgcgcagagaccagagctcctcagtgccagtttggcccctgggtcttcgctgccctttttctaagcccggcctcgtctcgccggaggagacgctgcaataacaggttgggagaaggcgcggaaaggagaggagctggggccttggggacccccaggtagtccatgcggcccattcctccccttcccactcccgccgcggtcctcgctctgcgctcctccggcgctgctccctggctcccggcggcccggaggcccgcggggtgggaaggccgcgcttgccgtctccgccgccccttctcgccgagccgtggggcgcgggcggccgagcctatacatagtgtacaggagacatcgcgtgtatttttaacgtccccatatttatgtgactagaagcgcaacagacttctcgccatagtcgagctctcccgctgggggcactgcggggaggcgaggcctcgggaagctgaattttccttgacgtccaagagtttgagagcgaaagtgctttaggcccaggcgggggtcgtggcctcgttccctcgacacctccgtcctgctctcgcctcttcgccctttccgcgcgcccttggcttcccaccctcctctccagtccttttccgagatgaggtgagacaagggtccaacttttcctggattcgcctcccagcggacgtgagcttccactgcggctgcagagacgcgagcaacctcttctcatcggctcttatgcaagttggggccaggataggggaggggtgctcctcaagaggaagaaaccgagaggcccgcgccccaccgaggaagccccgccccggtgccttcgctggggagcaggcgtctctcctcagtcggcttgtcgcctgctccccgtatcccatggctcctcgccaaagactgaaattgtggagctggagggcgccccctccccggagtttcctccctgggacaagtgagggaggagggggccgattctggtttaggggccggacccactgagaggccccagagccgcccgtgatgttcctcccccgtccccatctggcagctcctgtctcgcctgagggacccagccgccttctccgtgctctggggccgggcctcgctgcttagcagcggcctctagctccgtctcccggggacctgggcctgagggagggctggagtcgcacgcgctttgtccttagcgcctgtctgctctcctctaactaggacccagggcctttggcttccccagctcatccttggcccttccgctccaccagcctggtctgaggcgtgctctgtccttagagaaggcgcggtggccgggttcccttcccctagggcacattactaagggggtcaggcactgcatgctcgttccagcaccatctgggactgggtacagtacctccagccccagggccctgacctgcgcacctagcttgacatctcacgcacctcccagagctggcgccactgagtaatccggacctcaccacctcttttcctttgagcccaaggcagagctggagctggcgccacccagacagcgtcaggtgtggctggggtaggtttggaggtctgccagttacaccaagtcccctctgagattcgatcaggggactggatagattctttcaggtactcaatcaggaagctggaggtgttagacaccagccccctgcatccttcaggtaagacctccctctgaacaccacagccaggtcctgccttctgggggcctgaatattccagagctgatgtgatgggctgtgcagaagggggctgtatcaacatcaattagggaaccaaagttgcactatctgggcccagattgtctggttggcaagagcaaagtttccgttgatgaaacagacatcccacaacaaaaacccaaattttctgtgctacatgtgcaatatttgttatgaatgttatcacaagtcattcatcaagttatctttataatcactgtagttagatgtttcatgtccattcaagtgacttttattctgagtgcaatatttcaatagccttgtagtgataactagtgttgcttttgttttagatgatctatgtgcagggcaatgcaatgaagttgaaaacccttgtaaataggagaggttgcaaaccaaatcaagagtatttattactattactgctattattattaggcctgcctttaattttcagtgtaagtgttcagtatgccgcatcctgcctcagtattgatcttgtgttctttgtgccaatatgaaaaggagagggttggttctttcctttattgttgaatgctcccatttaatgctttatggcttttactgtattacttttttagactcccgtctgcacaaaatgcaataaaaataattttattatacccttaaaaaaaaa

SEQ ID NO: 351874 - DNA, 459 bp, Homo Sapiens
  misc_feature (24)..(24): n is a, c, g, or t
ccaccaggttacccttaaaaaccnccggtagttagaaggtttccaggccccatccaagtgaacttttaaacccggagtgccaatatttccaatagccctgtaagtgaataaacctagtgttgccttttgttttaagatgatcctatgtgcagggcaatgccaatgaagttgaaaacccttgtaaataggagaggttgcaaaccaaatcaagagtatttattactattactgcctattattattaggcctgccctttaattttccagtgtaagtgttcagtatgaccgcatcctgcctcagtattgatcttgtgttctttgtgccaatatgaaaaagagagggttggttctttcctttattgttgaatgctcccatttaatgctttatggcttttactgtattacttttttagactcccgtctgcacaaaatgcaataaaaataattttattataccctt

SEQ ID NO: 351875 - DNA, 1096 bp, Homo Sapiens
  misc_feature (778)..(778): n is a, c, g, or t
  misc_feature (855)..(855): n is a, c, g, or t
  misc_feature (934)..(934): n is a, c, g, or t
  misc_feature (953)..(961): n is a, c, g, or t
gctgggtggcgaattccgcacgaggaggaaacacaggtctgagggtctgagggaaggggcctgcctcccagggagtcaacatagatgttccccatgaacagggatttgactttggaggccaacctggcctggcctctgccctttatctcacactccctatccttggcccactgccagtccctgccttgtggcaaaggggccccaaaagaaaagctgcccttccccaaatgtaaggacccaggtacactttcacccgtggaaagcagtgtctgtcgagagtctgtttcctattaatacttatcaaagccatgtgcgagggaggtggtcagctgtcaatatgccttagtatgtttatatgagtttgttttgttctaaaatatccaaacagttctggtcaagcggggctatgcccgtctggcccaaaacacagtccgttattaacgagatggccctggcaggcgggaacaaatctgcctccatgcactgcttcctgtagtcttttagaaagtaactccaggacatcgaagtgcccagatttgactcctaagttctaggagactgtagcgcagggtctgtcaaccttagcactattggcatttggggctgggtaattctttcttgtgggggccgtcttgggtactgtaggaagctgagcagcattcctggcctcccatcacgaggtacctgtagcagtgtcctgccaaacgtacaatcaagtatgtcatcagacattgcccaatgtcccccaggggcaacacccctctcttggacttcaggntcaagagaatctctgctggctaccccaggacttctcattatagatttcctggagcacgcagcagaaacttgcctagncccagtggttggtttccatatctgctgcccaagtgggaaatttaagggggccccgggaaggggggatattgtggaaagntaatattgtttttaaaaannnnnnnnnaggcaaggccggggggctccatgtccggaaccaccaagaattttggaaggcccagggttgcaaaataccttttgaggcctggaaaataaaaaaccacccctggtgtaaaatgggcaaaaacccccccctctctct

SEQ ID NO: 351876 - DNA, 958 bp, Homo Sapiens
  misc_feature (11)..(11): n is a, c, g, or t
  misc_feature (822)..(822): n is a, c, g, or t
  misc_feature (887)..(887): n is a, c, g, or t
  misc_feature (905)..(905): n is a, c, g, or t
  misc_feature (914)..(914): n is a, c, g, or t
  misc_feature (925)..(925): n is a, c, g, or t
  misc_feature (938)..(938): n is a, c, g, or t
gaacagagacntccgcaccgtaaaggggaagaaaaacacccctcctgttttgtttttctgcaaaaggtggagcttgtggaattcattcccacagacgacagatgagaagtggatcacagtgcccataacaaaactggtaacgaagtcaaaggacccgagtgaatgtgacatgtgaaataaaagcagattcgatgcttccttgtcctactctcacatctgcattcctctatcaacaatggactgatctcattcatattgaaaactaagaagatgatactgtaaatcacatgctccctgacttagttctgtttagaacgccaacatctatagggaacatgggccagagagcatctctgaatctttcatttccaaaatactgtttttcaaatggctgcttaaaattgcctgcaaatgaatatgctatatgatttgggcaaaaacacagcagaatcaatgagtaaatttctaccaagagtcgggtttgccacagagatgtgaatattaaactaaactattattttttaaagaatcctcacatgcctagagcattctgacctcttcttgtttagagtgataacattttttcccagacagatgacagcaacaagatagctctacttttttatatggaaataacattatgttactgacaaggtcattttctaccagagacaattagaggactggtacttttcctaagttgtgtattactgagtcttggagtcatctctgagagcaaatgtatgttcctgaaaagctaattttacacctcatttactgtaggtaacaggaacaacctcaatttttccaaatttttgaagntttatttatgggggctagaattcccctgcataggagatttgtgtaggggggccagaattctttcnctggaaatgctatacaantctttcctntgtggggttcnccttcatccttcngttttggcaccggcattgtt

SEQ ID NO: 351877 - DNA, 1360 bp, Homo Sapiens
ctgtgaatgacctggttcgaatgcaagaactccagagcctgcagaaactcacggcacacagctgcaatttggccttcatccatgcaagtttctgtcaccacatctgtcaaggagcctccagccaagtattccataacaacccacagctcatctcccacgaggtaactgtccaagtaattcacaatgtttgggttctagtttaccctctatgaccaggatctcattaataatcagctctttcttgggctgctgctgaagattcatctgcttaatggccacctcctgtcctgtggccacatccatttgctgtgtacacggtgcctgaaagcaccttgtccaatcttctcaaaccggggatatttcttcttaggcatcgcccacactcactatgcttcgtaatttctcccaagatctcctccatcagacatttcaggcttcttcttctgcttctcagtattccgggtcaaagcatctggtggagtggtgttattttcagtaggtgaaatgggagatgtagccacgtcccgagttggagtgacaggaagtggttcaatcacagaccgtgtgtatacagattttgtgtgctctgggcgtggagcaatcactggtggtggggtagcagtcatcatcatcatcatcctcatcttctgaaactggtggcactgcaggagtctcagacacagccttcacattcaaggcattagaagaattgtaatcctcagctgacttatctgtaaagctcatgtatttctggctgttggatgtcttcttcgagttgtaaaactccaacacatccagaacagcctgcgggtttttcttctgctccgacttagtgatatttgatgtctgaagcaagcgggcccactgctctggcattcccgtaaactcccctgtgacagcatcaaaaccgaccatgaattgtgtgttcaaaatctgaagggagagaaatctctggccgctctttctctttctttttatttgttttatctccaggtaaaatggatcggtaaaatcggtccctctttttcttctcctctgggtttggaggcagaggtttagaaccatggtttagggttccagcatctttgctgccggctccaatcatagtgctggtatttctcatcggaggggctgggggtttgtcttgaatgtctaggccgttatttgacattgtcaccaccagcagcagctggtggggaaggctagccccggcatctctggcgattgtttccgtcgcagagccgcacctctccctgcccaaccgggtacccacaaggcccctgctccaccggctccgctcgattcagctgggctgggctcctggcagctcagccgccagctcccgaggtgcagcacgctc

SEQ ID NO: 351878 - DNA, 673 bp, Homo Sapiens
aacaagacacgtgaaagttggagcacttatgaaaaaccaaggaccatgaaattactgaacattcagattaaacagattggggctgatctaggccaagaagttcttaatatttgtccaaatccctcatggctcattgctgatagcataacaaatcctccaggtgctcaacatgtcactgtttaactgccctctacttaaagctttctcatttactatgcatgattttgaagtactagaatctcagatggaaatttttctggatgtgcatattagtggaaaaggaagaaatcatacaatatagtatccaagggagctgacaggcagccagagctacacccctgactctgagtaaaccgctttggtacatctggcttttcctaatgaatcatctgtgggactcaaggcaccagcagcccaagtcaatcagcaggctgggaaccaagctgaggactcatatttcatcagctaagaaaaagctggagggtctcgggacacacagatgacctctgggtgcttttccctggatacaaaatgaaaatgctgatgttaacctgtaccagaagattcatgaggagcaactgataggggcaaatgtccaacatggtataaggattaaatcttaataatagcttatcttaccccaccaaaatggtgagaaattttacactcgtgc

SEQ ID NO: 351879 - DNA, 656 bp, Homo Sapiens
aacagatttcgtgaacagggcgaaactgtcctctccctgttctgccatgccccagggatccggtgcttgcctggcctgactcttgaccctgaagctctctctgggctttcttgcttgttgatttttatgcccaaacctccctacctttttataaccccctttatctccactgcccacctgccccctagagttgccaggtttctctgcttggcacaacccagccagctctgacatgtagctgtacctgaagatggtaaaggcccccaaaactatgttttcaacaaccaacatgtcttgtagttatccaccttttcccgaatcagaatccttcaccccttgcaatgttgccaacctatttctatgttgataatctgttttgtcattttggaaatgtaaacaaatcagtataccttccttttcatctttttcttgttatcggtaggaaagtacaggaaaaaaggaagagaaaatgcatgagagattgaacctacttattctactataaggaattctcttaagctcagcatctaaatcctcttttcccaattcttgcttggaatcttgagtacctgatcttgaatttctatggcactccctgagcgcgggactggctggtagccatgtgatattgatttgttttcaccatagcaacagca

SEQ ID NO: 351880 - DNA, 1695 bp, Homo Sapiens
  misc_feature (826)..(838): n is a, c, g, or t
  misc_feature (1530)..(1542): n is a, c, g, or t
tagagagactggagatcgccagaccagtatgggccaaatgataacaaatcaaaaacattaaagtgttctactttactggtggtaggggacaattcgcctgcagttgaggctgtggtcgaatgcaattcccgcctgaaccctataaatacaactttgctaaagatggcggactgtgggggactgccccaggtagttcagcctgggaagctcaccgaggccttcaagtactttttgcagggaatgggctacataccatctgccagcatgactcggctcgcccgatcacgaacccactcaacctcgagtagcctcggctctggagaaagtcccttcagccggtctgtcaccagcaatcagtcagatggaactcaagaatcctgtgagtcccctgatgtcctggacagacaccagaccatggaggtgtcctgctaagcagatgctcctcccctggaccattgcaagtccatccttcaaatgaccactccataatataacatttcatccagtaaactggcctctactatctttaactcatgcatggccactgaacctctctctagtagcctggatttatcattctctctgcctgcccacccccttttttgtatagcccaagaaccacttccatgccatactgtaacattccaacatctttagctgatcagatctctccatatcctctcttgccagctttttcccgtgctcccccaactatgtatcagataagattctttgatcccgactctgtgtgtgcgagcacgcgtgtctgtgtttgtgtgtgcatagttctgtggttttagacacgctttcttgtagtgcttctgcnnnnnnnnnnnnngggacttattttgcattctcaatggtgtttttaagggaattaggcagaacagatttctaggttgggtaggccactgcattctctctttgtttgcaaattggtcaacaaaatttgcaaagtgatttcaggagagagcagctttgaggaatgtggaaaatcataattgccgtctggaccattgattgattgtgaccagtagcagaagggtgcctgttacatagagaggctccttctgtccaaatgaatttctgtatactcttctataaataaaagggaggaatatattctgctggaagcccatgaaccatcgctgaggttctgatacaacatagagttttttccaaggagtgaatgtggtttaattactggactctcttagcacaggaaggtggaaacaaaatgccaggcctctgctctgaagagcaaaactgctgtcgctgcagtatctgataccagacatccacatatccacaagaagtgcctcttaggtctgtgacagagagtgtgtctccattcctcagttcccagaaaggggagaggtttggcctaaaaagcatgtagatgggggagaaatgggtggggggagaggaacagccattaacacagtatcatgtttaacaagtatagccctgatttcagtagatgtaatggaagccaaattaaattgatacagaacccatttctcagagtcnnnnnnnnnnnnngagacagagtctccctgttaccaggctgaagtgcaatggccctaggctaacttgaacctctgcccctgggatcaagcgatcttcctggcttaaccttcctagtagctgagactacaggcacctgccaccatacccgcttgtattgcattttgc

SEQ ID NO: 351881 - DNA, 1052 bp, Homo Sapiens
  misc_feature (960)..(960): n is a, c, g, or t
  misc_feature (998)..(998): n is a, c, g, or t
  misc_feature (1006)..(1006): n is a, c, g, or t
  misc_feature (1037)..(1037): n is a, c, g, or t
  misc_feature (1040)..(1040): n is a, c, g, or t
  misc_feature (1044)..(1044): n is a, c, g, or t
cagcacccctgtttgtcggccccccgagagaagaggtacggtcgaagccaggagccaggccgagcgggagctgaccaggcttgactcgggtacagaacgaggcaccagtccccttgcgaaccgaagggcctcgcagtggatggaggaggcccagccctgaggtcaacgccaaccaggctagcctggcacggggcctacagggtgggtaggcgggcgtgccgcagccgtccagggccttccctcaggtcccgggcgaggggcctacgctgcggcccggcaacaaggcccgactcggcccctcgggaccagagccccacccgatcggaagcggatcctttaccagggccataggccagtgactaggccgggcctgggcctcccatcggggccggactaggacgaggccccggggaggcccctggcctaccagacccttttctcaggccgacagccgccaggaagatgcaacgtgccctgccaggcgcccgccagcacttgggggccattctggccagcgccagcgtggtggtgaaggctctgtgtgcggcggtactattcctctacctgctctccttcgccgtggacacaggctgcctggcggtcaccccgggctacctctttcctcccaacttctggatctggaccctggccacccatgggctgatggagcagcatgtgtgggacgtggccatcagcctgacaacggtggtggtggccgggcgtttgctggagccctctggggggccttggagctgctcatcttcttctcagtggtgaatgtgtctgtagggctgctgggggccttcgcctacctcctcacctacatggcttccttcaacctggtctacctgttcactgtccgtatccacggcgccttgggcttcctaggtggcgtcctggtggcactcaagcaaaccatggggggactgtgtggtcctgcgagtgcccaggtgcgcgtantgtgatgcccatgtgctactggggtgctgtcctgctgnggtcgcangtgctcagagccggggtggcttctatggttnggntgtntcagttgg

SEQ ID NO: 351882 - DNA, 1260 bp, Homo Sapiens
tgggctgatggagcagcatgtgtgggacgtggccatcagcctgacaacggtggtggtggccgggcgtttgctggagcccctctggggggccttggagctgctcatcttcttctcagtggtgaatgtgtctgtagggctgctgggggccttcgcctacctcctcacctacatggcttccttcaacctggtctacctgctctccagttgggtatatcttcgcttctaccagcgccatagccggggccgaggggacatggctgaccactttgctttcgccactttcttccctgagatcctgcagcctgtggtgggtttgctggcgaacttggtgcacagcctcctggtgaaggtaaagatatgccagaagacggtgaagcgctacgatgtggtgccccatcctccatcaccatcagcctgccaggcacagaccctcaagacgccgagcggagaaggcaactggccctgaaggcactcaatgagcggctgaagagagtggaagaccagtccatctggcccagcatggatgatgatgaagaggagtctggggccaaggtggacagccccctgccctcagacaaagctcccacacccccagggaagggggctgccccagaatccagtctaatcaccttcgaggcagctcccccgacgctgtaactccagaccaccttgagtgtggcacctcccctcccaagccccccttgacatcctctcagctactccagggcacctgactgctctgaggagagggaagaaggcctgctggggctttccatggccttctgctgtttctcgccaacactacccaggactcttgctacctggttccaactccagacaaccactatgccaggcccggagcctctgaggcatcggccagtccaggccctcatctgaggtaagaatgtacatcagctggcagccccaagcaagtggctgcagggacactgatgccacagctcctgggccggccctcacatctgaaactggttgccgagagccctgagccaaggcaaggatttgccaaaaatgttctgggggcccagcaaatgcaggagccgacctggggctgcacatccctgcccatccccagaaagactgttcctgtcaggatttgtttccctctgctgtggcggtgactgcttctggaccagaacagctccagctcccaggtattttctacaggaccacttgagtgggcagccaagcccaggctcgcagtatcaataaagcagttctctgaggaatgactaaaaaaaa

SEQ ID NO: 351883 - DNA, 2815 bp, Homo Sapiens
aaatgaatatcctttttattggattttttccaattacaaatgaaatttcattttacatctataattagaaacaacacttacaatgggactgtacaaatttaggtcaaaataaaaatatatgtatcttgtgacttcataaaacatcctttactatatttttaaagaaagcagaagtaacagcaatatatgtaaaagtaatgatttaatgactataagcaagacaaagcaatagaattgtgcttcttttgcagactggggacaatgaaatgtttagctacaattttcccatacaaacatgaaacaatattcatatagaataaacaccctcacaaataactgatgggtgatgaacacacaccaagttcgaccaaagcaaaaaataaactgaaaattgttgggtggggttattcatattttaaattcaacatgcttgctctatttaaaaatacctgtagaagctcataataaatagcttctattttcagacatagcagagaaggcatattccattgttaactgtaaaagcaactcttaaatttaaaattactgctataccacctattaaaataactttagataaaatgccttcttttagcaacctgctggtttatttaaaaaattgttttagaattatagtgatcaatatgcatttttaaaatacaatattaattccatcatagccaatggaaaattaagacggtttccatatttctcagttaaaggtttttcttcactgcaacaatttttaaagtaaacatgtattactggagaaaagtatataaagtatagaaagatgtgccaattgcttctaatggaacagactttagaattagatatccacattaaaaatattctttgctggtaagcaaggctcaacataggttatgggtatctgcaaaggtcgaaccagttgggagaattttaacaatcatttctgaatgcatgaaacacaatatttctttatagcatttataaatatatcatacaatactgtttcctgttatgtcatataccaatatggcattgtacaacaagcataatgccatctgattcttacaaaagcgaatcatttaaacaagtcagtaaaataaacggtagtacccgcttttaggcatacagattgtaaaactgaagttcacttttctttgatcggttttgcgtagcaacagagaagtataaatcaaacaggaatcaaaatggctaaatatgcaagaaatcgttattcacagtgacatggctacatagaatgcattattctatgcatattctttccgttggttgaatttcaagataaaaagcacttgttttctacaggttcacaaaacagcgtaataacaagaacgatcaaggagaatgtaatgtaggcgttagttgagattaacaaactatggcccaatgcttatgtccactgcagagtacttccaaatccaaacaatggttacagaaaccatttcccatctttcctaacacagagaaaaagtcttgcctgctttccaagaaaccaattctttataacaacaatctttcttttcaattaacgtccataggagtatcacatgtagtccatcttttatagccaaatttaatgtcactacaaaagaaagcaaattggacgatagtcacatgtattagcatctagaaagctgtaatggcatgaagatatctatataaatcaggggtttaaaatttttttccttaacagtctcaggtatcaaccagaagaagttgctgatgacccatttactgatgattttcgaggtctattggcaaaagaagattggtggttaccgctggggctgttgctggttccattcatagtactcctgctgggctgttggccttgtcactcccagagtcactttccagttctccagcatttgtcagtccatctctctggtgactgatcttcaattcttttacaagtaggtcgaactctgtatttcaatggaagtggaccattccttctccaggtataaatgtaggcaatatccattagtgtataataatcctttaaaggttcctcctcatacatgacatcaatctggaaagtattaggtatgtccattttacttctgagaaactttcttaagtgcatcacagtcattgctgctgggcatcgtaagtatcttttatcattcacctcctccttagatttctctttgtctttgtttactttccgatccaatctgttctggtcaaagaattcaatggataagcttattatcgtcatcatcagttataattctcttatcttcaatctgcaacctctcctctatcttcattagagccattggcagcatcagcagaaggatgagctgcataaaaatcccttcttctcttcattgtcatttttgaaaagccctggaactaatttgtatacaatatcttggagagttttatctgaccttatattcagtagtggtctggtcttgtgaacttggacatcacaaataggacaatacttgctggtctccaggtaacgaacaatacacgttttacagaaggaatgtagacattctattatggttgtggcatcaatgaagtaccctccacaaagcacacacatcaggtggggatttagctcagtgatcttgattctcgttgttcgatgcatttctgcttgataaaaaatcccggaaagagcagccggcgcgaggcgatcgaagcgggcggaaaagacaatgaaagttaaaagtcgttcagcagaaaatgaatgcgagccaagcggccatcttgaagcgagctgcagacgccgctgtcaatgggcaaccagcgcggccccgagcagccgcggccgccacgctcgtctcatgcc

SEQ ID NO: 351884 - DNA, 239 bp, Homo Sapiens
aagctttccaaagaggaggcaaaggttaattattttaagcatttagaacttggcaacaagtagggtggaacaaacatactgactagacatatgctatagaatattctgtaaagatctctgtctacagtggtttaacagaaagctgaacatatggcaggctttgtttgttttttttcctctggaatcgtctgtcaggacatgagctaccgcctcattatactcacattccactccgtctc

SEQ ID NO: 351885 - DNA, 461 bp, Homo Sapiens
ctgttgaaggaacatgtaacgtactactgccaacctagtaaaaaattttgaaaaggatgaccactcagaacaactctcttgatgaccattctgtctggatctactgacataagatggcctgtagcaatgaggctgtgcattccattgctttttgcttgaaaaagcagcacagatgcaggaggaaaagtgattggcgcatagaactgtcgccaccagggccatgtcagcagtcaggaatctctgcaatttatgtttgtccgcttctgttcatgaggtagtaaagaaaatgcaatcaagggtgttccttgcctgaagcactcgaccactgagacggggacttcagagacatgaagtgtgacataccagccaacctcagctccttcaacctctttttcttcaacctctttaaagatgcttttcctagtgttagtaaagttctgcaactgacatattcagagcat

SEQ ID NO: 351886 - DNA, 1385 bp, Homo Sapiens
cggcacgagaaagtttggatgtccctttatttcagcagtgtgaaggtaaatggaagggtgagggtttgacttggtactgattggtcaagaatcctgctggataaagaaaaggaattttagaagtgaccagagggacagtccagccaaactattatttgataaggaacccaaggccctgggaggcaacaggctagcccttagtttcatggctagctgagagcagattaggagccaacgttgtttgcacatgtcccatcacacctgagatgtcagacatgggaagttcgtgctattattcagttgcctctctggaccatggcaagatttcctcattcatcaaacagactccaggccctgacaaagcagttggatttggcatgtgtgatgaaaacaattagccatccatgtacaacattatgcttactgcatcccatggaaacttaattccctcctagcacatatttgcatactgaaaggtccgaaaagggcatccacggcagcttgagccccttagcaccatgtaaggagcacagcatccaaacggcttcttgagaaccattggggaatgtctttctttttcacatccaattgtttagtgtctatttattcttgggtggccagttttgaaacctaaaaagggacaataaagcaaaaagtatcagtaaggataggtggctgagacccactgccctgagctactagtgtggctgtgcctgtgggtctctagaaccatctgcattggacgtgaagccacagcaggtggctggactgctggcctgttcctaatgagctacgctgggctttgaggtagaggttggggtttatgaaccccaactctggcttaaagatcttgctgtggctctgttatgttctgaggccttgggattagcctcttcctcattacggagctgattttctagtctgtggatcagctatgcctttggacacttctcttttccattgtgccttttgaatgttgtcttctcactcagcatcagcacttcgatctaaatgcagactagggagttgggaggaggaaccaaagtgaaccatccttcatttattcagtcattcgttcatctgtcaaacacgtatttggacatcaaggttgcagagatgaacaatgcatggatttcatctttgaggagttcaaaacctagtggagagaacacatggtacaatcgtaacacatgaaggacaagtaagtgctgcagtaaaggtactaataacatgttccttggaacagaggaagaaaaaccacgaaaccatggaaattagggaagcctttacagagggtgtgacaaaactcaatttgacattttcaagctatgtacaatgatgtgcaccttgcagatgctcaataaagtaattactgacaaaaaaaa

SEQ ID NO: 351887 - DNA, 814 bp, Homo Sapiens
  misc_feature (49)..(49): n is a, c, g, or t
  misc_feature (125)..(125): n is a, c, g, or t
  misc_feature (573)..(573): n is a, c, g, or t
aaacccaactgcttgtcagggccctgggagtctgtttgaatgaaatganggaaaatcttgcccagggtcccagaagaggcaaactgaaataaatagcacgaacttccccatgtctgaacatctcnaggtgtgaagggacatgtgcaaacaacgttggctcctaatctgctctcagctagccatgaaactaagggctagcctgttgcctcccagggccttgggttccttatcaaataatagtttggctggactgtccctctggtcacttctaaaattccttttctttatccagcaggattcttgaccaatcagtaccaagtcaaaccctcacccttccatttaccttcacactgctgaaataaagggacatccaaactttatgctccctaagacaagagttggtaaaatactgctttaagtttcttagctaagcctggtgcacatctccctagcatggacccatgcggtgctcatactccctaaccttgcatcacaaattgatcaggatggcagcttgctggctgctcttctactctgggtgtgcctccgctatttttctgcaaaatgtaactncttctacgctcatgtttctcatccatcgaccccatgcaaatggttgacatattgttctctccttgttgggaccccgaatttttgcatataactttctgattgatcctgggcggtagccccaagatcagtatttcatacttggctgtttctacctctcagcaattctttaaaacagttcagaaaaatccaggtgattccatcccaattgtgggaagtaaagtttgttcccagtgtggagaga

SEQ ID NO: 351888 - DNA, 1162 bp, Homo Sapiens
cagaaactaattctgaagcaagcccttatagttgtgctgcagtggtgtttcaatcacaattttagtgttcgactgtatgctttagttgctcttaagaaactctggactgtgtgtaaagtgttaagtgttgaagaatttgatgccctgactcctgtgattgaatccagcctccatcaagtggaaagcatgcacggagcagggaatgccaagaagaattggcaacgcattcaggagcatttcttttttgcaacatttcacccactcaaggattattgtctagaggtactaatttggtcgaagcagataaccaagcggagtggaccgacgttcagaagaagattatcccgtggaacagtcgtgtttccgacttagacctggagctcctgtttcaggatcgtgctgccagacttggaaagtcaattagtagactcatcgttgtggcctcgctcatcgacaaaccgaccaatttaggaggactgtgcaggacctgtgaggtatttggggcttcagtgctcgttgttggcagccttcagtgtatcagcgacaaacagtttcagcacctcagtgtctctgcagaacagtggctacctctagtggaggtaaaaccacctcagctaattgattatctgcagcagaagaaaacagaagggttataccatcattgggaggggaacaaactgccaaaagtttagacctaacccaatattgctttcctgagaaatctctgctcttgttgggaaatgaacgtgagggaattccagcaaatctgatccaacagttggacgtttgtgtggaaattcctcaacagggcattatccgctccctgaatgtccatgtgagtggagccctgctgatctgggagtacaccaggcagcagctgctctcgcacggagataccaagccatgatgtgccttccttagtgaactgctgctgctgttcagacttttttaaaaaaaactatttggactaaagaaacagattctgaaatttattgtgataatttgtatttcttttttcttgcaatttaatgccaaaagtttgccatgtgccttaaacatattactatatattttcccctttaataaacactttttgttaaattgtattcttcctttaataaaatattttaagcaattgtggaaataaaacaatggatttttt

SEQ ID NO: 351889 - DNA, 893 bp, Homo Sapiens
cgaaagtgaaaattgttgcccaattaaaatttcagaaattcgtgtttggtttaagtcccagatagggtgtttgttaaaaaaaagtttggaccaagccggcgggcgattccggtaaggaagggggccatgcatgggctggttatcttccggggcgagaacaaggtgggtgcctgggggtactcgccggatcaagcaggggtccgatcacatggacattcagggaagcggataatgccctgttgaggaatttccacacaaacgtccaacggttggatcagatttgctggaattccttcacgttcatttcccacaaagagcagagatttctcaggaaagcaatatgggggtagggtgtaaacttttggcagtttgttccactccaatgatggtatacctttctgttttgttgtgctgcagataatcaattagctgaggtggttttacctcctaaattggtcggtttgtcgatgaccgaggccacaacgatgagtctactaattgactttccaaagtctggcagcacgatcctgaaacaggagctccaggtctaagtcggaaacacgactgttccatgggataatcttcttctgaacatcggtccactctgcttggttatctgcttcaaccaaattagtacctatgtcttgctgagaccagtcacctggttttagtttactaagttgagtttgagaaaggtaccactgaaatcccgcagctaaaggaacatcagtgaatctggtaaatttatcaatggtgatccattcatcttcaataaggcctgaaaggcgtggaaggatgtaaaatatggtctgcacaaatgttctcactcatttccttttaatgtcagaacagatttctgtttagagttaaatattcccttccattgttttcgc

SEQ ID NO: 351890 - DNA, 548 bp, Homo Sapiens
gaaaaaggttgacttaacactagagtgactagaggagtcctgcagaaagatgccggacaaagcattctgggcgctgcacaaatgttctcactccattcccttttaatgtcagaacagatttctgtttaagagttaaatattcccttcccattgtttacaagccagacactgcctctagacaataatccttgaagtgggtgaaatgttgcaaaaaagaaatgctcctgaatgcgttgccaattcttcttggcattccctgctccgtgcatgctttccacttgatggaggctggattcaatcacaggagtcagggcatcaaattcttcaacacttaacactttacacacagtccagagtttcttaagagcaactaaagcatacagtcgaacactaaaattgtgattgaaacaccactgcagcacaactataagggcttgcttcagaattagtttcttttctggaatattttgagtaataatgtctaaatgtgataaaactgctaaaaacgtacaaatgcttgttttaagattttcttcaccataagaaaa

SEQ ID NO: 351891 - DNA, 1092 bp, Homo Sapiens
  misc_feature (26)..(26): n is a, c, g, or t
  misc_feature (98)..(109): n is a, c, g, or t
  misc_feature (131)..(131): n is a, c, g, or t
gagggtaggggaagttcggagtcggncggaaccggcaaggagagcgattgacggctggggcggttttgagtgagtagtagatcggcggcggcggttannnnnnnnnnnntggaagggtaaggtgggctaanagacgccgataggcggttgggatgtggagggttgcgcatatctagggtgtttggggggaagagggaaattcggctaaaagcccgaaggaggttgggaatacaagggtcgggaggttaacgggggttcggggaaagggccaaaagagaggagggtcgctggaaccgtgggatcgccttggcggtgaaaaaaggttgcgggtcacgatcccgttatttcccagtggtgtgcattccctgaagtgcggcctagtctacactacctgcatcccctttggcttggaccactgtgacttccctatggtggactgctgctcctcaagggaggagtctgtttccagccccaggcagcagagttagcccctgactccctgtgccctatgaaagctgagcagaattacataagtcactccaggcagaagactgaagagccagggcctggttgacctgtgccctgtgaacctgaatgacaaggtgcagcctcgccagcaagcacatgagctgcccctggaggtgagcccctgccaatctcaggttgttaccacaacaaagggttgccttacctggccagtgacggagcaggagcattgccatcttgaacaaacaccaccattctaagctcccccttaattaaaagccgcctaaatccagcccgaaaatatcagcctaatagctaatgtcagcataaccagaaacattccaaccctaagataaacccttctctgaccagaaacatgccaaccccgagacagcctcccttatgaccagagacattccatccccgcaataaactttccctcacacagaaacattcggaacctatgataagaaccccctccaaaacccttaaatatccttagtttgtaagagagtgtggctctgacctaacttggccagaagcccctctcaagtttgttttccaaaataaacctgtccttgttgactgtcgaatccggagaattcc

SEQ ID NO: 351892 - DNA, 922 bp, Homo Sapiens
  misc_feature (709)..(709): n is a, c, g, or t
  misc_feature (861)..(861): n is a, c, g, or t
  misc_feature (879)..(879): n is a, c, g, or t
ggaagagccagaggatccagacgccttggaggacttggaacacctgtaacaggacaaggagttctgctcaggcacgtggccacagaaaactacttaggaagcctgtggtgagaacaacaacagtgcctgagaatcccacggctctggggaagtgagccccgaggatgaggctgctcgcctggctgattttcctggctaactggggaggtgccagggctgaaccagggaagttctggcacatcgctgacctgcaccttgaccctgactacaaggtatccaaagaccccttccaggtgtgcccatcagctggatcccagccagtgcccgacgcaggcccctggggtgactacctctgtgattctccctgggccctcatcaactcctccatctatgccatgaaggagattgagccagagccagacttcattctctggactggtgatgacacgcctcatgtgcccgatgagaaactgggagaggcagctgtactggaaattgtggaacgcctgaccaagctcatcagagaggtctttccagatactaaagtctatgctgctttgggaaatcatgattttcaccccaaaaaccagttcccagctggaagtaacaacatctacaatcagatagcagaactatggaaaccctggcttagtaatgagtccatcgctctcttcaaaaaaggtgccttctactgtgagaagctgccggngtcccagcggggctggggcgaattgtggtcctcaacaccaatctgtactataccagcaatgcgctgacagcagacatggcggaccctggccagcagttcccagtgggctggaagatgtgctgaccgatgcatccaaagctgggggacatggnggtacattgtccggccgntggcccccgggggttctttgagaagacgcaaaaacaaggcatg

SEQ ID NO: 351893 - DNA, 1819 bp, Homo Sapiens
tatcaagttgtcaatgtaatttatataacttttatttttatataatttcacatgtacagaaaaatacccatatacctttacccaaatagctaccaccaagaaatctctgttgtaacatttcaatcgccattccctctgaaataataacaaagcactttatttgagtattccgtattccccaaagctagctgtgaaagacctacatcacctcaaaaccttccatttggttccatagatcctgccatgtcacattcttgtaaccagctgcagggccatcttgttataactggttcatgtcctgctaaagctgagaggtgaagggctaaaaacacagtcctggcacagattccaggacaccccggcacaggcttgtttgaggacattgcctgggtaaacagcctcccctgaaagtgttcagtgtacaactcttcacagagcaatcgctcaaatgcgtggcagcacgcagacatgtctctcggcttctctccttgtctctgatgccttcctctccagtcggtgctttagaaatgctttattcccattgtccactgaaaatacaacctagattccttcagtaaatatctgttaaggaggtcacatgaaaagattgctccaactcattcttgctggtgggctcccaagggtaaaataatatagttcgtgtcttcttcagtcatgaggaaaacccattgtcactaaatctccctggggatgcttcctacatccaaccaaacaaagggagcgacagctgaggtctccaggtcaaaaacaaatatgtcaccttgctgagagatgatggcagtgatctgcgccttgcagagccccacggcctccttcggtgaggacaagaagtggtagttggtcgggctcaggagttcatggtcagctgaaaggtaaaaggaaaccacacagctttcccgtgtgcaattcccacatctcctcagcaattcagacactggctcctcataaaggcagacagcctctcctcctttcatcacaaaacgttcagtcacacgagagcacacgggctccagggagctccatgtatggactctcacactgagtgtcatcgaataatccgagtgaagatctgacacaccatagatatagaacgtgttttcattctcaaagcctactggcaacagtggagcaaagaaattctgagcaaagtaatgaagcattttccactttcctccgtactcaagagaagcccaggaaggagcttgccagatgtcattcaactgccaataaagtgcccccatcgtgtgcccttgctgatccactatctcgctgcgactacggcggtagaattcagtttctgttttgacacactgggcctgcatcacctgagtaaggtagatggtatctttaaatgtgcgtaatggatctgtgctttgggggagtttgaaatgaagtccagcctgataaagcatttgtttgttaccaccttcgtgatgttgtcgatgaagtgaaaacttgctactgaaagaccagtcctctgtagacgagaccttttctaatgtactgaaggacggccaggactgatatccatattcagatgcaaatcgagcttttgggaaaactttccagttccagcaatcactgatatagtcataaaaatgtacatcaccaaaataatggctattagggttttgagagacccaggcttctgcaacagtttcagccccatttgtaggactggacgtaataaaaggacgactcttgtctcctgccagtacgagctctctgatgtttttcacatagagtgtcacatagtccttgatgtagattggccggtcagcgaaactgatatgatacc

SEQ ID NO: 351894 - DNA, 1290 bp, Homo Sapiens
ccaaaaagtaaagggagggacccctgtaaaaacatagcgcctggaaacagagagtcgatgggagaaaatgtaggatgaccctgaccttttttggtttcaaggcggaatttaatggggggggtggatccccccgggggagtctggctcccgcctttaagataggggggaaagtttccacaaattttttgtaggaagtccccttggaaattttgttttacggggtgcataagggtttttgctccgggggatattatgcaaggttccgccctgggtggacaaagccccttccccgtggaaggggttctcgcttagggatatgtaagggggaaatccccttcagggaatggtggaaggctgcttatgaaggttttctgccatacccagcggaagggcagtccctggtcccccagggctagaacaaactgggttcttctcgacgtcaggcctatgtagaagaaactggtccaacagattgaaaagggggacacagggcataatttcttatgaaaaagcacaaggaggatgcctgctgtaccagctccatgggaggaccatggcatttgaatttgggtctcggctctgctacaggccaagtgggggaagctcttttcggggacagtccgcctcaatctaaggaatctagatacctggtcactctgtcccttcagaggatgttgagggtcacattctgcatctcagatcaaaaagctccttgggaccactgttggttgttcataagcattaagaatcttttaggatttttggaagttgaccagggaacttggttaaatcttgagaaatacatggcttgctaagaatcttgagaaaattcctctagagaagctataggatatttaaaataatctgcccaagtcctacagatatagctgggtctcaagctctcaaccatctaactgtccggtgttgtttcttctacatgtcatcttcccacgtaaccttcatgactctccttcaaagaccctcacccagcaccccaaaaggtcttatgattccccaccttcgccactctctaaagtggtttcagaaatttatagtccttactgattatttctcccttgttcctcctcatgatgataacattgctcttcaatgcactggatgcctgattaaaaaatgaatcttcagtggatctcaggggatggccatctaacaacagctgtgagaacatccactgaggactccaaactgtgagtgactgatacggccactaggaacatgtcagcctggagggaagcctgggttctgctctgctctttgttccagctcctt

SEQ ID NO: 351895 - DNA, 1516 bp, Homo Sapiens
agggcaagtctttgccatcccccagatggctctgtcttcttgtgtatggcagggctgggactgctgtcccttgtacagtttactgtcactggtgggcactgaacaggaataacagactctctatgtgagccacactaggttgtcgcctttacaggcagtgtcccgccacctttgcttcccgctccttctggacattccagagccctgcaccaaacccttacttggtgtctgcacctcctttccctctctccatcttccaatccctggaaaagtctggtctgagtgtgacttgggaagctttcagtgctgctgtttggcccagctcattactttctccctttctctaccacagcaaacacattctccaccatgtcagtctaaagagtctaaaggggccgggagaagcgtgagcgaggggcagattctagtcgggagcccatgccctggaaatccatctttcttcatctttcccattgaccactttgggtttgacctgcacatctgcagtgagggcagaattcaacaagcacaactcactggtctttcagtcaacgtgctagaatccgatgacttattaatctctaattttttggcgcctctttcattgaatgagaattgctttcgtatagttcacattagaaaaatgcctaatatactaaagtaaaccaaacgttgtcacttttctcttgttcttgaaacattgcaaccaaaaaggtcagcacaaaggccttcacctacgtgaagacctcctggtaggatctgtccatgggatggagaaccactctgtccagatctggggttgggtcatgacaccagctaccaattttagaatattatttcttggtttctttatgaaaaatgggtgctagtggtaattgctttgtggcttagtaaactactctgtggatgatttccaaacattcaaagccaatacccttgttattaacaagatatttcgagtacaatatggctcattgacttttccattacatctgaggattccagagtcctctgttcatccctgggatagagtgagccctcttgcgtcttccagggtagctcaggttggcccagtttgggccagtccatttttggaggtcactctttcccccctcatcccctcacctccttctctttacccccttcacgtacttcctttctttcttccctctgttattcattcatcaagcaggttaaagccattgtgctaagatctaatctgaggacactataatggccctgtcgtcagggaagcccgtgatcgctcgttttcaggggtcttaccggtcagcaaccttggcattgatacataggcactctacagaatttaagttttcagagggaagtctgttgttctgattaatctgcattcattcagcgaatgctcaagacaagccaggcatgctgagaagcggcgctctagttgtatgtaagatgggcattcctctgctctcctctattctccatgtcgactgagaagagtataataagaacattgtaccctctccacacttaa

SEQ ID NO: 351896 - DNA, 350 bp, Homo Sapiens
  misc_feature (21)..(21): n is a, c, g, or t
  misc_feature (272)..(272): n is a, c, g, or t
  misc_feature (295)..(295): n is a, c, g, or t
caaaagagggtccctgctctnttgcccgagagcagtctgcatcctgggaccagaatgctttcctggaaaaagaagcctttcaggtttccctgggccagcatcttctgatggaaggtgggagccaacacccttctgatggaaggtgggagccaacacccttctgatggaaggtgggagccaacacccttctgatggaaggtgggagccaacacccttctgatggaaggtgggagccaacacccttctgatggaaggcgggattcccgcttctnaaactccccctggagtctcactnccacacatgcccatagctagcattcaacagaggactctgtcttaagttcaactgt

SEQ ID NO: 351897 - DNA, 1017 bp, Homo Sapiens
  misc_feature (529)..(565): n is a, c, g, or t
  misc_feature (903)..(903): n is a, c, g, or t
  misc_feature (909)..(911): n is a, c, g, or t
  misc_feature (939)..(939): n is a, c, g, or t
  misc_feature (956)..(956): n is a, c, g, or t
  misc_feature (960)..(960): n is a, c, g, or t
  misc_feature (964)..(964): n is a, c, g, or t
  misc_feature (968)..(968): n is a, c, g, or t
  misc_feature (975)..(975): n is a, c, g, or t
  misc_feature (983)..(983): n is a, c, g, or t
  misc_feature (993)..(993): n is a, c, g, or t
  misc_feature (996)..(996): n is a, c, g, or t
  misc_feature (1002)..(1002): n is a, c, g, or t
  misc_feature (1009)..(1009): n is a, c, g, or t
  misc_feature (1014)..(1014): n is a, c, g, or t
aacgtaggctgtcaggtctccccctgtgcaaatgggacatccacttgagagtcaagggtctgtttgggtggcagggatagccacttctgaaggtagaaagaaaaataagccaccaaattggtatctttctgtgaaatggacatcgtgcttagagtctccattttccccacaacctggaggaataagtattgtcatctgcattttatagctgaggaatctgactcaacaaaattaaattactcacctaagcaattagcaattaaccaagtctttctgattcagaaacccagctgttgcctgttcatatccagcccctgtattgggatcaagatctgccctattctcagtgcagcaagatccaggcagatcacactggactcccagcactgaatctggctcaaggggacatgaaatttgactgggtcatggggctcaggagcatcactctcaaaaatagcagtacaggaagaggcgatggccctaaacagcatttgcaggcagatcccatgttaatcataagggccaggannnnnnnnnnnnnnnnnnnnnnnnnnnnnnnnnnnnnagggctgaccccacattggacaccgctgcatccatgtccatcacacaacacagctgccgtttcttctgcctgcttatgggaaagtcccctcttctcctccgttttcttctcttcctgccctatcacaccgtgcacttctccctttccttaaagaaccaccatcaactttaggaggagggaaaggggtggctctggcaggaaaagccagaatcccctctagccaccagagagagagaggaatggctgcatgttttctcccccagtccaaggcactgggtcttggctgggttgaaggttcaagctgctctctgctgtgtcggtgagtctggtcacctgcnacctcnnntatggcattcagttatcgagtctcatgnctcccatggctggagtntttncttncttnacggggngagaatgnttatagaaantcnctaaancacttgncattngtg

SEQ ID NO: 351898 - DNA, 939 bp, Homo Sapiens
  misc_feature (10)..(10): n is a, c, g, or t
  misc_feature (12)..(12): n is a, c, g, or t
  misc_feature (16)..(16): n is a, c, g, or t
  misc_feature (24)..(24): n is a, c, g, or t
  misc_feature (33)..(33): n is a, c, g, or t
  misc_feature (47)..(47): n is a, c, g, or t
  misc_feature (74)..(74): n is a, c, g, or t
  misc_feature (80)..(80): n is a, c, g, or t
  misc_feature (86)..(86): n is a, c, g, or t
  misc_feature (96)..(96): n is a, c, g, or t
  misc_feature (106)..(106): n is a, c, g, or t
  misc_feature (113)..(113): n is a, c, g, or t
  misc_feature (116)..(116): n is a, c, g, or t
  misc_feature (121)..(121): n is a, c, g, or t
  misc_feature (124)..(124): n is a, c, g, or t
  misc_feature (130)..(130): n is a, c, g, or t
  misc_feature (143)..(143): n is a, c, g, or t
  misc_feature (151)..(151): n is a, c, g, or t
  misc_feature (175)..(175): n is a, c, g, or t
  misc_feature (177)..(177): n is a, c, g, or t
  misc_feature (182)..(183): n is a, c, g, or t
  misc_feature (185)..(185): n is a, c, g, or t
  misc_feature (188)..(188): n is a, c, g, or t
  misc_feature (199)..(200): n is a, c, g, or t
  misc_feature (208)..(209): n is a, c, g, or t
  misc_feature (211)..(213): n is a, c, g, or t
  misc_feature (215)..(215): n is a, c, g, or t
  misc_feature (219)..(221): n is a, c, g, or t
  misc_feature (224)..(224): n is a, c, g, or t
  misc_feature (236)..(236): n is a, c, g, or t
gaagaagagncncaanctagagtntgagccctntagctaaaaaagcnggaccctattctttcctgagcctccanaagaanacggcncacgagcgcnttactttagnctgttanatnctctnagnactttngcaatcagaactntaagacanaaataaagccacttagtctgtagntntttgnngnggnaggaatagaanncaaatgcnngnnnangaannnacnggtgatgagatngggaaagtgggctccaggaggtctagatctgtgatgagatggggaaagtgggctcaagagggtctggatctgtgatgagatggggaaagtggggctcagaaggtctggatctgtgataagatggggaaagtgcggctcaggaggtctgcatctgtgatgagatggggaaagtgggctcaggaggtctggatctgtgatgagatggggaaagtgggctcaggaggtctggatctgtgatgagatgggggaagtgggctcaggaggtctggatctgtgatgagatgggggaagtgggctcaggaggtctggatctgtgatgagatggggaaagtgggctcaggaggtctggatctgtgatgagatgggggaagtgggctcaggaggtctggatctgtgatgagatggggaaagtgggctcaggaggtctggatctgtgatgagatcgggaaagtgggctcaagaggtctggatctgtggtgagatgggggaagtgggctcaggaggtctggatctgtgatgagatggggaaagtgggctcaggaggtctggatctgtgatgagatggggaaagtgggctcaggaggtctggatctggggtggggatctggagtggaaggggaattcatttgttcattgtctatccttttgtattgattgaattttttatatatatatgtgaattttcacaataaaatttttttcc

SEQ ID NO: 351899 - DNA, 1629 bp, Homo Sapiens
  misc_feature (1001)..(1001): n is a, c, g, or t
  misc_feature (1008)..(1008): n is a, c, g, or t
  misc_feature (1060)..(1301): n is a, c, g, or t
  misc_feature (1531)..(1532): n is a, c, g, or t
  misc_feature (1538)..(1538): n is a, c, g, or t
  misc_feature (1540)..(1541): n is a, c, g, or t
  misc_feature (1546)..(1546): n is a, c, g, or t
  misc_feature (1560)..(1560): n is a, c, g, or t
  misc_feature (1568)..(1569): n is a, c, g, or t
  misc_feature (1572)..(1572): n is a, c, g, or t
  misc_feature (1575)..(1575): n is a, c, g, or t
  misc_feature (1580)..(1581): n is a, c, g, or t
  misc_feature (1587)..(1587): n is a, c, g, or t
  misc_feature (1589)..(1590): n is a, c, g, or t
  misc_feature (1598)..(1598): n is a, c, g, or t
  misc_feature (1600)..(1600): n is a, c, g, or t
  misc_feature (1604)..(1604): n is a, c, g, or t
  misc_feature (1608)..(1608): n is a, c, g, or t
  misc_feature (1610)..(1610): n is a, c, g, or t
  misc_feature (1613)..(1614): n is a, c, g, or t
  misc_feature (1620)..(1621): n is a, c, g, or t
  misc_feature (1624)..(1625): n is a, c, g, or t
aggatcgccatcacacggcgcactggtgctggcgttctcccccgagtggatgaacatgtgcttggtgtcgtttttccttgagctgaacgtcttgcaacagtggccgcacgcatagggctgaccccacattggacaccgctgcatccatgtccatcacacaacacagctgccgtttcttctgcctgcttatgggaaagtcccctcttctcctccgttttcttctcttcctgccctatcacaccgtgcacttctccctttccttaaagaaccaccatcaactttaggaggagggaaaggggtggctctggcaggaaaagccagaatcccctctagccagcagagagagagaggaatggctgcatgttttctcccccagtccaaggcactgggtcttggctgggttgaaggttccaagctgctctcctgctgtgtcggtgagttctggtcaacctgcaacctcctgatatggccattgcagttcatcgagtcttcagggactccccatggcctggagtactttgccttgcttacacgggagaggagaatggatttatagagaacatcatctaaatccaacttgaccattgtgtggccacacttgctagattgctatagtctaaatctagcattgtagaaagacgggggagcttggagctgcacaaacccaggtctggaactggctccttaccttggaaggtgaatgatcctgccaggactcttagcctccctgggtctcaatttctttatctgtttcatgggaatgaggatctctgctgggtggttgggtgatgtgggggctgtgtgaaaacagcttgtcaatacaagccaaaatagaaatatttctccacagagtatgaaggtcaaatgagagaatacatttaaattaaatggaaaattaaaatggtaaaaaatgcaaagctgtattgaaagttccgagcttctctataaggagctttttgactatgtaagaatcctgtactcgttccccctaaatataaaanaaaagtngaaggaggcagaagggagagtgatgcacgatgggcaaggacttcacctgctnnnnnnnnnnnnnnnnnnnnnnnnnnnnnnnnnnnnnnnnnnnnnnnnnnnnnnnnnnnnnnnnnnnnnnnnnnnnnnnnnnnnnnnnnnnnnnnnnnnnnnnnnnnnnnnnnnnnnnnnnnnnnnnnnnnnnnnnnnnnnnnnnnnnnnnnnnnnnnnnnnnnnnnnnnnnnnnnnnnnnnnnnnnnnnnnnnnnnnnnnnnnnnnnnnnnnnnnnnnnnnnnnnnnnnnnnnnnnnnnnngggcccaagaaatcactggtgatgagatcgggaaagtgggctcaggaggtctggatctgtgatgagatggggaaagtgggctcaagaggtctggatctgtggtgagatgggggaagtgggctcaggaggtctggatctgtgatgagatggggaaagtgggctcaggaggtctggatctgtgatgagatgggggaagtgggctcaggaggtctggatctggggtggggatnnggagtngnnggggnattcatttgatcantgtctatnnttnggnattgnntgaatntnntatatatntntgtnaatntncannataaannttnnttcc

SEQ ID NO: 351900 - DNA, 1708 bp, Homo Sapiens
  misc_feature (373)..(401): n is a, c, g, or t
atttggggtcttgggggcagggctcccacgaggccatcctcctcttcttggccctccttggcctgacccattctgtggggaaaccgggtgcccatggagcctcagaaatgccacccggctggttggcatggcctggggcaggaggcagaggcaggagaccaagatggcaggtggaggccaggcttaccacaaccgaagagacctcccgctggggccgggcaggctggctcagctgccacaggcatatggtggagaggggggtaccctgcccaccttggggtggtggcaccagagctcttgtctattcagacgctggtatgggggctcggacccctcactggggacagggccagtgttggagaattctgattcnnnnnnnnnnnnnnnnnnnnnnnnnnnnnaacctgggggttcggggagaggccctgcttgggaacatctcacgagctttcctacatcttccgtggttcccagcacagcccaagattatttggcagccaagtggatggaactaactttcctggactgtgtttcgcattcggcgttatctggaaagtggactgaacggaatcaagctctgagcagaggcctgaagcggaagcaccacatcgtccctgcccatctcactctctcccttgatgatgcccctagagctgaggctggagaagacaccagggctgactttgaccgagggccatggacgcgacaggcctgtggccctgcgcatgctgaaataactggaacccagcctctcctcctacaccggcctacccatctgggcccaagagctgcactcacactcctacaacgaaggacaaactgtccaggtcggagggatcacgagacacagaacctggaggggtgtgcacgctggcaggtggcctctgcggcaattgcctcaccctgaggacatcagcagtcagcctgctcagagcgggggtgctggagcgcgtgcagacacagctcttccggagcagccttcaccttctctctgggatcagtgtccggctggccgacgtggcatttgctgaccgaatgctcatagaggttgacccccacagggtcacgcaggactcggacactgcccctggaaacatggatggacaagggctttgtggccacaggtgtgggtgtcctgtcggaggaggggcttgttgggagaagggaggcaggctgggggagaaacccggatcccgctgcatctccgcgcctgtgggtgcatgtcgcgtgctcatctgtggcacacaactcactccgtatgtcccgcactggtaacatgcatcttgtaatacagtttctacgtctatttaaggctaggagccgaatgtgccccattgtcagtgggtccacgtttctccccggctcctctgggctaaggcagtgtggcccgaagcttaaaaagttactcggtactgtttttaagaacacttttatagagttagtggaaggcaagttaagagccaatcactgatccccaagtgtttcttgagcatctggtctggggggaccactttgatcggacccacccttggaaagctcaggggtaggcccaggtgggatgctcaccctgtcactgagggttttggttggcatcgttgtttttgaatgtagcacaagcgatgagcaaactctataagagtgttttaaaaattaacttcccaggaagtgagttaaaaacaataaaagccctttcttgagttaaaaagaa

SEQ ID NO: 351901 - DNA, 1083 bp, Homo Sapiens
  misc_feature (1)..(2): n is a, c, g, or t
  misc_feature (12)..(12): n is a, c, g, or t
  misc_feature (19)..(19): n is a, c, g, or t
  misc_feature (33)..(33): n is a, c, g, or t
  misc_feature (59)..(59): n is a, c, g, or t
  misc_feature (101)..(101): n is a, c, g, or t
  misc_feature (148)..(148): n is a, c, g, or t
  misc_feature (160)..(160): n is a, c, g, or t
  misc_feature (549)..(549): n is a, c, g, or t
nnctttactttnttttaanctggggttcggganagccctgcttggaacatctcacgagnttcctacatcttccgtgttcccagcacagcccaagattattngcagccaagtggatgaaactaactttcctggactttgtttctcattnttcgttatctgnaaagtggactgaacggaatcaagctctgagcagaggcctgaagcggaagcaccacatcgtccctgcccatctcactctctcccttgatgatgcccctagagctgaggctggagaagacaccagggctgactttgaccgagggccatggacgcgacaggcctgtggccctgcgcatgctgaaataactggaacccagcctctcctcctacaccggcctacccatctgggcccaagagctgcactcacactctctacaacgaaggacaaactgtccaggtcggagggatcacgagacacagaacctggaggggtgtgcacgctggcaggtggcctctgcggcaattgcctcaccctgaggacatcagcagtcagcctgctcagagcggggntgctggagcgcgtgcagacacagctcttccggagcagccttcaccttctctctgggatcagtgtccggctggccgacgtggcatttgctgaccgaatgctcatagaggttgacccccacagggtcacgcaggactcggacactgccctggaaacatggatggacaagggcttttggccacaggtgtgggtgtcctgttggaggagggcttgtttggagaagggaggctggctgggggagaaacccggatcccgctgcatctccgcgcctgtgggtgcatgtcgcgtgctcatctgttgcacacagctcactcgtatgtcctgcactggtacatgcatctgtaatacagtttctacgtctatttaaggctaggagccgaatgtgccccattgtcagtgggtccacgtttctccccggctcctctgggctaaggcagtgtggcccgaagcttaaaaagttactcggtactgttttaaaaattaacttcccaggaagtgagttaaaaacaataaaagccctttcttgagttaaaaag

SEQ ID NO: 351902 - DNA, 1895 bp, Homo Sapiens
  misc_feature (1705)..(1829): n is a, c, g, or t
gatctgcaatctactctgacatatcaggaggtggccatccttacctgacaggcttggcagtggccggtggagcatactacctaggcctggaaggagcaatcatcggtcctattcttctctgcatacttgtggttgcttccaatatctatagtgccatgctagtgagtcccacgaattcagttcccacgccaaaccagaccccatggcctgctcagcctcagcggactttccgtgacatttctgaagatctgaaatcttcagtaggttgatgtggtttcctctgcagtgatttttctaggaagttcaaatttgacagcgagttcagctcagctgtggccctctgcccttccagctgtgcctagcaagcaaaacccaggaaagaagcagaagcctcctggccttacatacagaatgcctggacaagagagaacttgctgcgggctgctttgtattttaaaacacagcttgagagttcagagttggtggtttgctcacttaactgttgttaagatggcttgaaaagtttcattttatacactggtaccctggcttgaaatttttccactttggttatctatgttactatattatatatttataaagttattttaagaactctaaactacctgctgttaaaagaatagatggtgtaattttttcctggtttaagaaatgtattgttaaacttttctaagacagtcacttttcaaggaagagggctttcacttttgagtgtgtagttgagtgagcaggaaaaatgaatcttctacccttctcccacaatgtattatacgctctttaagaaataataaatcataagtataagggtggggtggcttatttgatgttcagttttatattataaccctgggagatacaaagactgaagctcttcctcctcttccttttctcttcacgcttctttacactattgccaaattataaaacttggctgaccacgttgaagtgaaatacttattaagctgctatgaatggtaacagtatgataaaattcatgctgttattaggttttctccttccaggtggttgaagtgaaaaatctcaggtgtagcaatactctgatttgttaaatgtatccgtttcattatttggaactctgccaataagttagttttcagcagaattttgtatttatgtagtattttcccatctcttagcacagtgccttgcacatgactctaaatgaatgcttgttgaattgaattgcaactttaaaaatatctcagatatcacaataaccagcattagtgctttacattttacaaagtccttttgcacatactatttcacaagtacatcacatcagctttcatatagctttatattattttacatcagttttacactgatggagaagctaaggttcagaaaagtgaccaactcaaagtcgtaaagtgtagtaggatttggcctcagatctttgactccgttgtgtgcagattctgctgtattagtgttccttctaaatattgtatgcagttttcccagtgttacgagattggtgttgctatccatttgttgtgaatgaagacttgtcctatagtacatgacagggctgagagtggactgtagttcttagctgaaccctttctactgtttaaaacaatcatcaggcctatcctctgctcccaggggaatgtgggagagaaaagggttcttggccaggctgtaggtggtggctcannnnnnnnnnnnnnnnnnnnnnnnnnnnnnnnnnnnnnnnnnnnnnnnnnnnnnnnnnnnnnnnnnnnnnnnnnnnnnnnnnnnnnnnnnnnnnnnnnnnnnnnnnnnnnnnnnnnnnnnnnnnnttagctgggcacggtggtgtggctatagtctgagctactcaggaggctgatgtatgaggatcacct

SEQ ID NO: 351903 - DNA, 346 bp, Homo Sapiens
  misc_feature (55)..(55): n is a, c, g, or t
  misc_feature (69)..(69): n is a, c, g, or t
ccaacgttgattaccagttcagagtctgcgcccgaggagatggccgacaggagtngagtccttggagtntcccccagataggtcattccacattggtgcctcatgagtggacagctggttttgaggggtacagtctgagcagtcgaagaaatatagcacttcggaacgattctgaatcatcgggtgttctctactccagagctccgacttatttctgtgggcagacattaacattcaggcaagtagatattaaagacatctcacctgcctcaggatagcagagtgaagtgcatagagcacacataagcggtttgaattcaagacatcctgagctatacccgtcatt

SEQ ID NO: 351904 - DNA, 919 bp, Homo Sapiens
gggggggccgccgccatcgctctcccgggcttagaaggcccggctactgacgcgcagtgccagaccttagccctcacggtccttaagtctcggtcgccctcgcctcgcagcctgccacccgcgctcagctgcccgcctcctcagccagccatgctggagcatctgagctcgctgcccacgcagatggattacaagggccagaagctagctgaacagatgtttcagggaattattcttttttctgcaatagttggatttatctacgggtacgtggctgaacagttcgggtggactgtctatatagttatggccggatttgctttttcatgtttgctgacacttcctccatggcccatctatcgccggcatcctctcaagtggttacctgttcaagaatcaagcacagacgacaagaaaccaggggaaagaaaaattaagaggcatgctaaaaataattgaggttttcatgattcagcacctgcttttgtttctgtgagatgagctaaattgctttcataccccagataagagctaaaaccacctaatgctcttatggcacagctgtgtatagatttagttctctttatacttcatttctagcccagttgggttttgatttatataagtagtttagaccttctcttcataatcttgctctgagatggggaacagaacacacaagtatgaagtttctttcaggtgtaaataatgaaaaataaatgcctcataaatgatagtacaatgtaactatcaaagttttataattcattatgagttaaccattttaatgtttccaattaaacctcatagtgcaagttctttgtctaaagggtcttctgtgattattctgcaaggaagcatactaattaaaagcctaagttagaaagttcgtgctctgggcaggtgcagtggctctcac

SEQ ID NO: 351905 - DNA, 840 bp, Homo Sapiens
ctcgggccctgggggccgccgccatcgctctcccgggcttagaaggcccggctactgacgcgcagtgccagaccttacccctcacggtccttaagtctcggtcgccctcgcctcgcagcctgccacccgcgctcagctgcccgcctcctcagccagccatgctggagcatctgagctcgctgcccacgcagatggattacaagggccagaagctagctgaacagatgtttcagggaattattcttttttctgcaatagttggatttatctacgggtacgtggctgaacagttcgggtggactgtctatatagttatggccggatttgctttttcatgtttgctgacacttcctccatggcccatctatcgccggcatcctctcaagtggttacctgttcaagaatcaagcacagacgacaagaaaccaggggaaagaaaaattaagaggcatgctaaaaataattgaggttttcatgattcagcacctgcttttgtttcctgtgaagatgagctaaattgctttcataccccagataagagctaaaaccacctaatgctcttatggcacagctgtgtatagatttagttctctttatacttcatttctagcccagttgggttttgatttatataagtaagtttagactttctcctcataatcttgctctgagatgggggaccgaacacccaaggtatggaagtttccttccaggtggaaattaatgaaaaataaatggcctccataaatggatagtaccaatggtaactattcaaaggttttaataaattccattatggaagttaacccattttttaatggttttccccatttaaaaccc

SEQ ID NO: 351906 - DNA, 948 bp, Homo Sapiens
  misc_feature (65)..(193): n is a, c, g, or t
  misc_feature (195)..(223): n is a, c, g, or t
  misc_feature (863)..(899): n is a, c, g, or t
  misc_feature (913)..(913): n is a, c, g, or t
cagcctggccacacagtgaagcccgtgtcttacctaaaatccaaaattagctggttgctggtggnnnnnnnnnnnnnnnnnnnnnnnnnnnnnnnnnnnnnnnnnnnnnnnnnnnnnnnnnnnnnnnnnnnnnnnnnnnnnnnnnnnnnnnnnnnnnnnnnnnnnnnnnnnnnnnnnnnnnnnnnnnnnnnnncnnnnnnnnnnnnnnnnnnnnnnnnnnnnngtgaagggacaacgtgagcaccatgaaaactcctgctggctttgaccttaagattattagccagagtagccgccaaaggaaataagctgtgtccttttatatagttcgcaccatctgacactattttggcattctacttttccaatgatagcaaagggaaacgctgtttggaaggatgagggaaacgttggctttgggtctcactactgagtaggtctaaccaaaccaacccgactcacaaaacccaagctgccactaatacccacaaagtttcttaccaaacatgaaaaagcaaatccggccataactatatagacagtccacccgaactgttcagccacgtacccgtagataaatccaactattgcagaaaaaagaataattccctgaaacatctgttcagctagcttctggcccttgtaatccatctgcgtgggcagcgagctcagatgctccagcatggctggctgaggaggcgggcagctgagcgcgggtggcaggctgcgaggcgagggcgaccgagacttaaggaccgtgagggctaaggtctggcactgcgcgtcagtagccgggccttctaagcccgggagagcgatggcccgctctcgacgaattcgagctcggccgatttggcctgatnnnnnnnnnnnnnnnnnnnnnnnnnnnnnnnnnnnnncgccgccaccgcgntgatcccgagtcgccctatatgagtctatacatcc

SEQ ID NO: 351907 - DNA, 652 bp, Homo Sapiens
  misc_feature (495)..(495): n is a, c, g, or t
  misc_feature (561)..(561): n is a, c, g, or t
  misc_feature (566)..(566): n is a, c, g, or t
  misc_feature (620)..(620): n is a, c, g, or t
gcgtgcgggacacgggctgtaccggccctcggagattccgcttccggggccgccgcatcgctctcccgggcttagaaggcccgcatactgacgcgcagtgccagaccttacccctcacggtccttaagtctcggtcgccctcgcctcgcagcctgccacccgcgctcagctgcccgcctcctcagccagccatgctgaagcatctgagctcgctgcccacgcagatggattacaagggccagaagctagctgaacagatgtttcagggaattattcttttttctgcaatagttggatttatctacgggtacgtgggctgaacagttcgggtggactgtctatatagttatggccggatttcctttttcatgtttgctgacacttcctccatggcccatctatcgccggcatcctctcaagtggttacctgttccaagaatcaagcacagacgacaagaaaccagggggaaaggaaaaattaaagagggcatgctnaaaaataaatttggaggttttccatggatttcagccacctgcttttttgttttctgttgaggaagnagctnaaattggttttcataaccccaggattaaaggggctaaaaacccacctaattggntctttatgggcacaagttgttgtattagggtt

SEQ ID NO: 351908 - DNA, 706 bp, Homo Sapiens
  misc_feature (126)..(203): n is a, c, g, or t
accgcatccctaacccgaagctgagccagacccaacctgaagacgttactctttcccgggactctccctggctaaatgaagggaggatggttggccccagatcccggaagacagagtgaagggagnnnnnnnnnnnnnnnnnnnnnnnnnnnnnnnnnnnnnnnnnnnnnnnnnnnnnnnnnnnnnnnnnnnnnnnnnnnnnntgttcatcttccatgaagtcgacatttttgaagagtataggtgtcagatctttttcaagaacagccagaaaatgatcgaataccagatacctgtgtcattcaaagatgtggttgtgggcttcacccaagaggagtggcaccggctgagtcctgctcagagggccctgtaccgggatgtgatgctggaaacctatagcaacctcgtctcagtgggttatgaaggcaccaaaccagatgtgatcctcagactggagcaggaagaagcaccatggattggtgaggcagcatgcccgggctgccactgttgggccttgaaagtcctccgagagcttcagccacgttaatgactcttcaacctccatgcaaccccaccgcccatatctgagtgtttttctcggctctacttgattgcacctctgcccttatgtgcttggtccatctctctttctccagaatctttcccatgcaggtattcttacaaataaaagcttctatgattctca

SEQ ID NO: 351909 - DNA, 392 bp, Homo Sapiens
gccctgaagctcagcactccggggggtcttcacacgggcaggtcctggagggaaggaggcggccaccgcgcccacctcccatctgaaggcacagcaccgcagtggtggcctgtgccagaggagggggtgaaggatggaatgtcctcatggtgagtgctgtcagaggcaggcctgaacgagaaaacaggccgtggcaacggtcccgaggctgtgagtctaggcagcctgcctccgggacccccaaagccaggcggtgcaccacagcacacaccgtgggacctttgcttttcactcaggaaaagaaagaacatgtgagtgcttctgaaaacacagcaagaggacttgagcacaagctaaaggaaaaacaaccctatatagtttcttcgagtgag

SEQ ID NO: 351910 - DNA, 623 bp, Homo Sapiens
  misc_feature (42)..(42): n is a, c, g, or t
tgagctgcaggccttggtcaccccagactcctccctcctgtnacccttatcctcaccccagcacctttacgtctgccccaggctccatttccccctcttctgcctggttcaaaccaccctgactttcctgggtcttcgtgcaacagcctgctccggccgctgcctcactgcacctgcaaatccacttgcacccacacccaggccagggtttttaaacagaagcctcagcagatccctctctctggccagctccctgttgaaccaggaagcaggtccctgttgaacctcagcatgacccgcccccacccctgcatcccacttctgctctgggagcctctgggttcctgggcgcacctgctgcccttccctgtttgtcactgggtgacctcccgtccttgtgggcgctcccgggccctggtctcgggccttctgaggacttgctctcctggtagcggctgctgactgtgagcccagagagcaggcgtggctgttgaccttaggtcctcccagaacctggcggatcgcctggctcccaggcaggaggcgctgcatgacgcctccaacttccgccaatctagcccaaggatggcgttctaaataaaacgcgttctacagaaaaaaaa

SEQ ID NO: 351911 - DNA, 203 bp, Homo Sapiens
acgcacctggggagacgcacaggttggggcgggccaccggagccagcagctgccccaggggttcaactcaagtggcggagaagagttcctgtcacgggcacacttgggcctgctggtaagttttattcccctctagccaccctctcaaacattttccttgagagaggaaaatgttcaaaaggaaatactaagaacaattcgtt

SEQ ID NO: 351912 - DNA, 527 bp, Homo Sapiens
  misc_feature (65)..(161): n is a, c, g, or t
gttcaagcaattctcgtgctgcagcctcccgagtagctgggattacatgcgccaccacacctggnnnnnnnnnnnnnnnnnnnnnnnnnnnnnnnnnnnnnnnnnnnnnnnnnnnnnnnnnnnnnnnnnnnnnnnnnnnnnnnnnnnnnnnnnnnnnnnnnaagtgatctgcccgtctcagtggttgcaggcgtgagccaccacgcacagccacattagtgttttcttatgttcacttataattcaactttggagaacgttgccttcttccccagggataccactgtcaaagagacaaatatggagaggtgcagaaagaaagagatagctcataatcttccagaaacatctatcacttatgataatccatgttgcaaaggtgttccagaccgaccacttacaaacccaactaatcaatctacttttaaaataagtaaataaaaaaaggaggatgtatctttatcatgttcaccctcataacaaattatcttccctccttgaaatagcatactttaaaaaacagtggt

SEQ ID NO: 351913 - DNA, 1080 bp, Homo Sapiens
  misc_feature (774)..(774): n is a, c, g, or t
  misc_feature (912)..(912): n is a, c, g, or t
  misc_feature (927)..(929): n is a, c, g, or t
  misc_feature (931)..(931): n is a, c, g, or t
  misc_feature (943)..(943): n is a, c, g, or t
  misc_feature (951)..(951): n is a, c, g, or t
  misc_feature (975)..(976): n is a, c, g, or t
  misc_feature (978)..(978): n is a, c, g, or t
  misc_feature (991)..(991): n is a, c, g, or t
  misc_feature (1000)..(1000): n is a, c, g, or t
  misc_feature (1027)..(1027): n is a, c, g, or t
  misc_feature (1049)..(1051): n is a, c, g, or t
  misc_feature (1055)..(1055): n is a, c, g, or t
  misc_feature (1058)..(1058): n is a, c, g, or t
  misc_feature (1062)..(1062): n is a, c, g, or t
  misc_feature (1068)..(1068): n is a, c, g, or t
  misc_feature (1078)..(1078): n is a, c, g, or t
tcccgggatggcggaggcggcggaggccagggaggaagatgtcgtaatgagcgatccacagaccagcatggctgccactgctgctgtgagtcccagtgactacctgcagcctgccgcctccaccacccaggactcccagccatctcccttagccctgcttgctgcaacatgtagcaaaattggccctccagcagttgaagctgctgtgacacctcctgctcccccacagcccacaccgcggaaacttgtccctatcaaacctgcccctctccctctcagccccggcaagaatagctttggaatcttgtcctccaaaggaaatatacttcagattcaggggtcacaactgagcgcctcctatcctggagggcagctggtgttcgctatccagaatcccaccatgatcaacaaagggacccgatcaaatgccaatatccagtaccaggcggtccctcagattcaggcaagcaattcccaaaccatccaagtacagcccaatctcaccaaccagatccagatcatccctggcaccaaccaagccatcatcaccccctcaccgtccagtcacaagcctgtccccatcaagccagcccccatccagaagtcgagtacgaccaccacccccgtgcagagcggggccaatgtggtgaagttgacaggtgggggcggcaatgtgacgctcactctgcccgtcaacaaactcgtgaacgccagtaacaccggggcccctactcagctcctcactgaaaaccccccaaccccactgtctaagantaacaagaaagcaaggaagaagagccttcctgcctcccagccccctgtggctgtggctgagcaggtggagacggtgctgatcgagaccaccgcggacaacatcatccaggcaggaaataacctgctcattgttcaaancctggtgggggccannnanatgtggtccagnaggtccangtggtgcccccaaaggcagagcannanaggtggtaaaatncccaaaagntctgcgggtggtacaggcggatctgcnacctccccctgtacccagagannnccanaantttnaatcangcagtgagcnga

SEQ ID NO: 351914 - DNA, 451 bp, Homo Sapiens
ccccgactagcccgacagtgtggttctgctctaaaaacgtgagggggaaactgaaatatgtcaaaacaacaactgaggaactgcggctgtgctgcctggtgcatgagcagacgtacaggggcgcctgccggctgtccccaagggcacttgttctcctcaaggagttctctgggagggtgcggccgtgcagggagctagctcgatgcctggttctgtactggatgcttggggatcactggtggctaggaggggctctcgccagttttggtttggtgtgaaaagcaaaaaggtgctcccaggctgggcagccactgggggtcttgctgaaaaggtggatctgggtggactgtgcctccttctgaaggcaagtgcaggcagttccagttccacggaaacagaaaccagttgagagaggccgtttccaagttttcccaggcccacggttcctgca

SEQ ID NO: 351915 - DNA, 501 bp, Homo Sapiens
  misc_feature (30)..(30): n is a, c, g, or t
  misc_feature (79)..(79): n is a, c, g, or t
  misc_feature (234)..(295): n is a, c, g, or t
  misc_feature (447)..(447): n is a, c, g, or t
  misc_feature (490)..(490): n is a, c, g, or t
ctaatttaaaacatttatgagtaataaaanccaagagtagagctttggaaaggctgttactaggaaccaaaatatagtnctcaagagaataaggctgatgggagttgtccactcttccctctcaaagcagttttgcaaacgaggtacagtctaaaatattggatggcatttggcggaaatattttcagtagaagtttttaaagtttaaaattacaaaacttaatttaattcaannnnnnnnnnnnnnnnnnnnnnnnnnnnnnnnnnnnnnnnnnnnnnnnnnnnnnnnnnnnnnctacactggcttggtggccagaagagaaggcacaaaattatccaccagtttgcaaataatgcatttttctgctccagtgctcaaacagcctttatttaactcagcaccacattttctaaggtatggcacaaaactgtttgtcatgaagctgnaaatgccaaaaattttaaatgctaaagaaaatgtcaatcaagnatttcccatct

SEQ ID NO: 351916 - DNA, 495 bp, Homo Sapiens
  misc_feature (14)..(14): n is a, c, g, or t
  misc_feature (413)..(440): n is a, c, g, or t
cttttggttggggncctttggagaccaatacaccttctattccttcatttggttacacctttccttgtgacatttagcgagtttcaaacttacttccatatgaggctaagaaacctcaaatttcaggaattgggaaaaataaaattagcacttgcagaagtagcagcagatgggaaaatgccttgattgacattttctttcagcatttaaaatttttggcattttacagcttcatgacaaacagttttgtgcccataccttagaaaatgtggtgctgagttaaataaaggctgtttgagcactggagcagaaaaatgcattatttgcaaactggtggataattttgtgccttctcttctggccaccaagccagtgtagaaacagcaaaaatgtcataaaaattcttatatttnnnnnnnnnnnnnnnnnnnnnnnnnnnnttgaattaaattaagttttgtaattttaaactttaaaaacttctactgaaaatat

SEQ ID NO: 351917 - DNA, 708 bp, Homo Sapiens
gttggatctcagtttccctcactcaggaactctgtttctgaagtcttcaagttaagtttgagtttatgactgagtggcctgtactgtcagacgtgaatgggcctgacgggcaaatccatccctctctccctcacagttccaggagcggcttccctcgtctccccttactccacagggagcctcccttgccaggaccagggctgcgacggccatgctggggcaggtgagtgctctgttagctgctcccagtgctgtccccaggctgcagttctggtccctggttgtcaggtaggaagggtgcacttgaagcaggtgctcatctcggttccttaacgtttatagtctgacccctcacttaggctttcctctgccaccccggtccagggaagaggctcgctcccgcccatggtcatcactggtctgtctgctctgttgtctgttctttccctgactccctcccaccgaaggcctgatggctactcacccctctgggatggctatgggagaggaggagtgatggggaccgccaccttttctgcaggaaatgtgcccagcagctcttggtcaaagcactgttgctataagctatctctgggatgcctctaggcccccttccctctacacacctctgggaaaagattacactgtattaactctcgaggagtttcctcaccaataaacagacaacctcaactgccagtgccctgc

SEQ ID NO: 351918 - DNA, 1284 bp, Homo Sapiens
  misc_feature (1219)..(1219): n is a, c, g, or t
  misc_feature (1234)..(1234): n is a, c, g, or t
  misc_feature (1246)..(1246): n is a, c, g, or t
atcaggccaaatcggccgagctcgaattcgtcgagagcggactatggaggagataggcatcttggtggagaaggctcaggatgagatcccagcactgtccgtgtcccggccccagaccggcctgtccttcctgggccctgagcctgaggacctggaggacctgtacagccgctacaagaagctgcagcaagagctggagttcctggaggtgcaggaggaatacatcaaagatgagcaaaagaacctgaaaaaggaatttctccatgcccaggaggaggtgaagcgaatccaaagcatcccgctggtcatcggacaatttctggaggctgtggatcagaatacagccatcgtgggctctaccacaggctccaactattatgtgcgcatcctgagcaccatcgatcgggagctgctcaagcccaacgcctcagtggccctccacaagcacagcaatgcactggtggacgtgctgccccccgaagccgacagcagcatcatgatgctcacctcagaccagaagccagatgtgatgtacgcggacatcggaggcatggacatccagaagcaggaggtgcgggaggccgtggagctcccgctcacgcatttcgagctctacaagcagatcggcatcgatcccccccgaggcgtcctcatgtatggcccacctggctgtgggaagaccatgttggcaaaggcggtggcacatcacacaacagctgcattcatccgggtcgtgggctcggagtttgtacagaagtatctgggtgagggccccgcatggtccgggatgtgttccgcctggccaaggagaatgcacctgccatcatcttcatagacgagattgatgccatcgccaccaagagattcgatgctcagacagggggtaagtgatgctgaaacaaggcccggggtcttggacaggcttgtcgcatgggatgcctgggactgactgtgctgtgcactctcagccgacagggaggttcagaggatcctgctggagctgctgaatcagatggatggatttgatcagaatgtcaatgtcaaggtttggggtttgggatggacaaggggaggtgtggtgtaggaactggggaaagttgggggctggcacctaaggggtggttatcgtgacaggaaggaggtaggagtgcagagatctgagctggcctgccccccaatgtcaggtaatcgtggccacaaacagagcatacacccttgnatccggcccttgctncggcgcaggacnggctggacccgtaaaaattgaaattttccacttccttg

SEQ ID NO: 351919 - DNA, 567 bp, Homo Sapiens
  misc_feature (143)..(143): n is a, c, g, or t
  misc_feature (159)..(159): n is a, c, g, or t
  misc_feature (161)..(161): n is a, c, g, or t
  misc_feature (548)..(548): n is a, c, g, or t
tcctgctactggattgacaatcccccgatgaccgcggaaaatcaaatctgccttcctggtcttgaggtgagaatcatgatcctcctgtcgggccttcgggggcagcaacgcccaccaattgcattcctgtgcttgtggggggnccactgaggcgttggncntgaacacctcccgatcgatggtgctcaggatgcgcacataatagttggagcctgtggtagagaccccgatgtctgtattctgatccacagcctccagaaattgtccgatgaccagcgggatgctttggagtcgcttcacctcctcctgggcatggagaaattccattttcaggttcttttgctcatctttgatgtattcctcctgcacctccaggaactccagctcttgctgcagcttcttgtagcggctgtacaggtcctccaggtcctcaggctcagggcccaggaaggacaggccggtctggggccgggacacggacagtgctgggatctcatcctgagccttctccaccaagatgcctatctcctccatagtgaccaacccgncctctgtgtggcctgggac

SEQ ID NO: 351920 - DNA, 1764 bp, Homo Sapiens
tgcgggtacggacagcgcatgagcttatgttgagggcggagcccagaccagcccttcgtcctatcctgcccttccagcacctctcagccgtaacttaaactacacttcccagaagcctcctcagccaggacttccgttgtcgtcagcggaagcggtgacagatcatcccaggccacacagaggccggcttggtcactatggaggagataggcatcttggtggagaaggctcaggatgagatcccagcactgtccgtgtcccggccccagaccggcctgtccttcctgggccctgagcctgaggacctggaggacctgtacagccgctacaagaagctgcagcaagagctggagttcctggaggtgcaggaggaatacatcaaagatgagcaaaagaacctgaaaaaggaatttctccatgcccaggaggaggtgaagcgaatccaaagcatcccgctggtcatcggacaatttctggaggctgtggatcagaatacagccatcgtgggctctaccacaggctccaactattatgtgcgcatcctgagcaccatcgatcgggagctgctcaagcccaacgcctcagtggccctccacaagcacagcaatgcactggtggacgtgctgccccccgaagccgacagcagcatcatgatgctcacctcagaccagaagccagatgtgatgtacgcggacatcggaggcatggacatccagaagcaggaggtgcgggaggccgtggagctcccgctcacgcatttcgagctctacaagcagatcggcatcgatcccccccgaggcgtcctcatgtatggcccacctggctgtgggaagaccatgttggcaaaggcggtggcacatcacacaacagctgcattcatccgggtcgtgggctcggagtttgtacagaagtatctgggtgagggcccccgcatggtccgggatgtgttccgcctggccaaggagaatgcacctgccatcatcttcatagacgagattgatgccatcgccaccaagagattcgatgctcagacaggggccgacagggaggttcagaggatcctgctggagctgctgaatcagatggatggatttgatcagaatgtcaatgtcaaggtaatcatggccacaaacagagcagacaccctggatccggccctgctacggccaggacggctggaccgtaaaattgaatttccacttcctgacagccgccacaagaggttcagaggatcctgctggaactgctgaatcagatggatggatttgatcagaatgtcaatgtcaaggtaatcatggccacaaacagagcagacaccctggatccggccctgctacggccaggacggctggaccgtaaaattgaatttccacttcctgaccgccgccagaagagattgattttctccactatcactagcaagatgaacctctctgaggaggttgacttggaagactatgtggcccggccagataagatttcaggagctgatattaactccatctgtcaggagagtggaatgttggctgtccgtgaaaaccgctacattgtcctggccaaggacttcgagaaagcatacaagactgtcatcaagaaggacgagcaggagcatgagttttacaagtgacccttcccttccctccaccacaccactcaggggctggggcttctctcgcacccccagcacctctgtcccaaaacctcattcccttttttctttacccaggattggtttcttcaataaatagataagatcgaatccat

SEQ ID NO: 351921 - DNA, 1033 bp, Homo Sapiens
  misc_feature (120)..(120): n is a, c, g, or t
  misc_feature (137)..(137): n is a, c, g, or t
gggcccgggatttcccggggggggtcgggttccggttttgggggcccatggatttaaccttgggccaattggccatttctggatccaaattcccattccatggtgatttcaggcaggttnccaggcagggattcctnctgaaccttccccttgtcgggccccctgtctgaagcatcggaattttcttggtggcggatgggcatcaaatctccgtctatgaaagatgatggcagggtgcattctccctgggccaggccggaacacatcccggaccatggcgggggccctcacccagatacttctgtacaaactccgagcccacgacccggatgaatgcagctgttgtgtgatgtgccaccgcctttgccaacatggtcttcccacagccaggtgggccatacatgaggacgcctcgggggggatcgatgccgatctgcttgtagagcccgaaatgcgtgagcgggagctccacagcctcccgcacctcctgcttctggatgtccatgcctccgatgtccgcgtacatcacatctggcttctggtctgaggtgagcatcatgatgctgctgtcggcttcggggggcagcacgtccaccagtgcattgctgtgcttgtggagggccactgaggcgttgggcttgagcagctcccgatcgatggtgctcaggatgcgcacataatagttggagcctgtggtagagcccacgatggctgtattctgatccacagcctccagaaattgtccgatgaccagcgggatgctttggattcgcttcacctcctcctgggcatggagaaattcctttttcaggttcttttgctcatctttgatgtattcctcctgcacctccaggaactccagctcttgctgcagcttgtagcggctgtacaggtcctccaggtcctcaggctcagggcccaggaaggacaggccggtctggggccgggacacggacagtgctgggatctcatcctgagccttctccaccaagatgcctatctcctccatagcctcgtgccgaattcgccaccc

SEQ ID NO: 351922 - DNA, 1169 bp, Homo Sapiens
attccttccatatcaattcacatggcagccatgcgctggcgatggtggcagcggctgttaccttggaggttgctgcaggcccgtggctttccacaaaattctgcacccagcctgggcctaggagcgaggacttattcccagggcgactgctcgtattcgcgcacggcgctgtatgatctgctcggcgtcccctccacagccacgcaggcccaaatcaaggcggcttactaccgtcagtgctttctctaccacccggaccgcaactccgggagcgcggaggccgccgagcgcttcacgcgcatctcccaggcctacgtggtgctgggcagtgccaccctccgtcgcaagtatgatcgcggcctactcagcgacgaggacctgcgcggacctggcgtccggccctccaggacgcccgcacccgaccccggctcgccgcgtaccccgccgcccacctctcggacccacgacggttctcgggcctcccccggcgccaaccgcacgatgttcaactttgacgccttctaccaggcccactacggggaacaactggagcgggaacggcgcctgagggcccggcgggaggcccttcgcaaacggcaggagtatcggtccatgaaaggcctccgctgggaggatacccgagacacggctgccattttcctcatcttttcaatcttcatcatcatcggcttttatatttaatcggagagagaagggaaggggagtgtccccagccaaccccccagaaacggcctttttttcctgcctctgaacccttggccattgatagtctacctttgctgggatccgaaggaactgtactccccctgccctccccgacccgcccagcttagccgatgacctgcacatcgctccactgtggtccagaaaaggaggcctttcgatgtctgagaaagaggccccacgctgtagagtcccgaaagcccaggagtgaagggggttcctggagtctctagggtgcttcttccagagtctgtcttcttgcttccagatgtggtcaacttctggaacactcgctgtagctttattgtttagccccaagcaagatttatctcctcctgccccgcatgtgtatggtgggcctctgtaaccttgaaatgtgcaatgtgaccaattgttgactaccaaaagaaaaggtctggggttgt

SEQ ID NO: 351923 - DNA, 828 bp, Homo Sapiens
cccatggaatccccccaggaatcccaaataaaaataaataaaaactgaaacgtttcacagttcagaatcggaagaattacgactaaagctccaaatatgaggttgccttagccaaaggaagcagacccacaggaacagttcaaggtttatatcctgctcaagtcacctctttggtctttcaggatctaagtggagattgtcccaactgttgctgtagttgtctcacccgaccccaaagcaagggaaatagagggaaaggttttaagggctatatgtctgctgtatccactcccagctatcttctttttactcctttctcaccatctaagatgtcttatttaaatagctccaaggaagtgacctaaaccttgatgagcaaaatattactcagtttttattttccattcaacaaaagcagtgggaaagcttgccatctggattctaagaaattgtgcaatataaaaaaatgttatatcctcgagaaatatcttgctgagtcaccctaggaaataactaccttttatttatctggtagcctaatgtttccacacatttatcctgaatattgcaagtgagggactgaatcatttttaattgggagttatctttactcaggcatgttctcttggagtctttttgaagtgcctgacacgtgtaacaggatgacatatatatcattcctacaatatgaacaactgttacataaaaaattatcaaggagatgatttcaggaaacaagtgaactttctgcaaagacttataaaaattttaggtcaaattaacttcaggctttaaatgcactaatctacctaagagaaaacaccaaag

SEQ ID NO: 351924 - DNA, 2290 bp, Homo Sapiens
  misc_feature (2236)..(2236): n is a, c, g, or t
  misc_feature (2268)..(2268): n is a, c, g, or t
agagggagcgagagagagagcaagacagaccgagaaggaaagcactcccagagatgaaattttaggaaagcaaaatgatcgacctttttaaggctgagtgggtttcttcagtttgtgtgcaagtttcaagaaatggaaggactgaccaggttccacaagatgaatggacagggtacaccccacgaggtaaagatgatgaaattccatgccgaagaatgcggagtggcagttatatcaaggccatgggggatgaagacagtggagactcagacacgagtcctaagccttctccaaaagttgctgcgcggagagaaagctatctcaaggctactcagccatcccttacagaacttcaccacactcaaaatctccaatggaacactcacccaaactccagatccggagtcatagttacctgagggcagtgagtgaagtctccatcaaccggagcctggacagcctggaccctgcaggcttgctcacatcaccaaagttccgctccaggaatgagagctacatgcgagccatgagcaccatcagccaagtgagcgagatggaagtgaacgggcagttcgagtccgtgtgcgagtccgtgttcagcgagctggagtcgcaggccgtggaagcgctggacctgcccatgcccggctgcttccgcatgcggagccacagctatgtgcgggccattgagaaaggctgctcccaggacgacgagtgcgtgtccctgaggtcgtcctcgccgccgcgcaccaccaccaccgttaggaccatccagagcagcacgggtgtcataaaactgagttctgcagttgaagtgtcatcttgcattacaacatataagaagacaccacctccagtcccacccagaactaccacgaaacctttcatttctatcacagcccagagtagcacagagtcagcccaggatgcctacatggacggacagggccagcgaggagatattatcagccagtctggactcagcaactccaccgagagcctggacagtatgaaggctctgacagccgccatcgaagctgcaaacgcccagatccatggccctgccagtcaacacatgggcaataacactgccaccgtcaccaccacgactaccatagccaccgtcaccacggaggacaggaagaaggaccactttaagaaaaatcgatgcctgtctatcgggatacaggtggatgatgctgaagaacctgacaaaacaggggagaataaagcacccagtaagttccagtccgtgggagtgcaagtagaagaagagaagtgcttccgcaggttcactcgatccaacagtgtgacgacagcagtacaggccgacctggacttccatgataatctggaaaattctctggaatctatagaggacaattcgtgtcctggccccatggccagacagttctcccgcgatgccagcacctccacagtcagcattcagggctcaggaaaccattaccatgcctgtgccgccgatgatgactttgacacggattttgacccctctattctgcctcctccggacccctggattgactctatcactgaagaccctctggaggccgtgcaaaggtcagtgtgccaccgggatggccactggttcctgaagcttctccaggcagagcgagaccgcatggaggggtggtgtcaacagatggagcgggaagaacgggaaaacaacctgcccgaagacattctaggaaaaatccgaaccgcagtgggcagtgcccaacttctcatggcccagaaattctaccagttcagagaactgtgtgaagaaaacctgaatcctaatgctcatccaagacccacctcccaggatttggcggggttttgggacatgctgcagttgtccatagaaaatattagtatgaaatttgatgaacttcatcagttaaaggccaataattggaaacagatggatcctcttgacaagaaggtagaacaatgtagattttgtatggttcatttaaaaacctgcacaaacactggacagtctaaataggcttctgcattcagtcctgctgtttacaatgtgaaatggagctgatatcatattaatttcattgtaatgacaatgtttacatagtaatcatttgggatattatctgtaatatgtttcaggcatatttttaaagaaaaacctgtctttgtgaattggaaaatgggaatgtggctttttttgttaattaaactttaagttaaaccattttagtcactggaaggnactgcctccattttgctttttaaacttaaatnaatgacatcttcagtgcatgaa

SEQ ID NO: 351925 - DNA, 826 bp, Homo Sapiens
  misc_feature (171)..(244): n is a, c, g, or t
  misc_feature (766)..(778): n is a, c, g, or t
ggtccccccccaaagggttggtaaaaaattaaaaccccggttttcccaattttctttccataagcatttcccctgggattagggttttcggaagtaattttagagacttttttaaagttcacgggagggatgggcatagttatgtgcaaatactacgccactttctatgannnnnnnnnnnnnnnnnnnnnnnnnnnnnnnnnnnnnnnnnnnnnnnnnnnnnnnnnnnnnnnnnnnnnnnnnngaactgttttgtttcttccagcacggctttgaccgacagtgtgttgggattcgctgacgtccatgagaaagcttggcagcatgctgagaccaattttcccagggccagaattctcctgtgtgagctaaaatacagtggctcggtccaacaaaacagagcctggagccaggaattatggcgaacctgctccctcccgtcctcccttggcgcacagatccctggcgccgccgctcttgaggtcgcctctcgcgtgtcgacctcatcgtcggaacggcgcttcctgaagctttatataagcacggctctgaatccgctcgtcgggattaaatcctgcgctggcgcgctcctgccagtctctggcctccatttgctcttcctgaggctccctccagagacctttcccttagcctcagtgcaatgccttccgggcgtcctcagaccagacacaggccaaagccactacagaatccggaagccccggttgggatctgaattctcccggggactgtggcgtagcggttnnnnnnnnnnnnngagtgagagggacctgagcagagtggaggaggagggagaggaaaacag

SEQ ID NO: 351926 - DNA, 787 bp, Homo Sapiens
  misc_feature (568)..(568): n is a, c, g, or t
  misc_feature (571)..(571): n is a, c, g, or t
ggactaacaaaagatgtctatgcaggaaaagcaaattttagtttcaggattattagtaataagaacctccaatttatccccactggaaaatatgcaacatgaaaagtaaaaggaaattgttttagaaaaattccatataacacaagattttcacatagtctccagtggttaaaaagaaaaaagaaacaaggaacatgtttaatatcttaaaaaacagcacttaaacctgcaaaaatgtgaattatttgataaatacttaaaaaacatgttaatcatgtttagatttgaaaatgtggcatcaatgtgaagcagtgcattcaaccctctgtatcaggagacagcggtgctgcctgcccaagactgcagagagcagagacacagctgcatctctcagcactctccccggcccccaagaagagattccaatcacagcatattcatttaaaaagcattcctaataatagtaattagactcatcaaaatacaaactttttttcccctttaaactatactctaaatttggccaaactaagtacttgatataaaaatccctggcaaagaagccagnggnctgcgggactgtgtggcaaacccagacattctctcgccttagcagataagtcaaaacaaggacaatctaagaggccattccctcatccaattagcaattgaagggttagaactgaaatagtcactgttagagcacaggaaatagacacttacatactcaaacacaccccacccagcgctcgcagacgctcacagctgacaacggctgaatttcgcc

SEQ ID NO: 351927 - DNA, 1452 bp, Homo Sapiens
ggtgtcatgtgattctctgagggagcagctgcgtgagtggagatgctttcagtggtggagaatggactggacccccaggctgccatcccggtcatcaagaagaagctggtgggatccgtgaaggccttgcagaagcagtacgtgtccctggacacggtggtcactagtgaagacggagatgccaacaccatgtgcagcgccctggaggccgtatttatccatggcctgcacgccaagcacatccgagctgaggccggaggaaaaaggaagaaaagtgcccaccagaagcctctgccccagcctgtcttctggcccctcctgaaagctgtcacccacaaacacatcatctcagagttggagcacctgacgtttgtcaacacggatgtgggccgctgccgggcatggctgcggctggccctgaacgatggcctgatggagtgctacctgaagctgctgctgcaggagcaggcccgcttgcatgagtactaccagcccaccgccctgctccgggatgctgaggagggcgagttcctccttagcttcctgcagggcctcacgtccttgtccttcgaactctcctacaagtctgccatcttaaatgagtggacgctcaccccattggccctgtctgggctttgccccctttctgagctggaccctctctctacctctggtgcagaactacagcggaaggaatctctggattccatttcccattcttcaggctctgaagacatcgaagtccatcactcgggccataagatacggaggaaccagaagctgactgcctcctccctcagcctggacacggccagttcatcccagctgtcctgcagcctaaactctgatagctgcttactccaagagaatggctccaagagtccagaccattgcgaggagcccatgtcctgtgactcagacctgggcacagcaaatgctgaggactcagaccggtctctgcaagaggtattgttgggaattcagcaaagcccaggtaaactctgtgccaaccaacggactgagccaagaaacagagatccccacaccacaggcctaactctccctccatggcctcaacaacagcacatacctgcactgtgaggcacctgcagagccccttcctgcccaggcagcctctggaactcaagatggtgtccacgtgcaggagccgcgtccccaggcgcccagccccctggacttacagcagcctgtagagagcacctcaggccagcagccttctagtactgtcagcgagacagccagagaagtgggccaagggaatggcctgcagaaggcccaggctcatgacggagctggtctgaagctggtagtttcctcacccaccagtccgaaaaacaagagctggatctcagaggatgacttctaccggccttcccgggagcaaccccctggagagtgcttcagaccacccaatagcttcttacaaggggg

SEQ ID NO: 351928 - DNA, 1056 bp, Homo Sapiens
ggattctcggaatcgaagtccatcactcgggccataagatacggaggaaccagaagccgactgcctcctccctcagcctggacacggccagttcatcccagctgtcctgcagcctaaactctgatagctgcttactccaagagaatggctccaagagtccagaccattgcgaggagcccatgtcctatgactcagacctgggcacagcaaatgctgaggactcagaccagtctctgcaagaaaaaacaagagctggatctcagaggatgacttctaccggccttcccgggagcaacccctgaagagtgcttcagaccacccaatagcttcttacagggggactccagagtcaaggcctggtctccacaggcatttttctcaagaaccaagaaaaaactgctccctgggggcgttagaccaagcgtgtgtaccttccccaggaagaaggcaagcccaggcagccccatcccaggggcataagagcttccaggtggtacaccggagacagatgggactgtccaacccattccagggtctcatgaagctgggcaccgtggagcgggcagggggcaatgggcatctggaaagagctctgtctgcgagctctccccactggagttccgcctctacctgagcaacgaggagcacacctgtgtggagaactgctccctgcttcgctgtgagtctgtggggccagcccacagtgacgggcgctttgagctggtcttctctggcaagaagctggccctgcgcgcctcctcccaggacgaagctgaggactggctggacctggtgcgggaggccctgcaaaagtccggcctccaccagaggatgattggttgaactgcagtactccgaaccgcctggagaaccccccgaggggccccaggctgcctctctccctcagaactgctctcggaacccgcggcccttccggggaccacgaccttgactggccgtccccccaggttccaagctagatgcttccaaggagccccggtggacctggtacttggacggaaccgggatgccccataaatttccctgcccttggag

SEQ ID NO: 351929 - DNA, 802 bp, Homo Sapiens
aaactaaattattgaaaaattaaaaaatgtcattgtttcctgtttgttaatattagggttgtaaggtgtcgttttgaggtatcgactgtgattccttcccccaccctccattctccagcggttggccggtgttagaactcgctctctttgagtgactggctacaagggcctgagaggtggccagccagggttggagctggaggggatggagccccacctgaggtgccgtgtcacacgggttagagggtcactgggaaacaccgggcggtggcttctgtgatttattttcttgatggtaacttctcagagcagggcgattgggacatcaccagccagagcacaggaagccaccctgcctgctggggaggagggacccacacaagccccctcggcagtttgtccccccagcttcggtatgccttcagggaaaggtcacagctggggaggaagcggggggacgcctgtcacccctggcaggtggtgagttcaggtgggggctccctgctgcccccaggcctgggagcttgaagccctcccggcatctggcatccgagcctcccgccctccagggtgcgcttccctctcttgccgcagcatacacgagggcaggcagtggccttgtcactgtatcttgcatcagagacaaaggaggacccgctttagccctgctgcgggaaatgggggagggcccagggccagcgcattgtgcactggtttactttaaaatgtacagattcttctcgttaaattcttgatagattttttattattattaaaagtcagtttataatacaaagaaaaa

SEQ ID NO: 351930 - DNA, 830 bp, Homo Sapiens
  misc_feature (680)..(680): n is a, c, g, or t
  misc_feature (751)..(751): n is a, c, g, or t
  misc_feature (808)..(808): n is a, c, g, or t
cctcgacaaggcccagcctcctgcctcccgaaggcctgcacaggcccagcctctgcctcacagcggactctccatgcccagctagctgttgcctcactgcggcctcccgagtccaaagctcctgcctctcggccgcttcggcaggcccagctcccacctgccagtggcctcttcaggcccatggggctcgttcctcacaacggcctttccaggcccagtttttcccttccggcggcctctccgggcccagaacctcctcaagtcggcctctccagagccacttgcaccctccgggcgtcctctccgggcccagctcttcttcctggttgcgtctccaggcccgactcctgcctctcaacaacctctttggactcagtgcctacccatctcctggcggcattggtcggcccacagcttcctcaagccaagctccccaggcccaggtcaggcctcacggtggcctctccaggatgagctcctgccctccgatggcatctccaggccccaaatggtctccggtcggtgggctcctccacgccaaggttgggcctcccggcgaccgcgcaggccaagttgtcctgaagtcgggctctcccggctgcatctccaggccggactctggcccgactccaggtcccaacaacgtctttggactcagctcctgcccagctcccagcggnccctggtaggcccacaacttccctaagccaagctccccaggcccagctcaggccttcgcggtggcctctcncagggtcagcttcctgggcccttccgatgaacatcttgcagggccccaaatggcttncggtcggtggggttcttttagg

SEQ ID NO: 351931 - DNA, 342 bp, Homo Sapiens
  misc_feature (22)..(22): n is a, c, g, or t
  misc_feature (103)..(103): n is a, c, g, or t
  misc_feature (112)..(112): n is a, c, g, or t
gtaaagatgactctgaagaatngcatgggatggatcctttcgaatgcacttgagcagcggtctccaaccacagggccacagagctggagctggatctaccatnaaagacctntgaatccaggaagagagactgactgagcaacatgttattcaggagatggggtctcaccctgtcacccaagcttgactacagtagtgctatcacagtcactgcagcttgaactcctgggctaaggatcctcctagctgagctcctgagtagctaggactgttctccatctgttgtccaatgctgtagtgtagtagtgctatcacagctgactgcagcctcaagcttccagg

SEQ ID NO: 351932 - DNA, 588 bp, Homo Sapiens
  misc_feature (429)..(485): n is a, c, g, or t
gggtggcaggagctaggtgtgtagaagctgctgaaaggttgggagcttggcttggggggtccacagtgaggtagatgctgggcgtgaagaatctgctgtgaggcagactttgggactgtagaggctgacgggaggcagaggctgggcctggaggggccaccaagatgcatgagctgggcctggtgaggtcgacttgagaaagttcagggcctggagagaaggctgggaggcaggagctgggtctaaagaggccattgtaacgatggagctgtgcctgtggaggctgttgtgaggcagtagcctcatctgcggaggctgccgtgacgtagggtatgggcctaaataggccattgtgagtcatgagcttggtctgtggaggcacgactggagaaagttctgggcctggagaggctgccgggaggtaggagnnnnnnnnnnnnnnnnnnnnnnnnnnnnnnnnnnnnnnnnnnnnnnnnnnnnnnnnncgtttcgctgtcacccctctggagtccacgtataggaaaattccaaatattagttgggcatagtggcaagcgcctgtagtctcagccacgtgggaggttgaga

SEQ ID NO: 351933 - DNA, 1429 bp, Homo Sapiens
tgggcgatatttttcattgtgccaaaaagttgccatgaccgtcattaaacctgtttaacaccaaataataagggaaaataaaataaaaaattcgggcttggcgcagaaactcactccaaataaattacctaccaaaatatttacataatggtggaaatattccaaaattcaatattttgggatttatacacaaaagataaacaaattagaggccaagaggctgccggaagggaaaaacggggcctggaaaggccgacgtgaggaatgagctgggcctaaagaggccactggcaggcaggagctggacctgccgaagtggccgaaagccaggagctttggactggggagaccgcagtgaggcgagagctagctgggcgtggagagtccgctgtgaggccgaggccgaggccgggcccgtgcaggccttcgagaggcaggaggccgggcctgcaaaggccgactggagatcaagttctgcgcctgaagaggctgccaaaagtcaaaagcggggcctgggaaggccgccgagagccatgagctgggctgggccgaaagaggccactgggaggcaggaggagctgggcctggagaggctgactcgaggaagttttgcacctggagaggccgccgagaggacggagctgggcccggggaggccgacttgctgctcttccaggcccacttccaggccgacttgaggacgacttgggcctgcagaggccgccgggaggccggagctgggcctggagaggccgacttcgggacgatttgggcctgcagaggccaccgggaggcccaagctgggcctagagaagcccaccgaccggaggccgtttggggcctgcagatgccatcggagggcaggagctgagcctggagaggccaccgtgaggcctgagctgggcctggggagcttggcttagggaagttgtgggcctaccagggcctctgggagctgggcaggagctgagtccaaagacgttgttgggacctggagtcgggccagagtccgccctggagacgcagccgggaggaagagctgggcccggagaggacgccgggaggctgcaagtgggtctgagaggccaacttgaggaggcccggcctctgcctcccgcatggcccagctgttcctcccggctgcatctcccgcctcccagcaaacaagctcccttggctcagctcccgccggcctttgtagaccccgaagtttcagcaaccaagctcttcagacccacatcccttctcccagtgactgaacagtcccagctccagctggagaagggtgtgtgcagaccccgctgttgccccccaggggagtctccaggcccagctctcgccccaccgcgaccggacgcgtgggtcgacgatatcccgagattccgaccgtaccagcctgctttatacgcgggttttatatgtcactatg

SEQ ID NO: 351934 - DNA, 2185 bp, Homo Sapiens
  misc_feature (1865)..(2034): n is a, c, g, or t
aatgggggaaatattccaaaattccatattttgggatttatacacaaaagataaacaaattaaaagccaagaggctgccaaaagggaaaaacggggcctggaaaggccgttgtcaggaatgagccccatgggcctgaagaggccactggcaggcgggagctgggcctgccgaagcggccgagaggcaggagctttggactcgggaggccgcagtgaggcgacagctagctgggcgtggagagtccgctgtgaggcagaggctgggcctgtgcaggccttcgggaggcaggaggctgggccttgtcgaggcctgcagaggccaccgaaagtcaaaagcggggcttgggaaggccgccgggaggcatgagctgggctgggccgaaagaggccactgggaggcaggaggagctgggcctggagaggctgccgaaaggcaggagcttcgcctgaggatgccacagtgagacaccatctgggtctggagggtccactgtgaggcagaggctgacctgtagagtccgacagtagacagaagttgggcaaaaggctgatttgaggaagttttgggcttcaagagtcagccacgaggcaggcactaggcctggaaatggcccgacagtcatgagttgggcctaaatgggccactgtgagggaggagctatgcctgttgaggctgctggcaggcaggcagaaatttggcctggggcagctgccatgaggcaagagctgggcctggaaaaagcccctgggaggcaagagcagggcctgcagaggctgttctcaagtcaaagctgggcctgttcatgccactgggaagcagaaggtgggcctggagagtttgacttgaggaagttttgggcctacattggccgccatgagctggacaggaactgggccaaaaaaggatgttgtgaggcagcagttgtgcctgtagacccagccaagaggaagaggtgggcctggagaagcccccatgacgtagaggttgggcctgtagacgctgacaggaggcaggagctgggcctggaaaggtcaacttgaggagattttgggccttcataggccaccaggaggcagcagttgggactagagagtctgacttgagtaagttttgggcccggagatgacgtcctgggacaggagttgggcctggagaggccaccgtgaggcataagctggatgtagagaggccagtgtgaggcaagacctgggcctgtctaggctgctgggagacaggcaggaatctggccagggaaggttgccatgagacaaaagttgggcctggaaaggcccttgtgaagcatgagcttggcctaaagaggccactgggtggcaggagctgggtgtgtagaagctgctgaaaggttgggagcttggcttggggggtccacagtgaggcagatgctgggcgtgaagaatctgctgtgaggcagatgttgggactgtagaggccgacgggaggcagaggctgggcctggaggggccaccaagatgcaggagctgggcctggagaggctgcaaagaagcatgagctgggcctggtgaggtcgacttgagaaagttcagggcctggagagaaggctgggaggcaggagctgggtctaaagaggccattgtaacgatggagctgtgcctgtggaggctgttgtggggcagtaggctcatctgcggagactgccgtgacgtagggtatgggcctaaataggccattgtgagtcatgagcttggtctgtagaggctgactggagaaagttctgggcctggagaggctgccgggaggtaggagcataatgtacaatcagtgggcgtgttaagcttgtgtccctgcaacaggatggtcccacgtttcgctgtcagccgtctgnnnnnnnnnnnnnnnnnnnnnnnnnnnnnnnnnnnnnnnnnnnnnnnnnnnnnnnnnnnnnnnnnnnnnnnnnnnnnnnnnnnnnnnnnnnnnnnnnnnnnnnnnnnnnnnnnnnnnnnnnnnnnnnnnnnnnnnnnnnnnnnnnnnnnnnnnnnnnnnnnnnnnnnnnnctgagaaagttcagagcctggagagaaggctgggaggcaggagctgggtctaaagaggccattgtaacgatggagctgtgcctgtggaggctgttgtgaggcagtaggctcatctgcggaggctagcgtgacgtagggtatgggcctaaat

SEQ ID NO: 351935 - DNA, 1029 bp, Homo Sapiens
  misc_feature (199)..(253): n is a, c, g, or t
  misc_feature (375)..(431): n is a, c, g, or t
tcccgggatcaagttgaccactgcagcagtaaagatgattctgaagaatggcatgggatggatcctttcgaatgcacttgagcagcggtctccaaccacagggccacagagctggagctggatctaccatgaaagacttctgaatccaggaagagagactgactgggcaacatgttattcagggtctccctctgttgtnnnnnnnnnnnnnnnnnnnnnnnnnnnnnnnnnnnnnnnnnnnnnnnnnnnnnnngctgaagcgatcctcccatctcaacctcccacgtggctgagactacaggcgcttgccactatgcccaactaatatttggaattttcctatacgtggattccagaggggtgacagcgaaacgnnnnnnnnnnnnnnnnnnnnnnnnnnnnnnnnnnnnnnnnnnnnnnnnnnnnnnnnnctcctacctcccggcagcctctccaggcccagaactttctccagtcagcctctacagaccaagctcatgactcacaatggcctatttaggcccataccctacgtcacggcagtctccgcagatgagcctactgcctcacaacagcctccacaggcacagctccatcgttacaatggcctctttagacccagctcctgcctcccagccttctctccaggccctgaactttctcaagtcgacgtcaccaggcccagctcatgcttcttggcagcctctccaggcccagctcttcctcccggcggcctctgcaggcccagactgtcatcaagtcggcctgtccagggccagctcctgccccccggcgccctctgcaggcccaagtcgtcctcaagttggcctccccaagcccagctccagcctctcggggggctcttcggggtgcaaaagttcctcgagtcagcctcttcaggcccagcttctcctgcctcccagtgggcctctttcgggccaagcccagctcatggcctctgggcggggcttcccaaggccccgctttttgacttttggggggcctctggcaggcctcgaacaaaggccc

SEQ ID NO: 351936 - DNA, 448 bp, Homo Sapiens
cgggtgcccctagaggccacacagcaggaggtgagcggtgtcgagtgagggagtgagggaagcttcgtctgtatttacagccactcccctttgctcacattcccacctgagctccaccttctcagatgagcagcagcgttagattctcataggagaacgcaccctgttgtgaaccgtgcatgtgagggatctaggttgcgctgtccttatgagaatctaatacctattgatctgtcactttctcccatcacgctcaggtgggaacatccagtcgcaggaaaacaagcttaacacgcccactgattctacattatggtgagttctataattattttattagatatcacagtgtaataatggaaacaaagtgcctaataaatgcaaatgtgcttacatcttttggcccagctcctacctcccgcagcctctccagcccagacgccaggca

SEQ ID NO: 351937 - DNA, 308 bp, Homo Sapiens
tgctatcgcagctgactgcagcctcaaccttccaggctgaagcgatcctcccacctcaacctcccacgtggctgagactacaggtgcttgccactatgcccaactaatatttggaattttcgtatacgtggattccagaggggtgacagtgaaacgtgggaccatccagttgcaggaaaacaagcttgaaacgcccactgattctacattatgctcctacctcccggcagcctctccaggcccagaactttctccagtcagcctctacagaccaagctcatgactcaccatgcacgtatttagcacta

SEQ ID NO: 351938 - DNA, 444 bp, Homo Sapiens
  misc_feature (56)..(56): n is a, c, g, or t
  misc_feature (142)..(201): n is a, c, g, or t
  misc_feature (225)..(252): n is a, c, g, or t
ttgtgaggcagtagcctcatctgcggaggctgccgtgacgtagggtatgggcctanataggccattgagagtcatgagcttggtctgtagaggctgactggagaaagttctgggcctggagaggctgccgggaggtaggagnnnnnnnnnnnnnnnnnnnnnnnnnnnnnnnnnnnnnnnnnnnnnnnnnnnnnnnnnnnncctgctgtgtggctccttgcggcnnnnnnnnnnnnnnnnnnnnnnnnnnnnctcaagtgcatccaaagcgacccttcccacaccagtcttcacagtggtcaagggcagcaaccacttagctcccaaggcatgtgcctcagctggcacttcgtcacaatcaacagtaagtggtagctataagtcactgtgaggtcacctaatttcgctgtcacccctctggaatccacgtatacgaaaattcca

SEQ ID NO: 351939 - DNA, 352 bp, Homo Sapiens
  misc_feature (47)..(47): n is a, c, g, or t
  misc_feature (183)..(183): n is a, c, g, or t
gagccgtcactttaagctggtggaagttaaaggccccaatgatcgtntttcacataagcagatgatctggctggctgaactgcagaagctgggggctgaagtagaagtctgccatgtggttgcagttggagctaagagccaaagccttagctaaaagattccctacaggagaaaatggaaatnaggaggagagaaactccggtgtccccgaggtgtcggtgtggtgagggccgctggcgttgaagtacatcctgctctggcccagctccccatagcaggcctccagggggccactgcgctgttgccgcagcatcctgctcagtacgtcgacttcatcagccaggagggagag

SEQ ID NO: 351940 - DNA, 435 bp, Homo Sapiens
  misc_feature (57)..(57): n is a, c, g, or t
ctatcgatagggaccatgtaccgggacccgaggcggccagccaggggcgccctcgcngacgtcctgctggtctctgccatcatcaccgtcagccttagcgtcactgtcgtcctctgcggcctctgccactggtgtcagcgcaaactgggcaaacgctacaagaattccttggagacggtgggcacgccagactcagggcgtgggcgcagtgagaagaaggctatcaagttgcctgcaggagggaaggcggtgaacacagcccccgtgccaggccagacaccccacgatgagtccgaccgccggaccgagccacgttcctccgtcttcagaccttgtcaacttccctcaccagcgagatgctcattgttttccccagggttccgagggaggattgagggcccacgagggtttgcaagccgagagaactggggccgg

SEQ ID NO: 351941 - DNA, 1177 bp, Homo Sapiens
ggcgacatgcgctaaccggtccggaagttccgggatatcgtcgacccagcgcgtcgaatttaaaaaatgtgaatatgatgtggggatgggcctcttctacattaccttggcccaggggatcagctggctgggaggattagtgagcacctctgtattttgaggtctgagtcttctggagctgtgtagttaatcttcggtttctgataacccctgggtccatctggccatcagcctcagcagtgagcaaagcaataccatactcatttctatgttcctgttccttcctctgctcctcctttggagaagcaataattcatgggggatgatacagtagcactttacaaatggctccatgtcattcatcccaggggccataatctcttgcaccacctattcttacttcctgttcagctcctttacagcttttattttcaactgcttcccaacttggtggggcctcctttaaggatgagccaatagtaagaatgtggctgtaatcagcagagacccctctgaggggtatctgttctgcagcccctagtgaaatcatgtgatgtgagacagaaacctaaacatggtacttgattctaaacctgtgccagtctatagcctctgcctccccaagcagagctcaagccaaacgcttctgtcctctttccttctgcattaaccctttgctgatcctcaggggccactcccccaacacccctgtacttgggtgagggatgttggacagagcctgttttcatgtactgcaggtgggggtgtgctgacatgtttgctcttggttgatggagaaggtacagaggccagggagtgaaaatggttgacagaagagggaagagttaggtgtctcatagtcactcatagtggggtggtcaggggtaatggcatctccccactttaggcttctcaaacagacttttgacacctctcaagttcagagctctgatgtggaaagacaggaggtgtggggaaggagggggatttcgtgtgtttgcatgagtgtgcgcttcaggccttgggagttggcaagagggagggaaggaaggagagcaaaatcttcggaaggtgtttcttgtacctgagggatcctgccctgaatctccatagtctccactgtgaactgaggaggggaggggtgtgctggggaataaatcttgtatgagaacaaaaa

SEQ ID NO: 351942 - DNA, 899 bp, Homo Sapiens
  misc_feature (288)..(317): n is a, c, g, or t
agtaaaatgaaacacttaactctttggacatatgctggacttggttaactttggtgtcattccaagtattctgttctagtgccaactgctcaggagttatttaagttgcctctgctgttaggctgtctgtgcttattatcaagattacttctaaagttcttactaagagaactgagaaagttctaaaagaaagatccttgcaaaatggatctgctttgatacagattgggcttcttaggacttctaaggcactaaaaccctttgtaggcattttcacacccacattgnnnnnnnnnnnnnnnnnnnnnnnnnnnnnnactttaaatagctacaatgctaaggtcctatcctcagtctttgaatctgaatctctggttatgggggggtctcagtatttttaaaagctcctgaagtgaggatttaatactagaatgccagtttcttaattcagtagcccatatttgcttttcattttacttgagatttttgtttaacatcttcaagttacattactaagacttctaaatttcacccctaatcaaatcaagacagaagaatcaaaagacaacattctgaaagtcaaggctttaggcatgggcacacgtacttcaaaccggtatgaaattactaagagtcaggcataagacaccagctcccataaattttatctgactgaagattatatctagctgtaaaattcaaaaggactactccccaactaagatgtctttaagttctccctcaggtactcaccttaaaatgctctacaattttgatcaaaatccagcgcgccactcccagacctactgaatcagaatcttcaagagaggagcttgagaatccatatggtttaacaaactccaggtgattatttttatttacttttgagacggagttcc

SEQ ID NO: 351943 - DNA, 305 bp, Homo Sapiens
caatatgcaagttaggcttaatttttttatctaatgatcatcatgaaatgaataagagggcttaagaatttgtccatttgcattcggaaaagaatgaccagcaaaaggtttactaatacctctccctttggggatttaatgtctggtgctgccgcctgagtttcaagaattaaagctgcaagaggactccaggagcaaaagaaacacaatatagagggttggagttgttagcaatttcattcaaaatgccaactggagaagtctgtttttaaatacattttgttgttatttttttcatgaaaaaa

SEQ ID NO: 351944 - DNA, 1442 bp, Homo Sapiens
  misc_feature (1373)..(1402): n is a, c, g, or t
gggtccggaattcccgggatcgcctaccgggggcttctctcaccgggactcgggactcccgggaagtggaccggcagaagagggggctagctagctgtctctgcggaccaaggagacccccgcgcccccccggtgtgaggcggcctcacagggccgggtgggctggcgagccgacgcggcggcggaggaggctgtgaggagtgtgtggaacaggacccgggacagaggaaccatggctccgcagaacctgagcaccttttgcctgttgctgctatacctcatcggggcggtgattgccggacgagatttctataagatcttgggggtgcctcgaagtgcctctataaaggatattaaaaaggcctataggaaactagccctgcagcttcatcccgaccggaaccctgatgatccacaagcccaggagaaattccaggatctgggtgctgcttatgaggttctgtcagatagtgagaaacggaaacagtacgatacttatggtgaagaaggattaaaagatggtcatcagagctcccatggagacattttttcacacttctttggggattttggtttcatgtttggaggaacccctcgtcagcaagacagaaatattccaagaggaagtgatattattgtagatctagaagtcactttggaagaagtatatgcaggaaattttgtggaagtagttagaaacaaacctgtggcaaggcaggctcctggcaaacggaagtgcaattgtcggcaagagatgcggaccacccagctgggccctgggcgcttccaaatgacccaggaggtggtctgcgacgaatgccctaatgtcaaactagtgaatgaagaacgaacgctggaagtagaaatagagcctggggtgagagacggcatggagtacccctttattggagaaggtgagcctcacgtggatggggagcctggagatttacggttccgaatcaaagttgtcaagcacccaatatttgaaaggagaggagatgatttgtacacaaatgtgacaatctcattagttgagtcactggttggctttgagatggatattactcacttggatggtcacaaggtacatatttcccgggataagatcaccaggccaggagcgaagctatggaagaaaggggaagggctccccaactttgacaacaacaatatcaagggctctttgataatcacttttgatgtggattttccaaaagaacagttaacagaggaagcgagagaaggtatcaaacagctactgaaacaagggtcagtgcagaaggtatacaatggactgcaaggatattgagagtgaataaaattggactttgtttaaaataagtgaataagccgatatttattatctgcaaggnnnnnnnnnnnnnnnnnnnnnnnnnnnnnncaatatgcaagttaggcttaatttttttatcctaatgatc

SEQ ID NO: 351945 - DNA, 233 bp, Homo Sapiens
cccaatcctgtctagtgccagttacacatcagtgtctgtagtagagaccctggcgctagcatgaattctaccaagcaggctagactttacaatcaatcaatagaataaaaggaaggaaaatatacagttcctcccagcccactgagtactattgtcttgtctcttagtaccactacaagggaatgctagatcatgagctggggcatgtcatagatggggatgaatgaccatct

SEQ ID NO: 351946 - DNA, 653 bp, Homo Sapiens
tactccatactgaggttaaattaaggaaggcaaagtcccaggcccaagagtgggaccccagcttttcactctcagttccactcatccaactgggaccctcaccacgaatctcatgatctgattcggttccctgtctcctcctcccgtcacagatgtgagccagggcactgctcagctgtgaccctaggtgtttctgccttgttgacatggagagagccctttcccctgagaaggcctggccccttcctgtgctgagcccacagcagcaggctgggtgtcttggttgtcagtggtggcaccaggatggaagggcaaggcacccagggcaggcccacagtcccgctgtcccccacttgcaccctagcttgtagctgccaacctcccagacagcccagcccgctgctcagctccacatgcatagtatcagccctccacacccgacaaaggggaacacacccccttggaaatggttcttttcccccagtcccagctggaagccatgctgtctgttctgctggagcagctgaacatatacatagatgttgccctgccctccccatctgcaccctgttgagttgtagttggatttgtctgtttatgcttggattcaccagagtgactatgatagtgaaacagccagatagctagctaat

SEQ ID NO: 351947 - DNA, 2316 bp, Homo Sapiens
  misc_feature (47)..(47): n is a, c, g, or t
  misc_feature (189)..(189): n is a, c, g, or t
  misc_feature (465)..(465): n is a, c, g, or t
ccgctgagctggaaggctcatgcctggtagtagacgtggtaggcacntcctgttgatggtagcttccttttactttcatcttagtcataccaccacgcgggaggtgcgtcagctcctatacccttgcagttgtgcaacaacccttttaagatgccgtgctatgaacaattcgtcctatgtaatgggctnagccaatccgtcgtatgaataactcattaacgatggaaggaacgggcgacatgctactctgccgcacgaatgcctatcgagaaaggtcagtctctcacgcttcgagcatggcgacgcgtgcggtgcgtcgtttcgagtcgccgttggggtgcggggtagcgcacaggagtatccgttgtgtgtcgaacgtgtctgtgtgggttggggtggagctccgtggtagcgtgcacgccgagcgctagccgtgccgagcggaaggtcgtggacgtcgacggntctggtcgcacctcattgggcacgtgcgcgacatgggtggcatgtgacgactctgacgctcctcggcacgagcagataggcgtataggttatgaatgggccgtctacgcgaccaaagtctccatatattgacctctgcacacacgtggttgtgttgtgtgtgtcgagccgaccgagacatgtgtgcaatcgatcgacaaagccgtagtccgcgggcccttcgcctcgcgcatgggggtctccacggtatgcggggggcgattgtgaactgcggacccgagttgctcatgtgggcgtgtatcaagaaacggatgggggagcgggggcgcgcccctgcgaaggatggacagccggtgagttagacggatttggtcctcgggctctcgcttccgttaccccgggtgcgcctacgggcgaacacgggcggggcggattccggggaaaggcgcgatgggtgtgtttgatcggaagagggaggacttacacgggtcctctcctcgaaagatggtgaaggctgcaggggtctgcggccgcgctcgttccggagcggcgagactccgcagtggatctgtatggtttgccgacctcgcgtggcgtgtgggggtagggacgaggcggcgcgctaggtgcctctcgtgtcatctgtggaggttttcgtggctaccgcccaggtcatggccgggttcccgcgaccggggcgggggcctcgcgctactcaatgacgaggcagcggggcaggtgctgcgagaaatacttgaagagctcgggggtggccccggggcagttggtcagctccagctcctccagctcctgcagctgcaccaggcccgacagcccggtggtggtgagcagcgggcagcctgccagagacaggaggcgcaaactccccagggccaggaggtgcttcagcccgaagtcttgcacctggcagcaccatcgcaggtagaggctgcggagggacgacatggtggacagatagctgaggccagtgtccgtgatgcgtacacacctgtcgggctagtcggggtcctctaggcggtgcaggtcgcaggccacgtactccagcgccatgtcggtgatgcgtgggcaccacgagaggtcaaggctgcgcagcttgcgccaggttctcggccacgagctccacgccagtcgtcggtgaccttggagcagcccgagaggctgagcgcggtgaggttgggcaggctgtgcaccacgttgaccacgccgtggttggtgatctcccagcaggagagcaggcgcagcgtgtgcgtgctgtggccctggcgcgccgtgaagtaggccagcgccgtgtccgtcacgtggtaggcctgcaggctcagctccgccaggttgggcagcagctgcgagatggccgcgatggcgtcgtcggccacgttgatgcagtcactcacgctcagcgaggtgatgcgcgcgctcaggctggaccacagcccggcctcggtgaaagtcgttgcagcccgacagctccagacgcaccacgccctgcatctgttcaagcataacctcgaggcctgcgtccgtgatggtggagcgcttgaggctcatggctttgacacccttcttggagagcgcatagttgtcaatgaactcacagatgtccaggtcggagacgccaaccaggcagaagccctcgaagcctctggcggcaaaaccctgcaggttcacgaactccttctcgccaccaggcagcacgttgtagagctccttggcatgcagcaccggcgtgaggcctgcccagaacttgggctggtacagcacgcgccgccaggccttgcacacctgggccagcacacacttctcgcaggccgagaaataccagaagagccccgct

SEQ ID NO: 351948 - DNA, 354 bp, Homo Sapiens
ccccgactagcccgacagcccagactagcccgacagctccccgactagcccgacagctccccgactagcccgacagctccccgactagcccgacagctccccgactagcccgacagctccccgactagcccgacagctccccgactagcccgacaggtgtgtacgcatcacggacactggcctcagctatctgtccaccatgtcgtccctccgcagcctctacctgcgatggtgctgccaggtgcaagacttcgggctgaagcaccacactggcctggggagtttgcgccatccagtctctggcagctgcccgctgtattaccaccaccgggcctgtcgggctatcgaaaagat

SEQ ID NO: 351949 - DNA, 1192 bp, Homo Sapiens
gcgtaggtaggaggcgggggtaatcggcacgaggaaatagccttgctgttactctggagacaggctagccggtcatgaaaactgggtaaatgcagttcactggcaacctgtggtgtacaaagatggtgtcctacagcagccaatgagattattatctgcttccatggataaaaccatgattctctgggctccagatgaagagtcaggagtttggctagaacaggttcgagtaggtgaagtaggtgggaatactttgggattttatgattgccagttcaatgaagatggctccatgatcattgctcatgctttccacggagcgttgcacctttggaaacagaatacagttaacccaagagagtggactccagagattgtcatttcaggacactttgatggtgtccaagacctagtctgggatccagaaggagaatttattatcactgttggtactgatcagacaactagactttttgctccatggaagagaaaagaccaatcacaggtgacttggcatgaaattgcaaggcctcagatacatgggtatgacctgaaatgtttggcaatgattaatcggtttcagtttgtatctggagcagatgaaaaagttcttcgggttttttctgcacctcggaattttgtggaaaatttttgtgccattacaggacaatcactgaatcatgtgctctgtaatcaagatagtgatcttccagaaggagccactgtccctgcattgggattatcaaataaagctgtctttcagggagatatagcttctcagccttctgatgaagaggagctgttaactagtactggttttgagtatcagcaggtggcctttcagccctccatacttactgagcctcccactgaggatcatcttctgcagaatacttttgtggcctgaagttcaaaaactatatgggcacggttatgaaatattttgtgttacttgtaacagttcaaagactctgcttgcctcagcttgtaaggcagctaagaaagagcatgcagctatcattctttggaacactacatcttggaaacaggtgcacgaatttagttttccacagtttgacagtcacgcagatggccttctcacctaatgagaagtccttactagctgtttccaggagatcgaaacctgggtcatttgtggaaaaaagccaggatacaaatctccacctgaagc

SEQ ID NO: 351950 - DNA, 846 bp, Homo Sapiens
  misc_feature (87)..(173): n is a, c, g, or t
  misc_feature (266)..(309): n is a, c, g, or t
tgagtgtaaactgttcagatcaagatgctgtatcataattcaagttatttttttctggagttaaaagggagcattcagtgatacacnnnnnnnnnnnnnnnnnnnnnnnnnnnnnnnnnnnnnnnnnnnnnnnnnnnnnnnnnnnnnnnnnnnnnnnnnnnnnnnnnnnnnnntgtctagcttggctatggccatagcttgatgaaaatggaccattgtgcatttctgtgacagtcaaaaagacctgttctaaaagtcttgcgacnnnnnnnnnnnnnnnnnnnnnnnnnnnnnnnnnnnnnnnnnnnncccctccagtctgagatttctgtgtggctgatggagagtgtgatttgggcgtaggtcttatttgcaaacctgctcatgttctaagctttcttcaggtagtaccacctgtcatcgcttctgcatatgatttaaatggatttttgtttttataaaagtatcataaatttagagataaaatggaggggacccagctttctttacaatgtggatctacctcagttaaacaggtgggtgctattactaagtctgtcaaattaaattggaaaaaggaaccaaacagggagatacaactccacatgaaacttgaaattggaatttccgtttatttaagggtatttcttattgatggggggctttttagggttgaaccccaatggcttggaaaaaatttgggttggaaaacggcacatttttgttagttagaatacgagggggggaagaaaacgtcaatttggggcatgggaatttggtttgacctttctccccagttcgaggggtaccgggggatttattatgcccggagggggtccccgtggg

SEQ ID NO: 351951 - DNA, 1058 bp, Homo Sapiens
  misc_feature (24)..(24): n is a, c, g, or t
  misc_feature (314)..(421): n is a, c, g, or t
  misc_feature (425)..(425): n is a, c, g, or t
  misc_feature (440)..(440): n is a, c, g, or t
  misc_feature (443)..(559): n is a, c, g, or t
  misc_feature (643)..(643): n is a, c, g, or t
  misc_feature (677)..(677): n is a, c, g, or t
  misc_feature (694)..(694): n is a, c, g, or t
  misc_feature (821)..(821): n is a, c, g, or t
  misc_feature (834)..(834): n is a, c, g, or t
  misc_feature (848)..(895): n is a, c, g, or t
  misc_feature (922)..(922): n is a, c, g, or t
  misc_feature (928)..(929): n is a, c, g, or t
  misc_feature (940)..(940): n is a, c, g, or t
  misc_feature (943)..(943): n is a, c, g, or t
  misc_feature (946)..(946): n is a, c, g, or t
  misc_feature (949)..(949): n is a, c, g, or t
  misc_feature (962)..(962): n is a, c, g, or t
  misc_feature (969)..(969): n is a, c, g, or t
  misc_feature (975)..(975): n is a, c, g, or t
  misc_feature (990)..(990): n is a, c, g, or t
  misc_feature (994)..(994): n is a, c, g, or t
  misc_feature (1002)..(1002): n is a, c, g, or t
  misc_feature (1016)..(1016): n is a, c, g, or t
  misc_feature (1019)..(1019): n is a, c, g, or t
  misc_feature (1024)..(1024): n is a, c, g, or t
  misc_feature (1026)..(1026): n is a, c, g, or t
  misc_feature (1031)..(1031): n is a, c, g, or t
  misc_feature (1036)..(1036): n is a, c, g, or t
  misc_feature (1038)..(1038): n is a, c, g, or t
  misc_feature (1041)..(1041): n is a, c, g, or t
  misc_feature (1047)..(1047): n is a, c, g, or t
  misc_feature (1050)..(1050): n is a, c, g, or t
atagagagtaaagtcaaacatggngccaggctgtggggcatataaagatgaaaaaattcctgctctcaaggagcttacagtcaagtcaggtagacagacatgcagacaactaactagatttctttgggtagccagactctttgatgtcttttgaaactactttatggattcttcaaaaacagattttaaaaaatcttgtttgccatgcccccatccctcatcatgccttaagcatatgccatcttcccccaaatccccatcaggtatttagatgtgttcagttttattatttttgagatggagtttcactcgtnnnnnnnnnnnnnnnnnnnnnnnnnnnnnnnnnnnnnnnnnnnnnnnnnnnnnnnnnnnnnnnnnnnnnnnnnnnnnnnnnnnnnnnnnnnnnnnnnnnnnnnnnnnntgtnccaccacgcccagcnaannnnnnnnnnnnnnnnnnnnnnnnnnnnnnnnnnnnnnnnnnnnnnnnnnnnnnnnnnnnnnnnnnnnnnnnnnnnnnnnnnnnnnnnnnnnnnnnnnnnnnnnnnnnnnnnnnnnngggtgagccaccgcacccggcccagtttcctttatgacgtaaaacagaactaaataagggaggggcttttctgtattggaggangagtagaatgaggcagggcaagggctgaatattnaaataatggaggtaatnagcagtttatgattatcatcatttcttcccatcaattaattgtccagaatcttcccttgtcatgctctagagtgctttgcagaagtctaactcagtatgttagtacaagggaccccacttttttgtnttttgagatggantctcgctctgtcannnnnnnnnnnnnnnnnnnnnnnnnnnnnnnnnnnnnnnnnnnnnnnntctcccaaggttctagtgattcttctncctcannctcccgagtanctnggnttnaaggcgtgtgcancatgccnggtaanttttgtattttaganaaanggggctcncatgttggcaggcnggnccgancnctgantcagngntcncccccncgnctccaaaa

SEQ ID NO: 351952 - DNA, 1225 bp, Homo Sapiens
cgggcgctcgcgctctcgcagtcctcttccgtcagtgtcttttgcttcgactcccggcggagcgcgcaacgtggagtgacgtgcaggggccaagtgcaacccaggcagccacggctgtttcggagctcaggactctaaaatggcagagcagctttctccaggaaaggcggtggatcaggtgtgcaccttccttttcaaaaagcctgggcggaaaggggctgctggacgcagaaagcgcccggcctgcgacccagagcccggagaaagcggcagcagtagcgacgaaggctgcactgtggttcgaccggaaaagaagcgggtgacccacaatccaatgatacagaagacccgtgacagtggtaaacagaaggcggcttacggcgacttgagcagcgaagaggaagaggaaaatgagcccgagagtctcggcgtggtttataaatccacccgttcggcgaaacccgtgggaccagaggatatgggagcgacagctgtctatgagctggacacagagaaagagcgcgatgcacaagccatctttgagcgcaccagaagatccaggaggagctgaggggcaaggaggatgacaagatctatcggggaatcaacaattatcagaaatacatgaagcccaaggatacgtctatgggcaatgcctcttccgggatggtgaggaagggccccatccgagcgcccgagcatctacgtgccaccgtgcgctgggattaccagcccgacatctgtaaggactacaaagagactggcttctgcggcttcggagacagctgcaaattcctccatgaccgttcagattacaagcatgggtggcagatcgaacgtgagcttgatgagggtcgctatggtgtctatgaggatgaaaactatgaagtgggaagcgatgatgaggaaataccattcaagtgtttcatctgtcgccagagcttccaaaacccagttgtcaccaagtgcaggcattatttctgcgagagctgtgcactgcagcatttccgcaccaccccgcgctgctatgtctgtgaccagcagaccaatggcgtcttcaatccagcgaaagaattgattgctaaactagagaagcatcgagctacaggagagggtggtgcttccgacttgccagaagaccccgatgaggatgcaattcccattacttaggtttcccataattcttaaatttaaaaaataaacgttttgttcttttagaaaaaaa

SEQ ID NO: 351953 - DNA, 989 bp, Homo Sapiens
  misc_feature (832)..(832): n is a, c, g, or t
gggtccggaattcccgggatgggagcctgagactcaacatggcagcgccaccttctccaggaaggacggccgaccaagcagaccaggtatgcaccttcctcttcaaaaagcctggacggaaaggggctgcaggcctcagaaagcgcccggcctgcgaccccgagcacggagagagcagcagcagcggggacgagggcgacacagtggctcagcccccgcgggtggcaccgaggccccggggcctccacagctggcagaaggcggctcacggcgacaggaggggcgaggaggcggcgcctgagagcctcgacgtggtgtacaggtccacccgctcggcgaagcctgtggggccggaggacatgggggccaccgctgacttcgagcaggacaccgagaaggagcaccatacgccgaccatcctcaagtgcagccagcgggtccaggaggcactgcggggtcgggagcacgaccacatctaccggggaatccacagctacctgaggtacctgaagcccaaggacacgtccatgggcaactcctcctcggggatggcgaggaagggccccatacgtgcgccagggcatctgcgcgccactgtgcgctgggattaccagcctgacatctgcaaggactacaaggagactggcttctgtggcttcggggacagctgcaaattcctccacgaccgttccgattacaagctcgggtgggagattgaacgggagcttgaagagggtcgcctactgtatctgccgaggacgaaaaccatgaagtgggaagcgaggaagaggaaataccattcaggtgtttcatatgtcgccaggccttccanaacccagtcgtcaccagtgcaggcattatttctgcgagagctgcgcgctggagcacttccgggccaccccgcgctgctacatctgtgaccagccaaccggggggatctttaaccccgcccaagaactgatggcgaaactgcaaaagctcaggctggc

SEQ ID NO: 351954 - DNA, 1035 bp, Homo Sapiens
gtccgctccggcagcgcgctctgcccggcttcctcagtctcctcgccgggagcgtccgggagcagctccgaggccgcggcgaaaccaggtggagtccgaggttcggaggagtatcagagggagcagggattggatcaagtcattgcatctagagtacgggggaacgaagaaatcatggagagagtttgccccaggagagaggcgagcgttatgtaacctaggatctggggtgggtaacagtctgtgcagtgtcaatgtgagaggagaaaacacccaacgtgagggaatggtcagccttgtcatttcagcattctggccttccctatgaggaggaagatcaacgaagtcacagggcccttctagcccaatccagagctgtaccatggcagagacaagagaagaggagacagtgtcagcagaagcctcagggttctcagacttgagtgactcagagttcctggagtttctggacctagaagatgcccaagagtcaaaggctttagttaacatgcctggcccatcttctgaatcccttgggaaggatgacaaaaccataagcttacaaaactggaaaagaggactggatatattatcacccatggagagattccaccttaaatatgtatatgtcactgacctggctactcagaactggtgtgaactgcaaacagcatatgggaaggagcttcctggtttcttggcacctgagaaggcagctgtgttggacactggtgccagcatacacctagctagagaactagaacttcctgatcttgtgactgtcccagtcaccactaaagaagatgcttggggcaattaaagtttctgaacataccttttgctgattcctacccctgcagtccaaaggggcacctccaaaaaggtttcaagtggcttgggggaaaaggggaagggctgcaacttcctttgtttagaagggcacttgctgctaacctctccctcaaaccccaccctagcgcgggcaaacttggctacccccgccctcccaaatcttactgaactcccccactcccc

SEQ ID NO: 351955 - DNA, 1886 bp, Homo Sapiens
  misc_feature (1747)..(1780): n is a, c, g, or t
gatagatacaatggttccttagttttgcactgggaagaaaatattttgtaaaagaatgtttatttgaaataatgataactatcaattgttcacaatgtggtggaaattaaaacaccatctcagctttaacttttaaataataatgataactatctttattgagcatcttctacatcctaggcattgtcctaggcattgcatgtttatatccccaattctcaccacaaccctgcaagtaggtggtattatccaagttttacccattaagaaactgaagatcagagaagttaagaaacttgctcaacatcatatagtaagtagcagagttgggattggaattcaggcatgactcaaacctggatgtacttgattccaaatgccatgttgttttcactctctgcactgactttttaattatttaaaactctagaaagatgaacaaaggttaatttaaacttacctaagaagatgagaatcaaacaaaacagatatgcttactctagttaaaaagaaaataaatctcatgtcagacccagaaaggaccaatcactgtccgattgtaagctatgttgggccaattccaaaatattatacgatggagaggtcaaatttacctacttctgagttacctcagtttcccaacaatggaccttggcacactggagtaacaatacataacagagttgccaagatatttataccctcagcactcggggcaacacagtggaaagtggggaggccatagacccaaacaagttctttgggccaggcatggcctagtaagtacaccatgcctcgaaaataagtccagaagcactggactaaagagtgctaatgcaggaaataatacacataatttttaggtaaggataataatttatctctgctcctaatattactatcccattgtaattatttataaccctcaagccagttgatttttaatatatttgattggaaaagaactctctggtattattaagactcacacagaatcagggacagggcccccaaaggagtttgctgtaaaataggcagtagagttgtggcatgggcccaaccctgcattcaagtgtaacagcattctgtcagggtcactttgaattgtgcacataagaaaaccaatacaaaaaacaatttgtattcaatattgtcacatttctctctggtagaaaaatcaaataccttagagattatgaagtcattaatttatactgaaattggattgacttactacctaacactgagcgctgtttttaaatgaaaagaatgagatttataaccacttgagtgttattgcagtgatatttgaactcatttgaatatattcagtatcatttaatgtctgaattcagaaaaaaatgccgaaatttttattcagatggtccataaattaaattgcatattcattacttatctgctctatttagatttattttaaaagtttatttaagtaaatatttttataaaaaccagaaaacactgtattacaaaatattatttattaaatgtagttcaggaaataatctatttttactcttttttgggaaatacttgtgtttttgatacatctccatgaagtgcttttgagaggagaggctattttgatgtttttatacaactgaaggttaacagccatagcattttatgatactttacaggtagtcctggctttttccctgaaacataagcttggaaaatctattagaaagcagaacagggcaaactctccattttacttatggcnnnnnnnnnnnnnnnnnnnnnnnnnnnnnnnnnngagacagagtcttgttctgtcgccaggctgggagtgcagtggcacaatctcgggctctcgggctcactgcaaccctctggcctcccagggttcaagcggattctcc

SEQ ID NO: 351956 - DNA, 546 bp, Homo Sapiens
  misc_feature (378)..(378): n is a, c, g, or t
ggcgctgactcaggtctccgccatgcacgcgtggactctcggatgagctcagcagaaccgcacagccagagccccaggtcagaagtgcagaccagggttctcagcagggtatagtgaggagtggaaggagacgtgtgcctggtaatatggggcggaatttccactcagctccatttgctggggatttaaagagaacccttgtgctacgccaggcagttaccgagccgaagggagatgatgggccttcgcccctcagtgggatggcagctgagggggccctgcatttgaccgtcgagactgcagcagcgcctttcctgtctgtggtttaagtctttgcagtcaagtactgatgcatccaagccaggcccatgcctggtngtctccctgactgcagaggagccccagggcaaggacagctcagctgctggcagcctgcctggcccatagacatcccccaagtagtctcaggcctctgacatgtccctgaggggcccctaaagaaagaaagtggaggggacactccagaggctgtcgtgggaggttcat

SEQ ID NO: 351957 - DNA, 730 bp, Homo Sapiens
gggctaaggaacaaatctctcctttgctcgtggttagcaagatacactcaagcatgaagataaacacagctgctttcttcttacaccccggtctcatgctccttaatggcgccatgggtgcttgttgggcctttttccagtaaggaatgatattgctgaagaatctacttaaccctgacaaattttaattataatctcttcttatacagataaaacatgactcctacaaggccccaaggtttacatagtctgaagtgaagtacagagctggcatctatctggtgatttctagctctcgagatacccaagcagcctgatggggcagttccccttcttacggttcacgctctaaggcaggatgtggcttatgagatactttgcattgtctgtctgcacaccttgaatctgcctgctggctcccttactttacctctctgtcatgtgcagatgaaggctcagggtgctagaggattagtaagatctctttctaaagacaggagagattatttacaagaagaactcaccagggtttagtttgcatttaagaattgccagtcttttgtcctgcatcatcttggaacattaaatccacatgtttcagagcttcaccagggcagtaccaatgctcttttcacagctatgaagagctagagaaattcttgttatggtagaaaaatttcacggattcatttttgaaactgcatttgtgcgtatgcagtgtagattttat

SEQ ID NO: 351958 - DNA, 675 bp, Homo Sapiens
aatattcccattccttctcagttgatatatttgaagatccgcaggcagatctcaaacctttggaagaagatgcagagaaagaaggccattactatggaaaatcagagcttgagtctggaaaattccttcccaggttaaaaaaatctgggatggaaaagagtgctcagacatcactggattcccaggaggaatcaactgggattctttcagtaggaaagcaaaatcagtgtttggaatgtagcatgaatgaatccctggaaatagatttagaaagctcagaagcaaattgtaaaataatggcacaatgcgaggaagaaattaataatttttgtggttgcaaagcaggttgtcagtttcctgcttatgaagataatccagtttcttcgggacagctggaagaggtatgtgtctgcgtgttggtatttgacaaaaggatttgatcagagtttaacccaagaacagacatgccagtcaatgaaagatagggttaaattattgggaaattagcttaaatgtcttaaaacttaaattgttctaattttacatgtaaggacttaaaatggatttgatatttatgaatttgaactagacagtagagtttttctggagagaaaaagcttttaaaaatcacaggatgtaagattcctatgtgttgtcttaagatgcatgttattg

SEQ ID NO: 351959 - DNA, 2756 bp, Homo Sapiens
  misc_feature (68)..(126): n is a, c, g, or t
  misc_feature (2713)..(2714): n is a, c, g, or t
ccgtgggcggctggacagcgggcagctgggcctctaccctgccaactacgtggaggctatctagaggnnnnnnnnnnnnnnnnnnnnnnnnnnnnnnnnnnnnnnnnnnnnnnnnnnnnnnnnnnngtctccttcccctcgccatagagttccagacatattttccgatcaagcttttatttttttaaaagtcaaaacagaacaaaacaaagtatgcagagacagagcatttgcagggccacctgggaggctggggtgctggggcttggggtggccccagggtaggtaacagtcttaggacttagcccaacatcacaacatctgctcttcgggttccaccaaagagtctcctgagccctgagggatggatgtctcctgacccttccaccccgcctcactccctccgtcccactccactccaggctgccggcacctgccccattccctggcctggtttcctaacctcttcttcctcccctgccctgcttcccttcctccaccaccctgctctcaaaggcctcctctccagacccctggaagggaggcttccccatctttagttttccactctgccccggggagcacccttctactcctagccacgtcccttgggaccggtgggactggaggaggaacggtcaccctcctcccccatggaggtttccaggggtcccccagacatgaaagaggggtgagctggaggaagtcatggtgtcactggggtacaggagggtgaatgaagggcatgcaggccctcagcccgggctgtgccagccctcccagccccaggcccatctgaaggaccaagacgctgttacgcaggcccttctttccagctatcagcactttcagcatcggctcctcagcagatccaaaccccctcagcaacttgcagaggacctgtcccctctcaaaagtcccctggcctagggtggggacccccaaacctacggcaaagccagcaacagtagcagcctgctcccatttgctggggaggagatcatcttgttcccctggccccccactctccctccatgtccatccaaaaaccataaaatcactgggttccacatcagcctccatgaggccaagccttgtacctgcaagcctcttggcctaaccattcctctgtcctcttctctggcctgcctggggagcccgtgaaggccgcacgggtgcctccagcctgagacatcaggggagagcctgcagctgagttcagcagaaaggaggaatcctggccctcaggaagaagatagtcacatgtttttcttccttgtccccacagcccccagaacaacattctccctgctggcagcccttccatgtctccaaacctgggtcagagtgaaaggacctttgggggtgggtgggagcaaagggcccacctgctggttggtgaaagcagtggtgccggagtgctaggtaccgcacgagagggtgcgggggcttgggaagcagaccagggttggacaaaaccccatgagggcggggagctggaagaaaagtctcttggggacctctggggcaaggagctgagaagtcctgcagcaccaggtgagacttgcttacagtggatgccacttctaggcctctggaccgcagatgccctcctccctcctgcacacctggcctcctgggcctccaggtaaagagagagagccagcccagccctgtttcccctcagtcctcctttgctcctgctgcttctcccaacagcccactgttaggaggtagtagaccccagcctcaaggctctgaccttcttcatgtgggcacagagggtcctgacactctggcagggcctgagctggggcaggcctccctcagggccaggggcgatggcaccccggggacaggcagacctccttcctgccgtcagcacccccttccttatcactgtctggtctccgagcttcggctgcagcctgaggtgtgtcctgggctcctcagagcctgaagcaagcttttggaagcctgcagtcctcccagctccagtgcagaagcctctctctccagcctttccccaggcaggagttggggttgggggcctctgtccctcatcgcttaccttggaaaggtgggaagctggcaatctgcaccttggggcctgggctccccctctctgtgccagcggcttcccagcacctgggaggggctgcagccccagctggactccagcctgtccctcttagcactctagctgcccactccagggcagggactcgaaaccccctccgtcctgagcagccacctccagggccctgtttgggaccactctctcagtccccaggtcctcagggccccagagcgggagggtctcctacctggaagtccccctgagctccagggcccagccctacctgccagtgctggtgtcagggcactcaacaccgagtgtgggggccacgccccttgccatgcccacggcctcctcctgtagcccctgcctgcacccacgatgctgcacgggcccgccctggtggggctcggcgagtaatgtgttttgtccccagttaaccaccattctgcggcctggttctgcaaggaaccagggctgccccaccgcccgccgtctgccgccctaggcttcctgactccattagttccgacacttgtgaaactccgagaagtgctgtggtctcagcaatgcacctgttttgtacatgattgtgtaatttaaaggtatataaatacaaatatatatatatannagttgtgattgtatgactgtggataaaatccagaactgtgtc

SEQ ID NO: 351960 - DNA, 445 bp, Homo Sapiens
  misc_feature (11)..(11): n is a, c, g, or t
  misc_feature (316)..(316): n is a, c, g, or t
tctaaatcccnaagtcctaagggcccaaaaaaggggagggttttcctacctggaaaatccccctgaaactcccaaggcccaagcccctacctgccaaatgctggtgtcagggcactcaaacaccgaagtgttgggcccacgccccttgcccatgcccacggcctccctcctgtagcccctgcctgcaccccacgatgctgccacgggccccgccctggtggggctcggcgagtaatgtgttttgtccccagttaaccaccattctgcggccctggttctgcaaggaaccagggctgccccaccgcccgccgtctgncgccctaggcttcctgactccattagttccgacacttgtgaaactccgagaagtgctgtggtctcagcaatgcacctgttttgtacatgattgtgtaatttaaaggtatataaatacaaatatatatat

SEQ ID NO: 351961 - DNA, 1195 bp, Homo Sapiens
  misc_feature (750)..(750): n is a, c, g, or t
  misc_feature (1166)..(1167): n is a, c, g, or t
gggggtctttgtggcttgcagctcggggtgggtggctcatttcctggccgctcctgggcttcgcggaaagaagagattactcacactccttctcaagcacagaaccagttgtactgagctttttgctaagctgtttcagccaagaatggctgtggaatctggagtgatttcaaccctgatacctcaggatcctccggaacaagaactaatactagtgaaagtagaagataacttttcctgggatgagaaatttaagcagaatgggagtactcaatcctgccaagaattgtttcgtcagcaattcagaaaattttgctaccaggagacacctgggccccgggaggctctgagccgactccaggaactttgctatcagtggctaatgccagagttgcacacaaaggagcagatcttagaactgctggtactggagcagttcctgagcattctgcctgaggagctgcagatctgggttcagcaacataatccagaaagcggcgaggaagctgtgaccctgttggaggatttagagagggagtttgatgacccagggcagcaggtcccagctagtccacagggaccagcagtgccatggaaggatttaacatgtctcagagcatcccaagagtcaacagacatccacctccagcccttaaagacacagctgaaatcctggaaaccatgcctttcccctaaaagtgagttgtccagacctcccaaagcttcttcagctatccgttgggaatgtgnttctccaggaagttttcccggcgatatcatagctgctgaggctacacattcaacaatttcttgctttgccatcaacactttgccagccaccatcctgccatctaaaaatgtgaatagaaagtatttttcctgaagaacacatcgtcaataaatcacctgcacccaaatctccatctcaggcgctacttctggcaaggcatatcatgaggctagtgaagcacctacaagaaacttataactcaaggttgtaaaaatggcatggtgactcttacaatcatatcacagtgggcctctccaacaatttaaacctcatggacctaggtgaaagctgtgaaaggttccacattaattcttcagagggcagggctaagactttcaagactgaaaagagactagcataaggagacttaacaggnncccagtcaaggccattcatggcatgggg

SEQ ID NO: 351962 - DNA, 1084 bp, Homo Sapiens
gaagatgttcttgatgagctcttgcagtatttgggtgttactagtcctgaatgcttacagagaactggaatctcacttaatattcctgctccacaacctgtgtgcatttctgaaaaacaagaaaatgatgttattaatgctatccttaagcaacatacagaagaaaaagaatttgttgagaagcactttaatgacttaaacatgaaagctgtggaacaagatgaaccaatacctcaaaaacctcagtcagcattttattattgcagattgcttcttagtatatgggaatgaactcctgggacaaacggaggagctttcatctcctgaagaaaaatgaaaagctacttagagaacttaggaacttggattcaaggcagtgccgagagacacacaagattgcagtattttatgttgctgaaggacaagaagacaaacactccattctcaccaatacaggaggaagttaattctcaggtatctattggagtcttgctgggggcatggtttgggggagggggataaatctttacaaatcgtagttgtgatggggatgttgggaagaatggaactcaagaagaatgtatagagtcgaatcgatttattggaccacttccatatttggctaaccttctaacagtagagtgttaatatttcaacggtggtacaattcattcagttggtccgtcttgattcttgttagtatttctttttgggggtataatattttgattactcgtttggctggtttgagatttaaatatctcttaataagaggggcggtcggcgattcaaaataagccaggcttctactacatgtgccgcgcagaagaaaatttcaaagcctgattataagataagtctctgaaatttctcctctgttcaggggctccagattaccaatctctcaccttgggggtgcgcgcgggccttgggcgcccccttggtgggggtccttggggattctttctaaattggtcctgttctgtaaattcttcgggttctaattccttgcgaatctccgggacttcgggctcagacaagtgcaaagggaagcctctggcgatcaccctcttttccggtgggt

SEQ ID NO: 351963 - DNA, 1119 bp, Homo Sapiens
cggagtttgctcatctttccgcgcctctccactcgaggcccctactccggacagtactgtacttcccttttgcggtataatccacaggacacccctcctaagaacccccttacagtattagtggggtgtctataagtaccgggggagaaagttggccactccgcagcaaccgggtggcgcttcaagttcaccagcattgcagtctatttcgtcacaacactatggccctcttctctcaatgctaacgggtctttggaccttcgaagagttcccaggatggccacacagtagctcctggccatctcttgaagcactgcttgtggagggaggtgacttgcaagcaagagccggctttgctcttggtccatcccgagacccttacccccatctttaaagggtctctggaaccacccccctgacagagacaggaagggcaagaggtggagaaaatgcgaaggcttgaaatcaaatctgagagatgatctgatccagagctgaagccactggtgtctgagtcagaggggctgctagatcgagagtccaggatgggccgggtgtccaaggcgtgatcctctaactgagggtgctggaaacttgtccaccaagtcagacccaaggggatccagaggcaggaagctcaaggggggttttcctaggacatttcccagtgggttatggagcatgctcagtaccgagtgtgtgctgctctgggctgaggaatctgagtcctgggtgctccagggtcggtcccagcctgtcagactgagggactgcaggccaaggcacaagtcatttgcatctgggaggccacgggaagattcttgcgcagaggttgggaaaagcatcctgcttgtaactgtttcttcagagtcctggaagtctgttttggacaggagcacagcagaaacctcagagttaagggctgttttccccaatattatcaacagtaaatattattaataatagtttccccaggctcacaggccagacatccaagctggctggatgctgcagccgctgcctctgcacttttggggacgctggggcaagagcagttgccatacaggccccctcccctcacacacacacccctatcccgtctgcattacagactccgct

SEQ ID NO: 351964 - DNA, 1164 bp, Homo Sapiens
  misc_feature (236)..(351): n is a, c, g, or t
atcaggccaaatcggccgagctcgaattcgtcgagagcggcaaaagtacagtaacgaagtattgaaaagaaaattttggagacattggagcatattatatatagctatgtggaaagacataaggctacagatggaatggaacattcctgttttcttgaagaaattcacatacacatagctgacctgactagtacttcagctcttccacagccttctataaaggttctttcttctgnnnnnnnnnnnnnnnnnnnnnnnnnnnnnnnnnnnnnnnnnnnnnnnnnnnnnnnnnnnnnnnnnnnnnnnnnnnnnnnnnnnnnnnnnnnnnnnnnnnnnnnnnnnnnnnnnnnngaattcaaccataaatagtgactattattttcagtgtgtccttcatgtgaaagctattaaggaccaaatatactactgttcacaagaagaaattactttctaaacagtaactgaaaatacttagagttaaacttgctgtggattttgtcttggcagttgtcatcttacattatttgtcaaaggaaatgtgtttggcagttaaaaatctttccttagatttagtggtggactttaacctcttaaataaatgttagtatatcagattgtgtccttgaaaaatattttacttgtatgaatcatgacaacgtctaaatctttactattcttctggcaaaagcatcagtaagaaagaaggcgaaaaagagaagtatagcctttatgtcagaaaaacattctttttagctgcttactttctcatgaaaagtaaagatgtttacagtgtatgccaagttttcagtttctgtataacaacaggtagaggttctaatcatattgaaaattgtgttataatggtctgagccatgttgctaggaaacaataggttccaattttgtattcctgctctcctgtgctgaaaagtgactggatactgtacaggttcatgttctctggctgcagttaaatggtcttttgcattttgctctggctttcaggccagaagcatgcatttttctacaagagcatcacaacaacatgctgtaaatatttaaagttaaacattatgtgttgatatttgaaagaaaagtactttgaatatttcatttttaaaaaataaaattgccaatgaaaaaagaaaagagcataaaataataa

SEQ ID NO: 351965 - DNA, 474 bp, Homo Sapiens
  misc_feature (23)..(23): n is a, c, g, or t
  misc_feature (76)..(76): n is a, c, g, or t
  misc_feature (114)..(114): n is a, c, g, or t
aagaaggccgaaaaagggaaggnaaagcccctaaggtccagaaaaaaaacaaccctttttaagcccgcccaacctncccccaggaaaaagtaaaagaggttttaccagtgtaangccccaagttttccagtttcctgtaataaccaacaggtaagaggttcctaatccatattgaaaaatgtgttaaaaatggtcctgagcccatgttgcctaggaaacaataggttcccaaatttgtaatccctgcctctcctgtgctgaaaagtgactggatactgtacaggttccatgttcctctggctgcagttaaatggtcttttgcattttgctctggctttcaggccagaagcatgcatttttctacaagagcatcacaacaacatgctgtaaatatttaaagttaaacattatgtgttgatatttgaaagaaaagcactttgaatatttcatttttaaaaaataaaattgccaatg

SEQ ID NO: 351966 - DNA, 333 bp, Homo Sapiens
agtagtataaggttactttttttgaattgctcttaatactctttcctcttaaatatttgtgtaaaattacaaatatttattacatttcttgggttcactgaacacaaggcagtatatgaattgaaaggctgttactttgttcctgttacacaagcatataaagatgcttagttcaaaatatcttagatttaatattattttcacattttgacttattttagaacaaatataaagggtcaaaatattaccatagatatttgaatattcccatgaaatatgtcacacccactgaggaattaaacaagttcactaaagaatatcaaattaatcatt

SEQ ID NO: 351967 - DNA, 390 bp, Homo Sapiens
tgggagacattatgaaaactgcattaatgaaaacaacctactgctattcatgctcaacagtagcaagctaaactactgtacttggctcctttgagctacccttattttaagaattataaataggtgtcaacccacacaaagaacagattgtggattaccgtagggaaaaaaatagcttactcaacttactaaaagtttcaacaccaaaaaagatttaacttggctgaaagttctgaaacagctgagacacagaaccaggaagctataatttataatgaaatgttgatacatacttaaaagctactgcagctgtagctatactaaaataagatttcttcaggggttacttaccctgaaatgcaagaatacaagcataacaataatattact

SEQ ID NO: 351968 - DNA, 1043 bp, Homo Sapiens
  misc_feature (854)..(854): n is a, c, g, or t
  misc_feature (858)..(858): n is a, c, g, or t
  misc_feature (876)..(876): n is a, c, g, or t
  misc_feature (893)..(893): n is a, c, g, or t
  misc_feature (903)..(903): n is a, c, g, or t
  misc_feature (919)..(919): n is a, c, g, or t
  misc_feature (933)..(934): n is a, c, g, or t
  misc_feature (961)..(961): n is a, c, g, or t
  misc_feature (975)..(975): n is a, c, g, or t
  misc_feature (1016)..(1016): n is a, c, g, or t
  misc_feature (1033)..(1033): n is a, c, g, or t
gctggtaccggtccggaattccttgcatggttcgcgcgcttcgggcctagtccggactcgccgccgccgccgccatattcccgtggcatcttccttactttgtccatcctccggactcgcgatcttccttccggagccatgtcagaaggagtggacttgattgatatatatgctgacgaggagttcaaccaggacccagagttcaacaatacagatcagattgacctgtatgatgatgtgctgacagccacctcacagccctcagatgacagaagcagcagcactgaaccacctcctcctgttcgccaggagccatctcccaagcccaacaacaagacccctgcaattctgtatacctacagtggcctgcgtaatagacgagctgccgtttatgtgggcagcttctcctggtggaccacagaccagcagctgatccaggttattcgctctataggagtctatgatgtggtggagttgaaatttgcagagaatcgagcaaatggccagtccaaagggtatgctgaggtggtggtagcctctgaaaactctgtccacaaattgttggaactcctaccagggaaagttcttaatggagaaaaagtggacgtgaggccggccacccggcagaacctgtcacagtttgaggcacaggctcggaaacgtgagtgtgtccgagtcccaagagggggaatacctccacgggcccattcccgagattctagtgattctgctgatggacgggccacaccctctgagaaccttgtaccctcatctgctcgtgtggataagccccccagtgtgctgccctacttcaatcgtcctccttcggcccttcccctgatgggtctgccccnacancaaatccacccccaccanctctctcctcaagcttngggtcctccnctcctcctggtatcantacaacatctcatnncccacttctcgattactcctcatctgngtactcccctgggncatccactgccttcactcaatcagcttcttccccacaaagntacaagtgggctcacanatattaatga

SEQ ID NO: 351969 - DNA, 1168 bp, Homo Sapiens
cggcggcgggggggcgggacctggggcggagagcggttcgcgcgcttcgggcctagtccggactcgccgccgccgccgccatattcccgtggcatcttccttactttgtccatcctccggactcgcgatcttccttccggagccatgtcagaaggagtggacttgattgatatatatgctgacgaggagttcaaccaggacccagagttcaacaatacagatcagattgacctgtatgatgatgtgctgacagccacctcacagccctcagatgacagaagcagcagcactgaaccacctcctcctgttcgccaggagccatctcccaagcccaacaacaagacccctgcaattctgtatacctacagtggcctgcgtaatagacgagctgccgtttatgtgggcagcttctcctggtggaccacagaccagcagctgatccaggttattcgctctataggagtctatgatgtggtggagttgaaatttgcagagaatcgagcaaatggccagtccaaagggtatgctgaggtggtggtagcctctgaaaactctgtccacaaattgttggaactcctaccagggaaagttcttaatggagaaaaagtggacgtgaggccggccacccggcagaacctgtcacagtttgaggcacaggctcggaaacgaatacctccacgggcccattcccgagattctagtgattctgctgatggacgggccacaccctctgagaaccttgtaccctcatctgctcgtgtggataagccccccagtgtgctgccctacttcaatcgtcctccttcggcccttcccctgatgggtctgcccccaccaccaattccacccccaccacctctctcctcaagctttggggtccctcctcctcctcctggtatccacgaccagcatctcatgcccccacctcctcgaatacccctcatcttgctgtaccaccccctggggacatcccacctgcccttcacctcaatccagccttcttccccccaccaaacgctacagtggggcctccaccagatacttacattaaggcctctgcccccatataaccaccatggccgccgagcttcgggccctccaacctctaccgtgagtgaagccgcatttgacgatatcatgcagcgaaccagagcgcattccaggtgca

SEQ ID NO: 351970 - DNA, 824 bp, Homo Sapiens
gggggggcggagagcggttcgcgcgcttcgggcctagtccggactcgccgccgccgccgccatattcccgtggcatcttccttactttgtccatcctccggactcgcgatcttccttccggggccatgtcagaaggagtggacttgattgatatatatgctgacgaggagttcaaccaggacccagagttcaacaatacagatcagattgacctgtataatgatgtgctgacagccacctcacagccctcagatgacagaagcagcagcactgaaccacctcctcctgttcgccaggagccatctcccaagcccaacaacaagacccctgcaattctgtatacctacagtggcctgcgtaatagacgagctgccgtttatgtgggcagcttctcctgggtatgctgaggtggtggtagcctctgaaaactctgtccacaaattgttggaactcctaccagggaaagttcttaatggagaaaaagtggacgtgaggccggccacccggcagaacctgtcacagtttgaggcacaggctcggaaacgaatacctccacgggcccattcccgagaatctagtgattctgctgatggacgggccacaccctctgagaaccttgtaccctcatctgctcctgtggataagccccccagtgtgctgccctactttaatcgtcctccttcggcccttcccctgaatgggtcttgccccccccaccaattccacccccaccaactcttctcctttaggctttgggggtcccttcctcctcccgtccggggatccccataccagcaattttcgtgcccccaaccttctcgaaa

SEQ ID NO: 351971 - DNA, 679 bp, Homo Sapiens
gtcaggcgccatctcccagcaatcaagtcttgctccctggcctgccctccggcaccctgggccccgctttccacacagccttgctcctcccggcctggcttgctgcctgcaggcctctcagggtccttcaccgtctctccagtctcggatccggacccgtggatctcagcctcagaccctcctctggccccggccttgccctcgggcacggcccctttcctcttcagccctggggtcctgctccccgagccagaatattgtcctccttggaggtccccaaagaaggagtctcccaagatctcccaacgttggagggagtccaagcccagggggaacttgacataccaccagtacatgcccccagagccgagacagggatccagggcggacccccaagccgaggggtccgaacctgggtcctccgtgggccatctctgtgaggaagggacagactcgcagcagccacatcctaggtatgacacccacttctgttctcccgggacccagaaattcaggtcccagacatcctcctccctcaaagcatcgagtccaagatcagggcgattggggcccccaaaccctctcttatcccagggttatacgagtccaggatcccagacccctcaccttcgacccttacaagaaccgaggtctgaaggcctagtatactcatcaccca

SEQ ID NO: 351972 - DNA, 441 bp, Homo Sapiens
  misc_feature (12)..(12): n is a, c, g, or t
aaggaattacgnccaaatgtgcctcaaagtaatttgccctgccttacaacactgggagaatgtgtttgcccagtaaggccatagagaacacttgccccttaatacccctagtggtggcggtcaagcctaacaagtgtgaaaaaatcctttggcatttttaaaaaagtgcaatcaataaagccagagttctgtcaagaatgagtaagttaacagccagagacagacactgtgcaggcattgcaaatagatggaattacagcaaaatgtgctcaatgtatttgcctgcttacaacactgggagatgtgtttgccagtaagttgctcatcacaagagcaccagacttgggggtgtaatctccggcaacttgcatgccctctgaaagaagggttttctgtgctgtgaaatgcatagaactatactctacctgcacgacaacacat

SEQ ID NO: 351973 - DNA, 1462 bp, Homo Sapiens
ggaagaatatgaggaagagccctctcgggggtggtggcggctcgggagcctccagtcaggccgcctgcctcaaacagatccttctgctgcaattggacctcatcgaacagcagcagcagcagctcagggccaaggaaaaggagatcgaggagctgaagtcagagagagacacgctccttgctcggattgaacgtatggaaaggcggatgcagctggtaaagaaggataacgagaaagaaaggcacaagctgtttcagggctatgaaactgaagagagagaggaaacagagctatctgagaaaattaaactggagtgccagccggagctttccgagacatcccagactctgcctcccaagcccttctcatgtgggcggagtggaaagggacataaaaggaaatccccatttggaagtacagaaagaaagactcctgttaaaaagctggctcctgaattttcaaaagtcaaaacaaaaactcctaagcactctcctattaaagaggaaccctgtggttccttatctgaaactgtttgtaaacgtgaattgaggagccaagaaaccccagaaaagccccggtcttcagtggacaccccaccaagactctccactccccaaaagggacccagcacccatcccaaggagaaagccttctcaagtgagatagaagatttgccgtacctttccaccacagaaatgtatttgtgtcgttggcaccagcctcccccatcaccgttaccattacggggaatcctctccaaagaaggaggagactgtagcaagtaaggcatagagaacacttgctcttataccctagtggtggcggtcaagctaacaagtgtgaaaatgcctttggcatttttaaaaaagtgcaatcaataaagcagagttctgtcaagaatgagtaagttaacagccagagacagacactgtgcaggcattgcaaatagatggaattacagcaaaatgtgctcaatgtatttgcctgcttacaacactgggagatgtgtttgccagtaagttgctcatcacaagagcaccagacttgggggtgtaatctccggcaacttgcatgccctctgaaagaagggttttctgtgctgtgaaatgcatagaactatactttgccatgcacgactgttcctgcaattgatattgtgtgaaatctgggagggtggtctttgggtgttctcaggggccaatggtaatttttgggttggggagccagcttggggtggggaattttcacctgggcctccgctctttaactatataaacatttatctgtatatctatgtccctgtctggggggcaggaggaatctgccaaagaccaacagtcttactttatcttactatacttcacaaaggttctaaaatgtgaagagtttacttggattgcagtagcccattggttgttcatatatttaaataaaatggtctacaaactatttttcaaacaat

SEQ ID NO: 351974 - DNA, 308 bp, Homo Sapiens
  misc_feature (27)..(27): n is a, c, g, or t
  misc_feature (32)..(32): n is a, c, g, or t
  misc_feature (36)..(36): n is a, c, g, or t
cctggccctgacctcgctgggcagagnccggnacangcatgcaagctggcccacccatccagagaagagtttggaggtacatccatacaatgagcctgaaatgtgtacactcctggagcattttcccagacggtgacatagacatgaacccgtaccctttaattgtcatctctgcaggcactcatagatacacagtgcacgggcaaattcaccagtgggccagaccttgcagtgcttggtatccagaagggctgctgagtccagcctgagcccacatacacagtcccacttaccacaggatgtgccca

SEQ ID NO: 351975 - DNA, 1999 bp, Homo Sapiens
  misc_feature (1688)..(1696): n is a, c, g, or t
cttttttaaatctttgagttgtatgagaaagtatttaagttcaccagtgtagtaaacacccaccccagagcagcggtaagcaaacctaaatctgaaaacccattcttactgtctttcaccatgagatgctggttttggtgtaaaatgacagcacttggtttggggttttgcacctgttgggtagaactgttcttgtctgaggtcctcaccctctacagatgggcctcagggcctggaggtgggcagatggggccagagtggccagcagagacttgcatgggctctgaaagccccagagctcaggcctaaggctgctaggtgagaccagcaggcagctgtggcatccgaccttgggacgcccaagctgggcagccgctccatgtgccccaaacaggatattcctcatgaatgtgaggagaggctggctcaagggcttggttttcattttggcctggcacagggtacctgtagggagcactcccccaacctgaggatggtgaaaccatatgatagagactccttgtcgaagtccacatcggactgatctagaatgccccgtggggggattgcatggcctttgccttgagatgcaggtgaaagaaaggaaccaaacaaggcatgagtgtgttggggaatcttcccagtggagcaaacccccttaacacaccagctgttgggaacagctgcccctaaatccaattaaaccctcatctccctggtgctgaacagtctacactggcccaggaagctaacgtctgagccgcttggagagctttggtaaacagaagacactggaagcccactcggtcagcagctgggcatgaggatgtcaggggcctttggacttgaggaaggacagtccaggtgcatggaatcctaatgggcctcatgcagacactggaagcagcccagccccctgcccaataccacagccctggggtgtcccctgacattcctggaggtccctgggcaaatgcatttcctgcctgggttctcagggtaggagaacagagaaggctccaagggtgttgggagtgagccaggggctggtctggggagtgggtctcacgcactgctcaggttggcacgagggacctcccccatcccaacccagccccaagggtcccagcagggctctcagcatggctgttttgagggtacacaggtggctggagaggggtggggcagttgcatggtgggtggcaaagtgtgcatttagaagctgcttcgtggcgttaagaacggggggagagggaccagcactgtaacgttagaaataattccttcttgcagacttgaaaagcatcagtttccctcccacggctgggtttttgtgtctgaaatacatctaattctccagactgcagcccctctcagccccgagcacctgagcgctggggaggcccttattgagctcagcctggagaggggagggtcgcacgggtcccgggggcaggtctcctgcactggctcttcccttctgccagcttggaatttggttctcatcttgccacaggggtgcgtttcctaaagggcagccggagcagctcaaaggtgacaactgagatgcatttctaggcaggggcagggaaggccaacccaccttgcagccagttttctgtttctgtaaatagcagtgtatagagatggaagggcagcgtgggtgtatccacagatgggtttaggannnnnnnnnggatgttttctattacctcattcagcaactttatgtttcacaatgactcaatgatgctttatttatattgtttgtactgtaattaaaaccattgacagacatttcactttgcttgttatttcatatgatcttgttttgattaaatatgccagtttgtattttcctgccttgggatttttttgtgtccgctgtacagtattctaagggaaaaagaaaaagaaagatgtgtaaagtaacagagagaggtggctatggtgtagagacctctttctaataaagaaatgaaaatatgtctacaccgct

SEQ ID NO: 351976 - DNA, 368 bp, Homo Sapiens
catattcattgatcagcaaaaacagtagagctttatgtttgtccagtgacttaggaaattgtggcaattatattatactccgctgataaaattgaggatgttaccagcttgaatataaattactaaagtgagagcaaaccattttcaatgttctgtaaaacagagtaatactgatctgcctaggtaaatttttttccctaggagcttctgatgaaaaattgtagcaaaggcagagagtagcaatgaaatgatagagcggatgctgggattgaaatgtgtttcctctttcagtctacttttttaaaaaggggtttattttttccaataaaaagaagtttgcatttgggggaagggggccaaaaccaatt

SEQ ID NO: 351977 - DNA, 410 bp, Homo Sapiens
  misc_feature (73)..(73): n is a, c, g, or t
taataattccatctttcaaccctcactcctgttttcttctggttcctcaattatgttttcttcagcgtcagtnaaaaaactttcttgtcatgcttcacattttccttagatggtaggtgatttttggatgcctttttatattaatgatgagacatttgggaggtttattcattaatacgcttctcctttatgtgagtagatagggagctggctcttacacttgagggtttttcattttttaaaatacagataaagcagactttaaaggataaaggtggtggttatcagtgttgattaaatcaagttgggctcaaggatttcacaggtcttaaatgccatcacacagactgccatgccaagggcatttctgaatggccattacagattgaagtttccttcagaaaaccaag

SEQ ID NO: 351978 - DNA, 575 bp, Homo Sapiens
  misc_feature (505)..(505): n is a, c, g, or t
  misc_feature (524)..(524): n is a, c, g, or t
  misc_feature (527)..(527): n is a, c, g, or t
  misc_feature (530)..(530): n is a, c, g, or t
gggtcggcactatttcctggaactgcggcggctgagtccttccctgtacagtgtggttcctgcctctcagtgttgcaccccagccatgctcttcccggcacctgcggcccgccggaccctcacctacctgtcccaagtgtactgccacaagggctttggcaaggacatggcactgtactcgctgttgagggccaagggagagagggcctatgtagtggagccgaacctcgtgaaacacatcgggctcttctccagtctccggtacaactttcatcccagtctcctctagggtgccaagagatgcctttctgaagttggccacttcttgaagattcaaatatttatctctttatttagacatggttgcctgcaggtatttcactgtttactgttgttagagatataggcactgggggcagctgaggaacctcaatatgttaaagagccttggcttttggtagcctcctggcaggagccagccagtttgccacaggtccgggacctntccctccacacagccacancgnctnatggcagtctgacccacccagttgagggttgcatttggaacactg

SEQ ID NO: 351979 - DNA, 929 bp, Homo Sapiens
agcggagcgaggaagacgctggctctcgggtcacgtgatgcgccgggagcgtcatcgcctcctccctccccaagatggcgtccttgctgcagtcggaccgggttctctatctagtccagggagaaaagaaggttcgggccccgctctcgcaactctacttctgccgctattgtagcgaactgcggtcgctggaatgtgtgtctcacgaggtggactcccattattgtcccagttgtttagaaaatatgccatcggctgaagccaaactaaaaaagaatagatgtgccaattgttttgactgtcctggctgcatgcacaccctctctactcgggccacgagcatctccacacagcttccagatgacccagccaagaccaccatgaagaaagcctattacctggcatgtggattttgtcgctggacgtctagagatgtgggcatggcagacaaatctgtagctagtggcggttggcaggaacctgaaaatcctcacacacaacggatgaacaaattgattgaatattaccagcagcttgctcagaaagagaaggttgagcgagatcgcaagaaactggcacgacgtagaaactatatgcctctggctttttcggacaaatatggtcttggaaccaggcttcagcgaccacgagctggtgcatccatcagtacccttgccggactttcccttaaagaaggagaggatcagaaagagataaaagattgagccagctcaggctgtggatgaagttggaacctctacctgaaagactattatacaagaacagtaaatttaacagaggtaaccaacccttcagcagcgtctgtacacaagcctgagttccagccagtctggtggttcacagatctatgcctcgccataaacatcttctgatcaaacggtcctggcgctgcgtaaatgtgacatact

SEQ ID NO: 351980 - DNA, 1071 bp, Homo Sapiens
tggtaggctttgaggaccagcttgtccgggcagctgtcgaactggtgggggatcactctctggaagtactgggacatcccctccatgtccagctgcatcagctccgcctggttcacctgcagcagggcgaggcccactcggaacacgatctccagcccctcatacatgaagatgtcaaagacccgggtggcgacggggagtgggaaggtggtcaggaacagtgtgaggaaccaggacgaggcatacatggatgtgtggaagctttgggaacggaagtgggtgttgaggtctgggagctgctcctgcagcatgtactcgaactgatagatgcagagcccgagctcggccatgctgggtttgaaagagctcccgcagccggtactcctgcatcagccgcacgaacacacagaaggcctcctcctcaggcatctgcatgaggagcaggcccacgatgaaggcgcttccctggcagtagcccacctcccggtctaccagcgagtatgccttcatgacgttgaagaggacctcctggcccaggctgtcctggcccttgaagaactcgtgttccgggtaggtgcgggcgatgtccctgcggatcagcttctcgcacggcgaggacatcttgagcagctcggagtactggttcttgacgggcatgtccgtggcgctgcacagaagctgccacacgatggcccggaagtggtgggggatgcccttgcggatcagctccttgagcagcttctccttcctgcgccgccactcctcccactcgttggcgatccggccccacaggatccacgtgtcctcctccaggtggctcaggttggaggaggccgaggagctggacactagcgaggagccactgttccgccgcgagccattcatggagcgcatggacttggagtcggcctccaggagccggttctgctcttcgagcttggccagcagctccagctcatcggggctgaggttctcggagtcagaggttggggagcaggtgggggccgacagggcctcctgggatgaggagtcggggctcagagtggggcatcgccatggtgggtgggcgtg

SEQ ID NO: 351981 - DNA, 1043 bp, Homo Sapiens
gctggaccggtccggaattccctgggatcggggggcggctgagggggccgggccggggctgcggggcgaacggcgcggctaggatccggcggctcagcccggggcggcgaggctcggcacggagatggcggcgcgctcggcgcagacagagctgtgaaccaaccccgctcacggctaacaagcccacccaccatggcgagccccactctgagccccgactcctcatcccaggaggccctgtcggcccccacctgctccccaacctctgactccgagaacctcagccccgatgagctggagctgctggccaagctcgaagagcagaaccggctcctggaggccgactccaagtccatgcgctccatgaatggctcgcggcggaacagtggctcctcgctagtgtccagctcctcggcctcctccaacctgagccacctggaggaggacacgtggatcctgtggggccggatcgccaacgagtgggaggagtggcggcgcaggaaggagaagctgctcaaggagctgatccgcaagggcatcccccaccacttccgggccatcgtgtggcagcttctgtgcagcgccacggacatgcccgtcaagaaccagtactccgagctgctcaagatgtcctcgccgtgcgagaagctgatccgcagggacatcgcccgcacctacccggaacacgagttcttcaagggccaggacagcctgggccaggaggtcctcttcaacgtcatgaaggcatactcgctggtaaaccggggaggtggggctactgccagggaaagcgcccttcatcgtggggccctgctcctcatgcagaaggcctgaaggaaggaggcctctccggggggggttccggccggcttgatgccaggaagtaccgggttgggcgggaacctcttccaaaccccacccatgggcccgaaactcggggcttccggcaatcctaatcaagtttccgaggtaccttgcttggcagggaaacaaacttccccagaaactttaaacacacccatttttccgggtttccacaaaag

SEQ ID NO: 351982 - DNA, 1302 bp, Homo Sapiens
  misc_feature (49)..(85): n is a, c, g, or t
atgtatacgactactatagggcgacctggagcttacgcggtggcggcgnnnnnnnnnnnnnnnnnnnnnnnnnnnnnnnnnnnnnatcaggccaaatcggccgagctcgaattcgtcgagagcggtcctatgctgtcagttggtcttagagacatgggaataaccaagcaatattcagacatctgcactatctggggacagcgctacatagtacaatgatgtcagcagttcagttacttggaacaattaaagattacccttaacagccatgttaatacgtctaaatgctaaaatatactacgagtttttcatagtcttgaaagtatacagttaattacttttcaaagttactgtggtctcatgtttactcttcttgtatctgtgatatgcaaaaagatgaagactcttggcctccaggagtttacattctcatggtgctgttggttcaagcagattgctttagtttattaatgaacattgcttggctattaattatatcctatttggaaggatcccttggtgaacagttttaaaaagcagagggctgtgctaaatttcagggtattgatagcttgagtttacattgtattagccctgctcgttatcatttttttccccagggagctatgcaggtaatgctcattagcatgaatcagaaaagaaaccattctgcctaagagcatcttaaccatccccctaaaccacctatgctctcctgttatagttgtcagtaaatcacgaagaaaattaacagctccttaagactctacatccctcaattctctttcttttcccagagtttgtacatcattctctactcagatggaccaggatttgcatataagccttttaaaactgactagtggtcctaattttaacatttttgtgtatgactcctatcccttttctgaagcagcattgtgatagatgtggagcttctacctgcatttctaagcaattattaacccaacttttgagttgaaacttgcatggatccttgttatgtcccgtaattcctctgaatcaaggaatttattttgcatgcttattaaactcaaactgggtctgattgaaagtgcaagcaatagtgacaggaccttaactctggttttagagtacgaacattctaatgcatgactcaaaatgtccagtgttgtggttactagttattttatatatgcatttgttaataaatgagcaatagagactaagaccaatagcttgaatatattcagattatttttcatggttttaaataaagggattttttcttaccttcccattgaaaaatgggagaagtaa

SEQ ID NO: 351983 - DNA, 1389 bp, Homo Sapiens
ctttttatacagacacaaatatacatctataagaataatatatacataaggaacccctgaaagatggttttggaactggaatcagttagaggatgaaatcagataaaggaaaagcctattttggagcttcccctgttaggaaggatggctgcacctggccccctggcattcctgacgctctaggagggaagggggaggcagtgctggcctcccttgccctgtttttccctcttccagctgacctgtgacttatactgctcttaccgatgatacttttggaaaaaatagagcgtgtatgcaccgccccgtttgtcccatggatatcctggggtgtgagtcggatgggaccacggccctgtttatatttgggtctttatgttggtgctgccaggtctctgagctccagaggtggcctcttggacagatctactgctataggaataaaagacactctgtctcgcaaatggctgcttgtcaacaagcccaaagatgcttgtcggaggacggttatggaagcccttaattcttggttgtgggaaaaggtggaatgacaagttattgattgtttttctgtcgctatttctttcatttgtctagtgaatcagaaaggcttagccaaggccacatctgggaagagtggagaaatttgccacttgacgatcacggattagctagcacctttaagccctgcatttctccaactgacaagtgggtgggggtgatggcacattcagtgtggctatgaagagcgaatcctctctattgtttaaatagattactgtagtttggccaggaatttggcgtcagtggtaacacacttagttaataaaataagccaggcttgcaactaagtatctaactttacaggcccactcacatttgaggcaaggggctattgagtatgtggagagatgtagtgatttaaattcagattatttaagttggatcagctgaagtgtgttttagacccaaaccatctggccccttcgttttgctcagaggaagtaaatgttcacttaaatgaaattgaaaacgccatgtggcaccacaaaagagctctctgtactttccccatgctgcctcaaaagttctgtgagtttcggggtcagtgtcccacccttcacttcccgagggcgggtgagtggagagcagagccaggagctctggcagctgtggacagatgtgcttcctgagcatgggttgtgcctcccatcagtaaaaaaatgtttagttcacttccttaattgtataattatttatttgtaaattatatacatgtactactgtactaaaatattatgtacattataaaacatacacaaaaatagaaatttaaaaaagatgagatgaaaataaatctaagtcaaagttctaatagttaaaccaacc

SEQ ID NO: 351984 - DNA, 1324 bp, Homo Sapiens
  misc_feature (27)..(27): n is a, c, g, or t
  misc_feature (35)..(35): n is a, c, g, or t
  misc_feature (106)..(106): n is a, c, g, or t
  misc_feature (128)..(128): n is a, c, g, or t
  misc_feature (138)..(138): n is a, c, g, or t
cctttggggcctttgtttgaacaaaancaggcccnattttgccgaagaacaagaattggtcctttttaatcccttaataagcaagtaagaatcttgtcccaaaganggccaaccttcttggaagcttnaagaagaccntggcagcacccaacataaagaccccaattataaaacagggcccgtggtacccatcccgactcaacacccccgggatatcccatgggacaaacggggcaggtgcatacacgctctattttttcccaaaagtatcatcgggtaagagccagtataagtcacaggtcagctggaagagggaaaaacagggcaagggaggccagcactgcctcccccttccctcctagagcgtcaggaatgccagggggccaggtgcagccatccttcctaacaggggaagctccaaaataggcttttcctttatctgatttcatcctctaactgattccagttccaaaaccatctttcaggggttccttatgtatatattattcttatagatgtatatttgtgtctgtataaaaaggaggcagtgtgatctcaatggatgaaaagaagtggatgcacatgtgatggagtcagctttacactgaaagggcacaagcctgggtcccagattattgtgatgtgaggcaggagacctgggcatggttctggaggctgctgggaggagaggatggtgctggtggtcggcagacctgctgctggtcaactcagaggaaggaggaggagaaagggtggggttccagctgagacctagagtcaagacctgccctcacacacaaaaaagatgaggagaggagcttgatgagaagagaaagacctgggaagacaacagcccttccagcttctccagcgaggtggtgtctagagcatgcacacaactggcctacaaaatgaggctccatggtggagaggaaaacaagggccagggagagggtctgatgcccggagatgcccaaggacgcaaggagatcaacgccacaaacggcatctccatctcctgggcccacaggctttctgcacccctctagctgcccatcaactgactggagcttggtccaagtggcccctggctggaattgtgctcactgaccccactggagacatctgcccaccctggggtctgcaaatccatgtcagctaagtatcaggcccagtggcatcctttgtggttttgctgccagtcacatggccctggctgagggcagggcctgaatgtgtcttccggaaagaagggtcatccccttccagagtggccagccgggcctcaatccgctccagatcatctgagcccactttgattttc

SEQ ID NO: 351985 - DNA, 462 bp, Homo Sapiens
  misc_feature (26)..(26): n is a, c, g, or t
  misc_feature (40)..(40): n is a, c, g, or t
  misc_feature (62)..(62): n is a, c, g, or t
  misc_feature (213)..(213): n is a, c, g, or t
tgggaaccagctgaagtgtgttttanacccccaaacccanctggcccccctccgttttgccncagaggaagtaaaatgttccaccttaaaatgaaaattgaaaaaaacgcccatgtggcacccacaaaagagcctcctcctgtacctttccccccatgcctgccctcaaaagttcctgtgagtttcggggtcagtgtccccacccttcacttncccgagggcgggtgagtggagagcagagcccaggagctctggcagctgtggacagatgtgcttcctgagccatgggttgtgcctcccatcagtaaaaaaatgtttagttcacttccttaattgtataattatttatttgtaaattatatacatgtactactgtactaaaatattatgtacattataaaacatacacaaaaatagaaatttaaaaaagatgagatgaaaataaatctaagtcaaagttct

SEQ ID NO: 351986 - DNA, 500 bp, Homo Sapiens
  misc_feature (82)..(82): n is a, c, g, or t
  misc_feature (433)..(433): n is a, c, g, or t
  misc_feature (474)..(474): n is a, c, g, or t
  misc_feature (484)..(484): n is a, c, g, or t
gaaggtcaggcctgtaacttccagccctggcttccagctaaggaaccccagttaagactgaaacctttccacaaactctttnacagtgtgaacctgcattcctcatgtccaggggtctggaataccaagtgctcccagggtgaataaggtaacccacgcggaacagcctagggaaaagcgaatctcacagctccagccttctttcctcacaactgaactcctcagcattactgggctgggaggagtgagcgagaggcctgtttggtttcaactcacaggaaggaaagaagacgagacttggtgatgtctgtgattcccccactgggcctcggtgctggttttaaacccaatgcgtgttgcttggattaacctgaacatcaggattttaatttgggtacagagctcagaaactggactctccctctagccattntttggaaatttcagagctgtttggccccctttctttctttngggcataganatcatacagctaccca

SEQ ID NO: 351987 - DNA, 901 bp, Homo Sapiens
  misc_feature (663)..(672): n is a, c, g, or t
tggtactagagtgtctctgcacaccatataagaccatgttgaagacataggcatttcatgtttattttagtagtaaatacctacttcttgattgtcacacccagtttgactgggaccaaaaaaatcctagaataggggagaaaacaaattaccttaaatttttggagccgtatgaagaatagaggcacttctttctgaggcatatgtcagaaaagaaatgctttgtgaatgaaggattagattctgattgcaaaatttgattcctcatagactacatgggttagtttgtgggtttccacaagagtaccttgtcatttgtctgtgttgatcagtggctttttctgtactgtcttcactgcaggtgacctgaaacatatcacgaagctgaaaccttggggcctttttgaggttctagtggagaagtatgagtggtcgcaggaagaggcagctggcttcacagatttcttactgcccatgttggagctgatccctgagaagagagccactgccgccgagtgtctccggcacccttggcttaactcctaagcccctgcccagcaccacagcagagatcacacactgaccctccgcccttccccttcaagcattttcctcttcccttttcagggtgaagctcttccttcaagagtttctagatcttgnnnnnnnnnnaatccaacatggttcatttggggtttgctttactttgacccctgtgggagatcccccacaagccattggggcatcctaaggtgaatttgggcctttggttggggctcctgcccaaagactaattggacctaaaaaggggaaaacaggcctccttggcctggtaaccttttcctttccccttttagggaattcccttttaaaattaataagccatccccttttttggaat

SEQ ID NO: 351988 - DNA, 1051 bp, Homo Sapiens
  misc_feature (63)..(63): n is a, c, g, or t
  misc_feature (117)..(117): n is a, c, g, or t
  misc_feature (788)..(788): n is a, c, g, or t
gctgccaataaagatagtcaaaaagaacaacctgtttgttgttgaccgatctgacaagttggngcgtgtgcaggagttcaatagtggccttctgcactggcagctcggcgggggtgncaccaccgagcacattcagactcactttgagagcaagatggaaattcctcctcgcaggcgcccacctccccccttaagctccgcaggtagaaagaaagagcaagaaggcaaaggcgactctgaagagcagcaagagaaaagcatcatagcaaccatcgatgacgtcctctctgctcggccaggggcattgcctgaagacgcaaaccctgggccccagaccgaaagcagtaagtttccctttggtatccagcaagccaaaagtcaccggaacatcaagctgctggaggacgagcccaggagccgagacgagactcctctgtgtaccatcgcgcactggcaggactcgctggctaagcgatgcatctgtgtgtccaatattgtccgtagcttgtcattcgtgcctggcaatgatgccgaaatgtccaaacatccaggcctggtgctgatcctggggaagctgattcttcttcaccacgagcatccagagagaaagcgagcaccgcagacctatgagaaagaggaggatgaggacaagggggtggcctgcagcaagatgagtggtggtgggactgcctcgaggtcttgagggataacacgttggtcacgttggccaacatttccgggcagctagacttgtctgcttacacggaaagcatctgcttgtgcaattntggatggcttgcttgcactggatggtgtggcccgtctgcaaaggcacaagatcccttttccaactgtgggaacccaactccggtcttggtcgcctcaaaaaactttgtggctgggaaaaccctcctgttaaacttcaggtatcccgggaaccataaatggggggaccctggaatcttgggcccactccccccccatttttataaccccgcccggggagaaaaaattccattgggcccacacattaaaatttagggggcccccc

SEQ ID NO: 351989 - DNA, 1035 bp, Homo Sapiens
  misc_feature (29)..(29): n is a, c, g, or t
  misc_feature (854)..(864): n is a, c, g, or t
gcagttcagcgtcgaaagtgccagaaatnagagaccttctccaaatcactggacaactgtggaaggctgggaaggttaagaaacaacagaggtgaactccaaaaacatagaggcatcacctgactgcacaggcaatgaaaaaccatgtgggtgatttccagcagacctgtgctattggccaggaggcctgagaaagcaagcacgcactctcagtcaacatgacagattctggaggataaccagcaggagcagagataacttcaggaagtccatttttgcccctgcttttgctttggattatacctcaccagctgcacaaaatgcattttttcgtatcaaaaagtcaccactaaccctcccccagaagctcacaaaggaaaacggagagagcgagcgagagagatttccttggaaatttctcccaagggcgaaagtcattggaatttttaaatcataggggaaaagcagtcctgttctaaatcctcttattcttttggtttgtcacaaagaaggaactaagaagcaggacagaggcaacgtggagaggctgaaaacagtgcagagacgtttgacaatgagtcagtagcacaaaagagatgacatttacctagcactataaaccctggttgcctctgaagaaactgccttcattgtatatatgtgactatttacatgtaatcaacatgggaacttttaggggaacctaataagaaatcccaattttcaggagtggtggtgtcaataaacgctctgtggccagtgtaaaagaaaatccctcgcagttgtggacatttctgttcctgtccagataccatttctcctagtatttctttgttatgtcccagaactgatgnnnnnnnnnnnaaggtactgaaaagaaatgaagttgatgtatgtcccaagttttgatgaaactgtatttgtaaaaaaaattttgtagtttaagtattgtcatacagtgttcaaaaccccagccaatgaccagcagttggtatgaagaacctttgacattttgtaaaaggccatttcttggga

SEQ ID NO: 351990 - DNA, 2001 bp, Homo Sapiens
gatttacacatgctggttgagacgggcgagctggacaacacgtacatcgtatacaccgccgaccacggttaccacatcggccagtttggcctggtgaaagggaaatccatgccatatgagtttgacatcagggtcccgttctacgtgaggggccccaacgtggaagccggctgtctgaatccccacatcgtcctcaacattgacctggcccccaccatcctggacattgcaggcctggacatacctgcggatatggacgggaaatccatcctcaagctgctggacacggagcggccggtgaatcggtttcacttgaaaaagaagatgagggtctggcgggactccttcttggtggagagaggcaagctgctacacaagagagacaatgacaaggtggacgcccaggaggagaactttctgcccaagtaccagcgtgtgaaggacctgtgtcagcgtgctgagtaccagacggcgtgtgagcagctgggacagaagtggcagtgtgtggaggacgccacggggaagctgaagctgcataagtgcaagggccccatgcggctgggcggcagcagagccctctccaacctcgtgcccaagtactacgggcagggcagcgaggcctgcacctgtgacagcggggactacaagctcagcctggccggacgccggaaaaaactcttcaagaagaagtacaaggccagctatgtccgcagtcgctccatccgctcagtggccatcgaggtggacggcagggtgtaccacgtaggcctgggtgatgccgcccagccccgaaacctcaccaagcggcactggccaggggcccctgaggaccaagatgacaaggatggtggggacttcagtggcactggaggccttcccgactactcagccgccaaccccattaaagtgacacatcggtgctacatcctagagaacgacacagtccagtgtgacctggacctgtacaagtccctgcaggcctggaaagaccacaagctgcacatcgaccacgagattgaaaccctgcagaacaaaattaagaacctgagggaagtccgaggtcacctgaagaaaaagcggccagaagaatgtgactgtcacaaaatcagctaccacacccagcacaaaggccgcctcaagcacagaggctccagtctgcatcctttcaggaagggcctgcaagagaaggacaaggtgtggctgttgcgggagcagaagcgcaagaagaaactccgcaagctgctcaagcgcctgcagaacaacgacacgtgcagcatgccaggcctcacgtgcttcacccacgacaaccagcactggcagacggcgcctttctggacactggggcctttctgtgcctgcaccagcgccaacaataacacgtactggtgcatgaggaccatcaatgagactcacaatttcctcttctgtgaatttgcaactggcttcctagagtactttgatctcaacacagacccctaccagctgatgaatgcagtgaacacactggacagggatgtcctcaaccagctacacgtacagctcatggagctgaggagctgcaagggttacaagcagcgtaaccccccggactcgaaacatggacctgggacttaaagatggaagaagctatgatcaatacaggggacaactgtgggaaggctgggaaggttaagaaacaacagacgtggacctccaaaaacatagaggcatcacctgactgcacaggcaatgaaaaaccatgtgggtgacgtccaacagacctgtgctattgcccacgaagcctgagaaagcaagcacgcactctcagtcaacatgacagattctggacgataacccagacgagcacagataacttccagaagtccattttagaccctgcttttgctttggattatacctcagcatgctgcacaaaatgcatttttgccggatccaaaagtcaccactaacccctcgccccagaaacctccccacaggaaaaaccggaaaaaaacccaaccg

SEQ ID NO: 351991 - DNA, 1060 bp, Homo Sapiens
gccgccctggctgggggtccataaggcccaagcattttcgttcattaggggctgtagaggtgtaggaagggacaatttgggagggcattggtaatctttcccccattttcaaattcgaccgattacatcattgttcttcactcctgaaaaaggccttcacaacatgcatcagtatctcccacatacacacaccaaacatccatacgtcactagctgaggtaaaacgtcgaaaattgattgactctggagccatccatttaataggcaattttcctttggaagctttgtagtaagtactatcttccatatatcgggataatccaaagtctcctaattttacacaatcatttgaggacaccagaacattccgagcagcaatgtccctgtgtacaaatcttttgctctctagatatgcaagagctgtactaagctgataggcatacaggatcaaagatgctagaaccaaactgtatttccttacttgcaaaaatgacctcagctctccaagtgtgcacagctccatgattatccagacaggattctctgtgatgactccaatcagcttcacaatatgaggatggtcaaactgacgcattgttaaggcttcttgaagaaatttctctctcacgctgtccggaagtacagttttgtacatgttgttaattgcaaccgccaaagctggatgtctcttggactcatataaatgccttgatgtacatctccaaattggccttctccaatacatcgtacaagttctattctttctctttgaatctcataatccctgcttgagggcatggtgtaagtatcttcttcatctataatctcagcactaatcatctgtttctgcaggacaagagcacagatatgttgaaagaggttaaacatctgacctcctggtatttcatataattaaagtaggcaaagcgatctgcttaaatcctctactacgctggatattcttctacactattactcccaccgctctcgacgaattcgagctcgcccgatttgcctgagccctacttcgtataatgatataaccaggatcgccgcaaga

SEQ ID NO: 351992 - DNA, 1115 bp, Homo Sapiens
  misc_feature (4)..(4): n is a, c, g, or t
  misc_feature (18)..(18): n is a, c, g, or t
  misc_feature (21)..(21): n is a, c, g, or t
  misc_feature (27)..(27): n is a, c, g, or t
  misc_feature (47)..(47): n is a, c, g, or t
  misc_feature (61)..(61): n is a, c, g, or t
  misc_feature (67)..(67): n is a, c, g, or t
  misc_feature (82)..(82): n is a, c, g, or t
  misc_feature (142)..(142): n is a, c, g, or t
cccncctcaggccctctnctnttctgnagatgctcatcgccatttgntgctgtctgcatcnctcacntcctctcccgcactnatctgtaacgctcatatttctgccaccagcaccatgcatctgcttgggcatgttgcgatntcttgcgggttccaaacatgatgttgactgtgcaggagcggtgaatctggtgttgctgggtgatgacaatagcaaaaggagaacctcccctgctaacatcctccaaggcttgtgacagtgacacttctgtgttaaggaagatcaagtccactaccatgcccaggtctcgcaccttccgccccacagactcagcatagtcttttgtctgtttgttgaccacaatcacagaacaatcaacggcctttcggcatcaaagcgtctctggatttcctcaaaatatttgacgataaaagctcttctctacgcccgttcctcacgtttcaaacgctcttttgcacgagactgactttctgggcctggagggccccgtccatcaaagctatctctgtaacggtcaaaataagagtcatcctttctcctgcaatagtcatccattcgtaggtatcggtcataagagccttctctcctgtacataggatctcgggagtctctcatgtctctgtatctgtcgtacatggggtctcgctgatctcgaaaatccctagagtctcttagatcacgaaagtctctaagatccctcacgtcccgaacgtcgcgcacactcctgctgtctctgtgatcccgcaaatctctactatgtctgtggtcccgcaagtctcgggggtctcgaatgtctctgctgtcccgggcatcccggccatttctgccatccctgggctctctccttggacttcctcgaattggggatcgatcacgccttgaatctcgactgtctccaaagccatatggatcccttcgtgtggggctgggtcttgatggagccgtattcatatttcttctttccgctgccttattaatatcgctaccagcgcggcgggctcccggccgctccttcgcctcaggcccgccgctgccgcctccgcgtcggcccacctgcccgccgtaggacaaaggcgccaccaaccgaccggcg

SEQ ID NO: 351993 - DNA, 1329 bp, Homo Sapiens
  misc_feature (1078)..(1078): n is a, c, g, or t
atcgggctagtagaggcccgtggtgaatcggccgaggggacagtctgagggagccactgtcccttgtccactgactcactggctggtccgagttttctccgcttctggcagtggcacctccgctgagcttttaaaccaagtcattgggacttagcgtctttctacccggcagggaagggaggagttggcaagaatttggctcacccattccccctgcaagcctccagcgtcgcggagcactagacatctactatgactgacaccgtgttcagcaacagttctaaccgttggatgtaccccagtgaccggccccttcaatcaaagctccaggcaggctggtccgtccaccccggtggtcagcctgacaggcagaggaagcaggaagagctgactgatgaggagaaagaaatcatcaacagggtgattgctcgagctgagaaaatggaagagatggagcaggagcgaatcggacgcctggtggaccgcctagaaaacatgaggaagaacgtggctggagatggggtgaaccgctgcatactgtgtggagaacagctggggatgctgggctctgcctgtgtagtatgtgaggactgtaagaagaacgtctgcaccaagtgcggagtggagaccaacaaccgcctgcattctgtgtggctctgcaaaatctgcattgagcagagggaggtgtggaagcgttctggagcgtggttcttcaaaggcttccccaaacaggtcctcccacagcctatgcctattaagaagaccaagccccagcagcctgtcagtgagcctgctgcccctgaacagcctgctcctgagcccaagcaccctgcccgggctccagctcgaggtgacagtgaagataggaggggcccgggtcagaagacaggccctgacccagcctctgctcccgggcgaggaaactatgggcctcccgtgcgcagggcctccgaggcacgaatgagctcatctagccgagattcagagagctgggacccacagtgggggtgctggagaactccagccggagcccagcaggtttgagacgggccaactcagtccaggcctccagacctgnccccaggctcggtgcagagccccagcgccaccctcagcctggggcagccagggaccccccaggaggaagcagaaccgggtccctgggccagccaggacgctttcccagatccgaagccagaagttggctccggagcgaccctggggaccactgccccacccccggaggaaagaacacggggggaatcggggggctaccccaccatttgggacccaaagaggaacccaaaggagcccccccttccggaacct

SEQ ID NO: 351994 - DNA, 804 bp, Homo Sapiens
caaacccatacggctaaggtagcgaggcctgggttggcgaattcggcacgaggggcagtggcacctccgctgagcttttaaaccaagtcattgggacttagcgtctttctacccggcagggaagggaggagttggcaagaatttggctcacccattccccctgcaagcctccagcgtcgcggagcactagacatctactatgactgacaccgtgttcagcaacagttctaaccgttggatgtaccccaatgaacggccccttccaatcaaagctccaggcaggctggtccgtccaccccggtggtcagccttgacaggcagaggaagcaggaagagctgactggatgaggagaaagaaatcatcaacagggtgattgctcgagctgagaaaatggaacgagatggagcaggagcgaatcgggacgcctggtggaccggcctagaaaacatgaggaagaacgtggctggagatggggtgaaccgctgcatactgtgtggagaacagctggggatgctgggctctgcctgtgtagtatgtgaggactgtaagaagaacgtctgcaccaagtgcggagtggagaccaacaaccgctgcattctgtgtggctctgcaaaatctgcttgagcagagggaggtgtgggaagcgttctggagcgtggtgtcttcaaaggctgtccccaaacaggtgctcccacagctatgcctataagaagacaagccccgcagctgtcagtgagcctgcgtgccctgaaagcgtggtctgaggccagaccctgggcggggtccacctcgaggtgcacggg

SEQ ID NO: 351995 - DNA, 773 bp, Homo Sapiens; identical to SEQ ID NO: 262198

SEQ ID NO: 351996 - DNA, 904 bp, Homo Sapiens
  misc_feature (91)..(91): n is a, c, g, or t
  misc_feature (101)..(101): n is a, c, g, or t
gaaaacatttgagtagaaatatatattcacacataagaaagcagtctcactttattttttgtgcccttttattatcctattttaggcaaanatgataaaancccagaaaataacaggaatgtactagtcctaaaaactggaccttttataaatgaaacagatccgatcacctataccttctctcaaattccaaataatgaggcttactgacctgtactctcagaatcaacttaaataaattttagcttgatttggatgaaatatgtactttcagttgttgacaatccaggtagaacaagtacataaaatgattcctaagtcaaaacatttcatacaaaaggaatggttttaacccagacaaatcaagaggaaatgcactgaattcaaaaacttctgaaacaggcattttttggaccatttataaaatactaaaaagttcagaactgctgaaaaacaaaagtttatataaaataaagccaaggggtgaaaaactatcaaatgtattaaaaccatctaaagccaaatataatataactgaatatataatttagaaacaggtttaagtgcatttcctttgtacaactgactatcacatgtaaaaactggcaattaattaaaatgcaattaaatacagatttgcaagccttctggccattatgtaaacatttaaaaattaactgaattgccaattgaaaaataagagcttacatacgtatcttaaaaaagcacaaatggtgaaagatgcactataaaattgtgtgacaaaacatatgcataccaacaaagatctttttaggcacttgcattcagaaacattccttttataaataagcacttataacagttccactccaaaaaataaacctgattttcccaaattgcacctattagttgagactatatc

SEQ ID NO: 351997 - DNA, 918 bp, Homo Sapiens
ggctggaccggtccggattctcgggatgttttcccaccgcctcccacagctgatgctgcagagcctgagcacctctgaggagctgcagcgccagttccacctcttccagctccagcggctcgacaagttgttcttggagcaggaagatgaggaggaaaagagactagaggaagaggaggtcagaaccatccagtcctggacatgggaccacatcggcgactgcagtggacgtggctgggccgggctgagctgcagtttgggaagcagatactgcatgtgtccaccgtgcagatgtggctgctgctgaaattcaatcagacagaggaggtgtcagtagagaccttgctgaaggattctgacctctccccagagctgctgctccaggcactcgtgcccctcacctcagggaatggccctttgaccctgcatgagggccaggactttccacacgggggtgtgctgcggcttcatgagcctgggccccagcgcagtggggaggccctgtggctgatacctccccaggcatacctgaacgtagagaaggatgaaggccgaaccctggaacagaagaggaatctcttgagctgtcttcttgttcgtattctcaaagcccatggggaaaagggcctccacattgatcagctggtttgtctggtgctggaggcctggcagaagggtccaaatcctcctggaaccctgggccacactgttgcctggggggtgtggcctgtaccagtacagatgtcctctcttgcatcctgcacctcttaggccaggggctacgtgaaacgggcgtgatgaccggcccccagatcctgatgtatgcccgctccagagcccatggggcccctggccgggggtcaggcaaatgtcccctttctgggggagcccaaaccgaaacctcccagccccagaaac

SEQ ID NO: 351998 - DNA, 1807 bp, Homo Sapiens
  misc_feature (1443)..(1443): n is a, c, g, or t
  misc_feature (1586)..(1586): n is a, c, g, or t
  misc_feature (1636)..(1636): n is a, c, g, or t
  misc_feature (1667)..(1667): n is a, c, g, or t
  misc_feature (1684)..(1684): n is a, c, g, or t
  misc_feature (1687)..(1688): n is a, c, g, or t
  misc_feature (1690)..(1690): n is a, c, g, or t
  misc_feature (1693)..(1693): n is a, c, g, or t
  misc_feature (1704)..(1704): n is a, c, g, or t
  misc_feature (1711)..(1711): n is a, c, g, or t
  misc_feature (1725)..(1725): n is a, c, g, or t
  misc_feature (1739)..(1739): n is a, c, g, or t
  misc_feature (1746)..(1746): n is a, c, g, or t
  misc_feature (1780)..(1780): n is a, c, g, or t
  misc_feature (1790)..(1790): n is a, c, g, or t
  misc_feature (1793)..(1793): n is a, c, g, or t
  misc_feature (1802)..(1802): n is a, c, g, or t
tgggctggtacggtccggaatacctgggatattgtcgaccacgcgtctgccaggtggaagccatgaagctgggcgctgtgaagcggatcctgctgggctgagaaggctgtgtgcctgcagcggggcagcccaggtccgcataaagatcctggccagcctggtgacacagttcaactcgggcctgaaggcggaggtcctgtccttcatcctggaggatgtgcgggcccgcctggacctggccttcgcctggctctaccaggagtacaacgcctacctggccgcaggtgcctcgggctccctggacaagtatgaggactgcctcatccgcctgttgtctggcctgcaggagaaaccagaccagaaggatgggatcttcaccaaggttgtgctggaggcgccactcatcacagagagtgccctggcaggtggtccgcaagtactgcgaggatgagagtcgcacctatctgggcatgtccacacttcgagacctgatcttcaagcgcccgtcccgccagttccagtacctgcatgtcctcctcgacctcagctcccatgagaaggacaaggtgcgctcccaggccctgctgttcatcaaacgcatgtatgagaaggagcagctgcgggagtatgtggagaaatttgccctcaactacctgcagctcctggtgcaccccaacccaccgtctgtgctgtttggagctgacaaggacacagaggtggcagcaccctggacggaggagacagtgaagcagtgtctgtacctctacctggccctcctgcctcagaaccacaagctgatccacgaactggcggccgtgtacactgaagccatcgccgacatcaagcggacggtgctgagggtcattgagcagccgatccgaggaatgggcatgaactccccggagctgctcctgctggtggaaaattgtcccaagggagcagagacactggtcacgagatgtctgcacagcctcacagacaaagtcccaccctccccagagctggtgaagcgggtccgggatctctaccacaagcgactgccagacgtccgcttcctcatcccggtgctcaatgggctggagaagaaagaggtgatccaggccctgcctaaactcatcaaactcaaccccatcgtggtgaaggaagtcttcaaccgcctgctgggcacccagcatggtgagggaaactcagccttgtccccgctgaaccctgggagagctcctgatcgcattacacaacattgactccgtgaagtgcgacatgaaatccatcatcaaagccaccaacctgtgctttgcggaggaaacgtgttacaagtcagaggtgctgggccgtggttgatgcagcagctgatgggagcagagccccctgcccatgctgctcatgaggaccgtcatccagtccctgaccatgtacccccgcctggggggcttcgtcatgaanatcctgtcccgcctcatcatgaagcaggtgtggaagtacccaaggtgtgggagggcttcatcaagtgctgccagcgcacaaagccccagagcttccaggtcatcctgcagctgccgccccagcagctgggagccgtctttganaagtgcccagagctccgggagcccctgctggcccatgtccgctccttcancccccaccagcaagctcacatccctaactcnatcatgaacatcttggnggnnanggnaagcaggagcnagaggcnaaggaggcgcctgnggggccttggaggngatgatntggagccctgacttggggcggcccagaacccggnccctaggacntantgggctggnatggc

SEQ ID NO: 351999 - DNA, 1185 bp, Homo Sapiens
  misc_feature (1058)..(1121): n is a, c, g, or t
  misc_feature (1123)..(1123): n is a, c, g, or t
  misc_feature (1127)..(1127): n is a, c, g, or t
cagaataggcggaaccgcctgctgggtcccccatggtgagggaaactcagccttgtccccgctgaaccctggagagctcctgatcgcattacacaacattgactccgtgaagtgcgacatgaaatccatcatcaaagccaccaacctgtgctttgcggagcggaacgtgtacacgtcagaggtgctggccgtggtgatgcagcagctgatggagcagagccccctgcccatgctgctcatgaggaccgtcatccagtccctgaccatgtacccccgcctggggggcttcgtcatgaacatcctgtcccgcctcatcatgaagcaggtgtggaagtaccccaaggtgtgggagggcttcatcaagtgctgccagcgcacaaagccccagagcttccaggtcatcctgcagctgccgccccagcagctgggagccgtctttgacaagtgcccagagctccgggagcccctgctggcccatgtccgctccttcaccccccaccagcaagctcacatccctaactccatcatgaccatcttggaggccagcggcaagcaggagccagaggccaaggaggcgcctgcggggcccttggaggaggatgatctggagcccctgaccttggccccggccccagcaccccggccccctcaggacctcatcggcctgcgactggcccaggagaaggccttaaagcggcagctggaggaggaacagaagctgaagccgggaaggagtgggagccccctcctcttcctccccctctccctctccgtcggcccggccaggcccgcccccgtctgaggaagccatggatttccgggaggaggggcctgagtgcgagaccccgggcatcttcatcagcatggatgacgactcggggctgaccgaggccgcgctgttggactctagtctcgagggccccctacccaaggagacggcagcgggcgggctgaccttgaaggaggagcggagcccccagaccctcgcacctgttggagaagatgctatgaagactcccagcccggctgccgaggacgccagggaacccgaggccaannnnnnnnnnnnnnnnnnnnnnnnnnnnnnnnnnnnnnnnnnnnnnnnnnnnnnnnnnnnnnnngngggnttgactgcgggtgctttgccttaaaaagaaattaaaagatgtgaacttgggctaagtt

SEQ ID NO: 352000 - DNA, 954 bp, Homo Sapiens
gatcaaactcaaccccatcgtggtgaaggaagtcttcaaccgcctgctgggcacccagaatggtgagggaaactcagccttgtccccgctgaaccctggagagctcctgatcgcattacacaacattgactccgtgaagtgcgacatgaaatccatcatcaaagccaccaacctgtgctttgcggagcggaacgtgtacacgtcagaggtgctggccgtggtgatgcagcagctgatggagcagagccccctgcccatgctgctcatgaggaccgtcatccagtccctgaccatgtacccccgcctggggggcttcgtcatgaacatcctgtcccgcctcatcatgaagcaggtgtggaagtaccccaaggtgtgggagggcttcatcaagtgctgccagcgcacaaagccccagagcttccaggtcatcctgcagctgccgccccagcagctgggagccgtctttgacaagtgcccagagctccgggagcccctgctggcccatgtccgctccttcacccccacaggatgatctggagcccctgaccttggccgccggcccagcaccccgggccctcaggacctcatcggcctgcgactggcccaggagaaggccttaaagcggcagctggaggaggaacagaagctgaagccgggaggacgtggggaagccccacttcgtcttccttcgcactctcccctatacgagcggccgggcccagggccccgcccctgtctgaggaacgccatcgtgctttccgtggatgaatgtggtctgagttggaagacccccgggcacatctctacatcagcagtggattactgacattaggggtttcaccgaggaccgtcactgctgggaatctaatctcccgagggcccctcaccaagggagacgtcagcggggggtgcgactctgcaggagtcaacggaccccacaacacctcaacctta

SEQ ID NO: 352001 - DNA, 1484 bp, Homo Sapiens
tggaccaacatattgactcccagcacgccaccgcgatgtccatcttggggaatccgttgctggaagggacccatctcgcccacccttaggggtcgaggtgggcgaagggggaggagagggctggcggggcggggcggggttgctccgcccccggaggctgggctgtgaccagcaggcggctccacagagcagcgggcgcgctcataaagggcacagccgagggtacgtggatcgcggtgcggagactgaggttagaaggcacaggtggcgagatgagccgggtaccagcgttcctgagcgcggccgaggtggaggaacacctccgcagctccagcctcctcatcccgcctctagagacggccctggccaacttctccagcggtcccgaaggaggggtcatgcagcccgtgcgcaccgtggtgccggtgaccaagcacaggggctacctgggggtcatgcccgcctacagtgctgcagaggatgcactgaccaccaagttggtcaccttctacgaggaccgcggcatcacctcggtcgtcccttcccaccaggctactgtgctactctttgagcccagcaatggcaccctgctggcggtcatggatggaaatgtcataactgcaaagagaacagctgcagtttctgccattgccaccaagtttctgaaacctcccagcagtgaagtgctgtgcatccttggggctggggtccaggcctacagccattatgagatcttcacagagcagttctcctttaaggaggtgaggatatggaaccgcaccaaagaaaatgcagagaagtttgcagacacagtgcaaggagaggtacgggtctgttcttcggtccaggaggctgtggcaggtgcagatgtgatcatcacagtcaccctggcaacagagcccattttgtttggtgaatgggtgaagccaggggctcacatcaatgctgttggagccagcagacctgactggagagaactggatgatgagctcatgaaagaagctgtgctgtacgtggattcccaggaggctgccctgaaggagtctggagatgtcctgctgtcaggggccgagatctttgctgagctgggagaagtgattaagggagtgaaaccagcccactgtgagaagaccaccgtgttcaagtctttgggaatggcagtggaagacacagttgcagccaaactcatctatgattcctggtcatctggtaaataaaacaaaggaacttgatgttgagatggatgcttgaggaatattgctgctggttctcataatttctagagtaaatgagggagtccagtccccagtgaactctccttttgtgcttatcatgttttaccttaaatgctgagatcctcatttatgtttgtagttggaaagcaaagctaggtagccatttcttctgttctaccaagttataatagcattcatttccctttatatttccctgaaataaagcacattccaattgtgcaaaaaaaa

SEQ ID NO: 352002 - DNA, 293 bp, Homo Sapiens
  misc_feature (153)..(153): n is a, c, g, or t
aaataaacaggcaagcaaagtttcttgaggcactccttggagggatgaaaaaggggataacccaagaccataaattataaggtcagggaagtcacataagggaaggagaaaaacccagctatgttttatggcaggttggaagaggccttcagnaaatatacaaatttagacccttcctctcccaagggtattgtgctaatggcacagcattttatcagccagtccactctggacatcaggtgcaagctccaaaaattgcaatatgggaccactaataaccaaaatcagtttcc

SEQ ID NO: 352003 - DNA, 1188 bp, Homo Sapiens
  misc_feature (807)..(807): n is a, c, g, or t
  misc_feature (901)..(901): n is a, c, g, or t
  misc_feature (990)..(990): n is a, c, g, or t
agcgggattggaaactggggacagatcattcctgggatgtgacgggcaccagaatgctccctctccaaaggatctaaggaccaaagctgacagtttctttacttggtagctgacagcatctactcctgaagaccggaaacatggcttgtaccatccaaaaggcagaagcacttgacggggctcatttgatgcagatcctctggtatgatgaggaagagtctctctacccagctgtatggttgagagacaactgtccgtgctctgattgctacctggattctgcaaaagcacggaaacttctagtggaagctcttgatgtgaacattggaattaaaggcttgatatttgacagaaaaaaggtgtacatcacatggcccgatgagcattacagtgaattccaggctgattggctgaagaaaagatgcttttccaagcaggccagagcaaagctccaaagagaattgttttttccagaatgccaatactggggctcagagctccagctacccactttggattttgaagatgttttaagatatgatgaacacgcatacaagtggctctccaccctcaagaaagtaggcatagtaagactcaccggagcatctgacaaaccaggagaagtttcaaaacttgggaaaaggatgggtttcctctatctcacattttatggacatacttggcaagtgcaagacaaaatcgatgcaaacaatgtggcttacacaactgggaagctaagctttcacactgattatccagccctccatcatccacctgggggttcagctttctcactgcataaagcanacagtcacaagggggggattcaaaaatggtagaatgggttttaatggggtgccaaaaaactaaagaaaaataatccctcaggatttccagattntgtcctcctaccctttggggacttatcgaacattgggaggggaataactgggggaatttttctggtacaatctcaaattaaaatttttngagtttggatgataaagggcccaagtggggctcgccattcaacttcaattacccaactgggcccccacttttttgatgggcccctgggtgaaaaaaattccaccccttttgcggggcccctcaaaaagggattttttttcacctcctgggacagccaaaaaacccggtttaccccttaagagaaaatccgaggggggt

SEQ ID NO: 352004 - DNA, 895 bp, Homo Sapiens
  misc_feature (795)..(795): n is a, c, g, or t
  misc_feature (813)..(813): n is a, c, g, or t
  misc_feature (818)..(818): n is a, c, g, or t
  misc_feature (840)..(840): n is a, c, g, or t
gggacacagtgaaactgccaggagcaaaaaggcttccaagaaaaagtaccacatcagattggaaactggggacagatcattcctgggatgtgacgggcaccagaatgctccctctccaaaggatctaaggaccaaagctgacagtttctttacttggtagctgacagcatctactcctgaagaccggaaatatggcttgtaccatccaaaaggcagaagcacttgacggggctcatttgatgcagatcctctggtatgatgaggaagagtctctctacccagctgtatggttgagagacaactgtccgtgctctgattgctacctggattctgcaaaagcacggaaacttctagtggaagctcttgatgtgaacattggaattaaaggcttgatatttgacagaaaaaaggtgtacatcacatggcccgatgagcattacagtgaattccaggctgattggctgaagaaaagatgcttttccaagcaggccagagcaaagctccaaagagaattgttttttccagaatgccaatactggggctcagagctccagctacccactttggattttgaagatgttttaagatatgatgaacacgcatacaagtggctctccaccctcaagaaagtaggcatagtaagactcaccggagcatctgacaaaccaggagaagtttcaaaacttgggaaaaagatggggtttcctctatctcacattttatgggacatacttgggcaagtgcaagaaaaaaatcgatggcaaacaatgtgggcttaacacaactgggggaggntaagcttttcacactggnttatnccagcccttccttcatcccacngggggggttcagctttctttcacttgcattaaggccaaccgttcaccaggggggt

SEQ ID NO: 352005 - DNA, 743 bp, Homo Sapiens
gatggttggcttggctaaactctcatccaccaggatattctcaggctttaggtccaggtgtgctatcctgcagttgtgcaggtaccggacagcttccagaacctcccccaggtgcgccctgatcttcccttcagtgaggcttccccatcgcaccacgcagtccaggaggcgaccctggtcagccatttctaagaccaggatgtagctggtgggggtctcaaaggtgtcgaggaggccgacaagcagggggtgctggaggctctgcaggatgccaagctcatgggtgacctggtcgcgcttcatcaacttcttgttcacaaacttagtggccactgctcgcttggttcctttctgatcacatttcttaacgacagagaatctgcccctgccaagctcagccacttcactgtagaaggagtcaaagttgtctttccaggtcaccatgatcccatccatccctggacctaggaccctcaggctggccgacgatgaggctgaacccatgtcattgacagcgatgcacgtgtagatgccgtcatcttccgtggtcacgcccacaatcttcagcgtggcctctcccaggtcactgtaggagatgctgtagtgaccatcgttgttcaaggtgttgtgttcagggcccttccaggtaattgaggctttggggcggccacagactcgacatctaagaacaacggtctcccctgtctcacacgtgacctcactcaatggaatgacgaattctg

SEQ ID NO: 352006 - DNA, 1766 bp, Homo Sapiens
  misc_feature (19)..(19): n is a, c, g, or t
  misc_feature (48)..(48): n is a, c, g, or t
  misc_feature (136)..(136): n is a, c, g, or t
  misc_feature (164)..(165): n is a, c, g, or t
  misc_feature (458)..(466): n is a, c, g, or t
  misc_feature (485)..(495): n is a, c, g, or t
gttccccgagtggctcggnttgttggtcgacccgcacgctgttgtgtngcgacacagacatatactaacgccctccccctccgcggggcgaggagaaacgtgctatagccgccgccgacctgtgtgaccacgcganagagttctagggggtctgtgccttcgtnncttctcacatctatactttaataacatgtatcacatgtagcggctctccacacaagattatgtgttcgagagaggcccgctcagtccagacatatctgttacgaatatagttgctgctcggcgttgctatttccccctataaatagaaaatatctttctggggagcgaacgagtggtgtttctcattcacttgtgagatgtgttattaacacgggtgtgtcgcgcctgagtaaatacaatcaccccacggcagtatataaattatatgagagcggacgtgttcgttttctgtnnnnnnnnnatcatctaaaaaaagaagnnnnnnnnnnnatctatgcagatcgcacaagaatatcgcggcgcggggagattacaatatctaggtgtccacaccccgcagaaaccagggacgcggtggtttttcgccgagagaaaccccacaatattttatttcttctctccgatgttgggcagattatgtaaaattgtgtccccttctggtgagggggaccctcccccaaatttttgggtgggcaccccccccgtatacttgcaatggaccgggcccttttttgcaaaggatgggcacccaggagaaactattccaccaccttttttcccgccaggcttttttccagtccgggccaatttccaggatggttttggaaagagccctaagatattggtttttgcccccaggaagcttgtggttttgctgaggagaaagaacaagcttttcacactggagcaagcaggccccatggcaggatgcctcctagccagatgctctggacaagttattgagccgccctgggcttggctcttcctggatggggtgaggagggcgtgcattcacccagaagggttgctgttagggtctcagacaggcacagggcctgcgcaggcccgggactcacccacatctcctttcctgcttttcccatgcacattctacatgagaccaacctagaccagatccagattcagctgggtagctggatatgagtgttttgagtactaggagcacggaaagcaccctgctccaactcagaagctggtcgtggggggccctggtgccccatggtgggcagccagaggccttcaccaggcaggcccccatcctcctcccagcaacaggagctccggtgtctcccccgactttacataaggtgccgagaggtcactctcctgtgacatcccagacactctggtctgctacttacaactgtcttttgaagccccacaaatgacttattgttctatctttcaggccacttggagtgtaagggcagactcaggacttaaggagactcctgaaagacgtgccccactgggtcacgtagaatcctcgttgcacggtgcttacctaggaccctcaggctggccgacgatgaggctgaacccatgtcattgacagcgatgcacgtgtagatgccgtcatcttccgtggtcacgcccacaatcttcagcgtggcctctcccaggtcactgtaggagatgctgtagtgaccatcgttgttcaaggtgttgtgttcagggcccttccaggtaattgaggctttggggcggccacagactggacatctaagaacaacggtctc

SEQ ID NO: 352007 - DNA, 467 bp, Homo Sapiens
tggccggcatagagcgagacctggtatcttaaaaaacgatgatgatgaacacagaggacggggcactgtgctgggagccagggggcctgggaggagccgagaccagccttttacctcggggttttgaggccaacagggacgacagagacagtttctagttagagccttggctccatttttggatgatttagccccgagttcctgagtctattttacgccccttacgtactttgatagaactaaggaaatagtggttttgagtgaagggaaaggaaacccagaaacattttacgttgcttttacttctgtagtgtagattgccccggcccctctctgagccctgtagcatctgtgatagcttctgtcccttcatcggttcatgtcacagggattttctttcccaggaagcggacacggagagtcagccctaataaatgagcacatgcccggctgtacattttaaacct

SEQ ID NO: 352008 - DNA, 1177 bp, Homo Sapiens
  misc_feature (79)..(106): n is a, c, g, or t
  misc_feature (114)..(139): n is a, c, g, or t
cccgtagtcagagctcatataccgggtcctgagcacatttgatctctgctagctgagtaaagaagtaataatgaagagnnnnnnnnnnnnnnnnnnnnnnnnnnnntggtctcnnnnnnnnnnnnnnnnnnnnnnnnnncgactggaaaggagatgagggcacttgtgaagccatattatatgacacgctctgtgctaggacttttatataccttgtctcatctcttcatctcatataatccttacaaggatctcaaaagtggggaaatccccatataactgaagacgaaagcagttcagaagttcactgatttgccctaaggttcctcaatttgcaaacatcaggccaatgatccaaccccaggtatgtttggcagtgaaggaccagttgagtcacagctgcaagtaaccaccctgcagtggtccctatcttggccgttaacttacattgacatttaacactcaaatttactcagtaacaccagctatcatgttaccccactaaaactccacagcattctggcaacttatctatttaacagcaataaagtaaattgttagcatccctttgacatataaatatttctacaaatagtaattctctagccattcatttggagtatttaaaactcaacattcatagcacattttatgtgacaaagaacttatgttcagaacacaaaaataagtcgtacgtcttcattaaaaacaggtgaagaatttgaacaaacatttgcaaactaaaatacaaatgaaatacactcaacatcattaaacaagaaaataaaattatgagataatcactaataatcactacatatgcaccacagtgattaaaatttttttaagttaagccacgtgacccaacaaggtgcattcactcaagagaaacgcaaatatatgtccactcaaagacttgcacatgaatgttgagagcaggtttatactgaatagcgcaatgtgaaaaaaccccaaaatctagcaaaggatgaagggagaaataaactgtggtatatacatacaatagaacactactcaataataaaaaggattatattcctgatacatgcaatatgggtgaaccgtaaaaatatcatgctgagcaagagaaaccacatactagatgacatgttggtatgctatcacgtacaggaaactgttatgaagacgagtacca

SEQ ID NO: 352009 - DNA, 1028 bp, Homo Sapiens
  misc_feature (15)..(15): n is a, c, g, or t
  misc_feature (17)..(17): n is a, c, g, or t
  misc_feature (60)..(60): n is a, c, g, or t
  misc_feature (74)..(74): n is a, c, g, or t
  misc_feature (83)..(83): n is a, c, g, or t
  misc_feature (92)..(92): n is a, c, g, or t
  misc_feature (97)..(97): n is a, c, g, or t
  misc_feature (112)..(112): n is a, c, g, or t
  misc_feature (124)..(124): n is a, c, g, or t
cccatgacgtttgtnanaaggagacgggaaaactgccaagtgagtcaggcaggggttgtnaggggtccccgtgnagctcggancctagctgncccgncaggccaccacctgnttgcagcagctnttacaggagtatgcactgcccttcatggagaccagcgccaagacgggcctcaacgtggacttggccttcacagccatagcaaaggagttgaagcagcgctccatgaaggctcccagcgagccgcgcttccggctgcatgattacgttaagagggagggtcgaggggcctcctgctgccgcccttgaacctggctgagctcagtcctctggaggaagccgcccagtccctagaaggctggacagagggtctccaggcccttctgactttgttgcccagtggccaacgcccgagtgtctgttttcaggagccccaggtcaagccttgtcccttcctcctcccagcaacagtcccaacaagcaggcttctgagagcccgtggccgcacactggccgccacggaaaagcagtcttctgcacgggacggggagcggcaagtggacagactttgccacggtgctctgctgccccctcctgggcacgtccaggtgagggagggctggggctggcaccacgcacagtgcctaaccctagaaaagccatgtcttcagccgcacatgctcaggcagctaagggaggacgcctgcccacgcctgggacagaaggcttcactgctaatcacatcgtgcatctgtgtgtcctgggagctgcctgctcccggcccaccctctaggaggctctggctcaaacagcaatagggtcttcctcactgaccttggaggatgcctgtggccttgtgataaaatgtgggaaatcacagaaaacaccagaaacaacaactgccagcccggcctggccacaggtgaggtctgtgatttccgagcacgctccaccttgcactcaacttggccttttgattgcacaagcctttgttttcagtcctagtgaataaagttgtgttttctgg

SEQ ID NO: 352010 - DNA, 2147 bp, Homo Sapiens
atcaggccaaatcggccgagctcgaattcgtcgagagcggagggagaactctccactcggaggaggagctggggtcctcttccatcccgtcttcatcctgcctggctgcgtgacctcgggaggcaccatgcaggagctgcatctgctctggtgggcgcttctcctgggcctggctcaggcctgccctgagccctgcgactgtggggaaaagtatggcttccagatcgccgactgtgcctaccgcgacctagaatccgtgccgcctggcttcccggccaatgtgactacactgagcctgtcagccaaccggctgccaggcttgccggagggtgccttcagggaggtgcccctgctgcagtcgctgtggctggcacacaatgagatccgcacggtggccgccggagccctggcctctctgagccatctcaagagcctggacctcagccacaatctcatctctgactttgcctggagcgacctgcacaacctcagtgccctccaattgctcaagatggacagcaacgagctgaccttcatcccccgcgacgccttccgcagcctccgtgctctgcgctcgctgcaactcaaccacaaccgcttgcacacattggccgagggcaccttcaccccgctcaccgcgctgtcccacctgcagatcaacgagaaccccttcgactgcacctgcggcatcgtgtggctcaagacatgggccctgaccacggccgtgtccatcccggagcaggacaacatcgcctgcacctcaccccatgtgctcaagggtacaccgctgagccgcctgccgccactgccatgctcggcgccctcagtgcagctcagctaccaacccagccaggatggtgccgagctgcggcctggttttgtgctggcactgcactgtgatgtggacgggcagccggcccctcagcttcactggcacatccagatacccagtggcattgtggagatcaccagccccaacgtgggcactgatgggcgtgccctgcctggcacccctgtggccagctcccagccgcgcttccaggcctttgccaatggcagcctgcttatccccgactttggcaagctggaggaaggcacctacagctgcctggccaccaatgagctgggcagtgctgagagctcagtggacgtggcactggccacgcccggtgagggtggtgaggacacactggggcgcaggttccatggcaaagcggttgagggaaagggctgctatacggttgacaacgaggtgcagccatcagggccggaggacaatgtggtcatcatctacctcagccgtgctgggaaccctgaggctgcagtcgcagaaggggtccctgggcagctgcccccaggcctgctcctgctgggccaaagcctcctcctcttcttcttcctcacctccttctaaccccacccagggcttccctaactcccccccttgcccctaccaatgcccctttaagtgctgcaggggtctggggttggcaactcctgaggcctgcatgggtgacttcacattttcctacctctccttctaatctcttctagagcacctgctatccccaacttctagacctgctccaaactagtgactaggatagaatttgatcccctaactcactgtctgcggtgctcattgctgctaacagcattgcctgtgctctcctctcaggggcagcatgctaacggggcgacgtcctaatccaactgggagaagcctcagtggtggaattccaggcactgtgactgtcaagctggcaagggccaggattgggggaatggagctggggcttagctgggaggtggtctgaagcagacagggaatgggagaggaggatgggaagtagacagtggctggtatggctctgaggctccctggggcctgctcaagctcctcctgctccttgctgttttctgatgatttgggggcttgggagtccctttgtcctcatctgagactgaaatgtggggatccaggatggccttccttcctcttacccttcctccctcagcctgcaacctctatcctggaacctgtcctccctttctccccaactatgcatctgttgtctgctcctctgcaaaggccagccagcttgggagcagcagagaaataaacagcatttctgatgcccaaaaaa

SEQ ID NO: 352011 - DNA, 972 bp, Homo Sapiens
tcccttgagcacatgggttgagtccagcagattttgtcctgctccgggatggacacgccgtggtcaggccccatgtcttgagccacacgatgccgcaggtgcaatcgaaagggttctcgttgatctgcaggtgggacagcgcggtgagcggggtgaaggtgccctcggccaaatgtgtgcaagcggttgtggttgagttgcagcgagcgcagagcacggaggctgcggaaggcgtcgcgggggatgaaggtcagctcgttgctgtccatcttgagcaattggagggcactgaggttgtgcaggtcgctccaggcaaagtcagagatgagattgtggctgaggtccaggctcttgagatggctcagagaggccagggctccggcggccaccgtgcggatctcattgtgtgccagccacagcgactgcagcaggggcacctccctgaaggcaccctccggcaagcctggcagccggttggctgacaggctcagtgtagtcacattggccgggaagccaggcggcacggattctaggtcgcggtaggcacagtcggcgatctggaagccatacttttccccacagtcgcagggctcagggcaggcctgagccaggcccaggagaagcgcccaccagagcagatgcagctcctgcatggtgcctccttcaagctactcttagtcaagcggagcctcttctaaggtggaaccaaaaagcaacagaggaccttagccctgagagtctgcagggccacgggcgcccaagggaggacttggatgctggggcgaggggcagcctggtcccaccccaccttcgatgtgcaggcctgtgccctccctgccccagacagggtgcctggaaccatccactgagaggaggcggcagggaggagcccggggcagcccgcgcactccctccttccagcaaaacaactgcttgctctgcagcaacaaggacctgtgtttcataagtgac

SEQ ID NO: 352012 - DNA, 784 bp, Homo Sapiens
  misc_feature (21)..(21): n is a, c, g, or t
  misc_feature (37)..(37): n is a, c, g, or t
  misc_feature (66)..(66): n is a, c, g, or t
  misc_feature (95)..(95): n is a, c, g, or t
  misc_feature (108)..(108): n is a, c, g, or t
  misc_feature (139)..(139): n is a, c, g, or t
  misc_feature (294)..(294): n is a, c, g, or t
ggatcaacccacaccctcganggtaaaactttcctcnttttcctagggccgaacagatggaaaaantttcccgaccccaagggaaggttaacgancctggtaacccantcccagcactgaacaaaatggagaatatgancctcactcacctccacagctgtgcctcacccttccatgggaaagagtcggcccctcctactcccagtacgatgacacacaaacccctggctgcactggggattatgggatcggcttctctgaaactctcttactttttaaaaatccctgtagaanggatcaggtaacaggaaaaatggccggtgaattctgtaaaaggaagtgagtagaactgttttgggttagaaaagaagcactttaggcagcccaccatgggaagaaggcgggtcaccttctcactgaagataagagaccaagtgctgatggacagcaacaggcagtgtctgaaaactagtccgataccatcatggtctttgagggaaaatctgattccactggggtttccatgtcaatagtggactcaaatttaaaaagtctccagtccatttccagaagtacaagtgttttctacatgagtagaggaatcagaaagaaaccaactcaactctttccttcccatccctccttaaggtagagtccgactgcttttcttgccaatctttcatttaagtgtctcctcctaactcctttacttctttttcctctttcttctccttcatagagcagaaccttaagtggcctttccttgactaacattcattttctt

SEQ ID NO: 352013 - DNA, 892 bp, Homo Sapiens
  misc_feature (18)..(18): n is a, c, g, or t
  misc_feature (57)..(57): n is a, c, g, or t
cccatggggctgagcccnaaggatgtgtgaagtctggcacgtgacgacaggaagganagagaggttggagcctgggagcacctctgccttgcccaagccagccaaaaggcgggaccctactgtccacggaccaggaagaccctgtcacccagccagccctctgtttctctccccagcgcccctccctgtcgtgtcttcccccaacagtcctcgcccccccaaccacaccgacctgaaaatctgtcagtgacaagaccttgccatcgagaaggaactgagcaaagacaaaaagggggagggagtatgtggtaggcccatcctgctgagctccaggtattaagaacacagtaagcagcgtccaggtccttggcccctcacccagggatggcaagagggtgcaaggtgggggaggactgggcaggaaaggtgaagaagagtggacacaggacgatcactcacgccagtagcagcatccctggcccggggtgacaagtactgggcagtggctgctcggtgctcagggtggaaccaaagagggttcccctccaggtagagcttgcggagctcagccagcagccacagtggtgacagctcccggtgtccttccagcaggttgtatgccaaatccatgtgccgcagattcctcagctgctctaggccatgcaggctccgaagctcattgcctcgcagtatcaggacccccagagcagcccctgagggtcccattcttggcaccaaatgcaggcgattataggagatgtccagatggtggagctcacacaaatcctggcaggggtacaggggagaaaaagattatctcgttgaccaaactctagccagggtcctctgagacctcttctggactaggcctcaaccttggcctatatccgct

SEQ ID NO: 352014 - DNA, 1366 bp, Homo Sapiens
  misc_feature (1076)..(1076): n is a, c, g, or t
ccgtgtcttctgccaccgacctgccaccgagaaggcttcagacttcgggcccacggtcccgtatcactggcttcagagatgcttcccgcctcacacggactccgctcttaaccttatgaaccaagggctgggtcacacaaccccctgaggagagctgtcactcagtcaaggccacctgaggtttccaggagtactccccactgccagggcaaaagtgggcccatgggcctgagccccaaaggatctgtgactcttgaaaattctgtcagtgacaagaccttgccatcgagaaggaaccagtagcagcatccctggcccggggtgacaagtactggcagtggctgctcggtgctcaggtggaaccaaagagggttcccctccaggtagagcttcggagctcagccagcagccacagtggtgacagctccccggtgttccttccagcaggttgtatgccaaatccagggtgccgcaggatccctcagctgctctaggccatgcaggctccgaaggctcattgccccgcagtatcaggacccccagagcagcccctgagggtcccattcttggcaccaaatgcaggcgattataggagatgtccagatggtggagctcacacaaatccatcaggaatccctgacagtcctggacttgattgtggcttaggttcaagaaacgcagagctgacaagaggcgcagggagctgtctaaggcggtcagtgcattgtagctgaagttggcagaaagcagagccagccaagggagggcagagcagaagtcgccgccgcaggctgagaggagctcctctaatgcctggaggctcctgctgcaaatcagggtctccagctgggagtagatgcctcggaggccatgcagacagtggaggggaacacctcggagctccaggtgccgaagggatttgaaggggaaaatcttgatgggccctgtggggccaggaccagcaacatggaccagcttgagtgaaagtgttttctgcagcacatcgaagagaaactgaagctgaagaataacaggggagtcggcaggatgggagggcagagccacaaagcctgtcntggccaaggccccatggccccaggtgcagctcaaatacgtggttcagctgttgcagtgtgggagtcagcaggctcagggtgctacagccagacaggaccacatccccggactcccgcagcaaccccgcgagcttccacaacagggagtccctctgagcggtcgtcatggccacgggacgctggggggcggagccgaacatccccgtctggtcctcctaccagctcagctgcccggcgcctatcaatgaggaaaggaacctcgtgccgaattcgccacccaggcctcgcgt

SEQ ID NO: 352015 - DNA, 1939 bp, Homo Sapiens
aagcttgcggccgcaggggccagacccggaacggctccagagcctccagaagcctccgggtctgggcggcgcttcggctcctcccgagccgcctgctagccccgcgccgcactccatccccacaggctggggacgggcccggtgcggctgtgtgggttcgggagcggagttgcagaatccaaggacccattttgtttctttctccgcactgctttatgggaggcattatggcccccaaagacataatgacaaatactcatgctaaatccatcctcaattcaatgaactccctcaggaagagcaataccctctgtgatgtgacattgagagtagagcagaaagacttccctgcccatcggattgtgctggctgcctgtagtgattacttctgtgccatgttcactagtgagctctcagagaaggggaaaccttatgttgacatccaaggtttgactgcctctaccatggaaattttattggacttcgtgtacacagaaacagtacatgtgacagtggagaatgtacaagaactgcttcctgcagccatgtctgcttcagttgaaaggtgtgaaacaagcctgctgtgagtacttagaaagtcagttggacccttctaattgcctgggtataagggattctgctgaaacccacaattgtgttgacctgatgcaagcagctgaggtttttagccagaaagcaatattcctgaagtggtacagcatgaagagttcattcttctgagtcaaggagaggtggaaaagctaatcaagtgcgacgaaattcaggtggattctgaagagccagtctttgaggctgtcatcaactgggtgaagcatgccaagaaagagcgggaagaatccttgcctaacctgctacagtatgtgcggatgcccctactaacccccaggtatatcacagatgtaatagatgctgagcctttcatccgctgtagtttacaatgcagggatctggttgatgaagcaaagaagtttcatctgaggcctgaacttcggagtcagatgcagggacccaggacaagggctcgcctagatatgatctatgtctctggaggctttgatggaagcaggcgtcacaccagtatggagcgctatgatccaaacattgaccagtggagcatgctgggagatatgcagacagcccgggaaggtgccggactcgtagtggccagtggagtgatctactgtctaggaggatatgacggcttgaatatcttaaattcagttgagaaatacgaccctcatacaggacattggactaatgttacaccaatggccaccaagcgttctggtgcaggagtagccctgctgaatgaccatatttatgtggtggggggatttgatggtacagcccacctttcttccgttgaagcatacaacattcgcactgattcctggacaactgtcaccagtatgaccactccacgatgctatgtaggggccacagtgcttcgggggagactctatgcaattgcaggatatgatggtaattccctgctaagtagcattgaatgttatgaccctatcatcgacagctgggaagtcgtgacatccatgggaacccagcgctgtgatgctggtgtttgtgttctccgcgagaagtgaccattgttggagcaccatccagagctagtgaccagtccagtggacagttagtgggagaatcaaaaatcctttccagaatgtctgtttctcactacgtgcaccgggtgattacaggcaccagtgcagtgatgattgtacttatttgacacatactccccgtcgtcctggttcttgttcctgagaagggtgggtaacagatattccaggaaaaagaatgccattgaatggatgtgagagaacacattgctctcccactgctttggggagcactttcctgtcatttctaacttaccacatgcttggtgtactatatgtat

SEQ ID NO: 352016 - DNA, 1151 bp, Homo Sapiens
agcggtgtcatgtcttgggtttgatgtcgttggacagaaaagtgtatcaattattttaaatgaatttttccccatgtttgaggcttagtctgtaaatgtgttgctgtaacagaaaatacttgggtatgcattacttgaatacttgaaaactgaaattaataagatgtattacataatgaattagatttctctgaacagtttttacactgaaaatcttcatttctggattgcagtttgaaatggaatgaagacctgaattatttgggtagaaaaaattatgatagtgcttataagaactgtaaactgttttaaactattttgtgtttgacgcatcaaacttcaagttttgtgtaagtttctctcctgaaattttctttctcttctatactttatgcacttactatactactgatgtaataaaagagcagggttaaaaatattgtatctgtattcattgtgaatcctgtagcttttctagttaacaaaaaatcgctttctaaaatactcttaatcccattgttttggttaacatcttacccatttgttgtatttcaaatgccattaatcattttagtacaacacctatgtttataaaaatttgaaaacattacatattgtatttaaaactaattagtgaagagtaagaaaaaaactagccaacagaattgtaggtgatgcattagttaaatttcaaaactcataataaaggaactttcagagattggttgaaacccagtggtatccctgtaaattagctcctgtgactggaaaagaccccaaaaaggcagtagaggagattagtgtttacttgctgtggttgtggtgtgctgctacttaattataggtagtgacacactgaaattcttatttgtccaataatctgaagtagtttcctatatttatctgtactaaattgactataaattgagtctgcaaagaggaaactttttgactgtactgtatttaggagcctttgtacagcttggtcaaatttccatgatatgaagtatttgagttttaaaatatactgttattaaaaggaaaaagacatggccattattccatgtgcttaaatgataatttccttattcagtttcagaagaaaaagaatgaaattggggtaactgggtcattgcgtttagctttatgtt

SEQ ID NO: 352017 - DNA, 2631 bp, Homo Sapiens
  misc_feature (19)..(19): n is a, c, g, or t
  misc_feature (32)..(32): n is a, c, g, or t
  misc_feature (1935)..(1935): n is a, c, g, or t
  misc_feature (1975)..(1975): n is a, c, g, or t
  misc_feature (1981)..(1981): n is a, c, g, or t
  misc_feature (2297)..(2297): n is a, c, g, or t
aaaaaaaactcaaatatgntatatatatacangtagaacgacaatcagaagggtggcttatttatgattgctcagttcactataagctcaaatactgaacatcacaatgtggacaagacaaatatcaacaaatgtgttttcagctctaatattcagctggcatcagaaaaatgctccagcttacagacagagttggacaaagttagtgtcagcactaaagatatatgttgcaacacagaaccaactattaaaatcaaagcattactcaaggatcataactcaggaacataaggacaatctgaggccagcaattaaccattactaattttcttggtccccttcagggtcattttgattgtctgttttgccttgcagttccttagcaaatttctcaactttgtggaatgcagaaataagcggctcaatattgaaatcatcatcagagaacactgtttcttttttgatattgttgccaatattctcaaatattgcaagaacaatttgaatattgtcatttgtctcttccctgttaaagaggcctataaattctgacactgcttcagcactgagtagttcttttgtcatgaaaagattttcagacaaattcagtagcattttcaaaacatgaaaccttgttttggcattgcctgtagctaataaggagagaaacccagacatataattggcaaccagtgtgtgatagtcagtagtagtagtgagatgtctaatcatccttattccagacagctgttccggggaatccacgctataagcaagggtttcctcacacactttacatatgtatgtctgaattatgtttagattcggataaggtggggccatgcgaatcatattttccaaaaaacttgttctaactcgggaggacggataattaagcaaggtttcaataagtgagacaacacctgaatctcgaatgaaatctcgggtaaattgagaagcacttctcatacccattgcgattttagatatttcatgaataaaaggatcccgaattttttccattaataaaaggagttcttcaaactcttcagaaccaattttcagctcacattgtatgcagttacaggatgaactctcaggctctgtactctccttggccctaagatgctctcgaatttcctggactgacctgtaggaaggatcatactgaaatgggaactcaggactaggctgatcaggctgaagcaaagattcctgatcttccccttctgggctaagtaccatgttcctgggtttgcccccaaacatttcacagaataaagatgctgcctctttcggaaatctaaaggggcttatagatgggaagccgaccctaccccatggaccaggcttgaactgaacagtgacctcctcccaactctgaggcctgcgtgaaggatcaggctcctgttcaactgaacacgtggacctgcaaatggccctgaacacggggctaggatttgattcaaaatgggcctcatctcctgcccagaaccaggaccccactatggcctcatcttcatcagctaatgtcctggacccacagttgcttccattgtcagtcctgttatctacctcatcttcagcctcaaaccaagaccccaacaatggccccttcctcattttctggcttggactcacaggtggccacagttcccagtttccttaatggctttgtctctagaccagaaccaggactcaacaatcatctcttcatcatcctctggcttggatacacagcatggtcctgcttcttcactgacttcttttccatcccagaaccaggacccaaaaatggtttcctcttcagtctctgactccatttcctctactgcctgagatccagcctgtatactggcttcttcttcaggccagaaccaggacccgaacagtgatttcttcctcctcagtcccaggctttgatctcaaagcccnatctcctgctcacatgcccgccggaacttggccttcttcnttcccnagaacccaggaccccaataagtgacattcttccctcgttcagcttttaggacctggagtttgctgcaagagcccagcctctcgttcgtaagtggtctcttctctggccccaaaccaggacccaacaataccttctttctcagctgctagcctgtcttcttctctagtctcagcagctggctctagtctgtcctcttctccagcccagaaccaagaaccaataatgtccccctcctcagcttctggcctggactcttctctgtcagtagcctctgaaatggcttcatcttctttccagaaccaggaagtgtgattantggtctcctcttcagtcagtatatcttggccttttctccagtcccatctatattgactctcttctgtagtcccataaccaggaccctataatggcctctggctttgtgtattttctggaccagaaccacgaattgacaatgtcctcttcctcctctggcctagacttccaacttcctccaccggcaggatacatacagggttctttttctgcccagaagcaagacttattattggtctctctcagcccctgccataaatctgcatctgacaccagtcccatgcttcatactgacctcttctttggctccaaaacatggtatcatggcctcttcc

SEQ ID NO: 352018 - DNA, 1207 bp, Homo Sapiens
  misc_feature (49)..(49): n is a, c, g, or t
  misc_feature (56)..(56): n is a, c, g, or t
  misc_feature (92)..(92): n is a, c, g, or t
  misc_feature (115)..(115): n is a, c, g, or t
  misc_feature (150)..(150): n is a, c, g, or t
  misc_feature (157)..(157): n is a, c, g, or t
  misc_feature (211)..(239): n is a, c, g, or t
  misc_feature (288)..(288): n is a, c, g, or t
  misc_feature (296)..(296): n is a, c, g, or t
  misc_feature (319)..(319): n is a, c, g, or t
  misc_feature (328)..(328): n is a, c, g, or t
  misc_feature (410)..(410): n is a, c, g, or t
  misc_feature (412)..(412): n is a, c, g, or t
  misc_feature (414)..(414): n is a, c, g, or t
  misc_feature (421)..(421): n is a, c, g, or t
  misc_feature (428)..(428): n is a, c, g, or t
  misc_feature (451)..(451): n is a, c, g, or t
  misc_feature (483)..(483): n is a, c, g, or t
  misc_feature (516)..(516): n is a, c, g, or t
  misc_feature (531)..(531): n is a, c, g, or t
  misc_feature (1085)..(1086): n is a, c, g, or t
  misc_feature (1088)..(1088): n is a, c, g, or t
  misc_feature (1098)..(1098): n is a, c, g, or t
  misc_feature (1108)..(1108): n is a, c, g, or t
  misc_feature (1123)..(1123): n is a, c, g, or t
  misc_feature (1125)..(1125): n is a, c, g, or t
  misc_feature (1131)..(1131): n is a, c, g, or t
  misc_feature (1140)..(1141): n is a, c, g, or t
  misc_feature (1152)..(1152): n is a, c, g, or t
  misc_feature (1154)..(1154): n is a, c, g, or t
  misc_feature (1159)..(1159): n is a, c, g, or t
  misc_feature (1161)..(1161): n is a, c, g, or t
  misc_feature (1165)..(1165): n is a, c, g, or t
  misc_feature (1167)..(1167): n is a, c, g, or t
  misc_feature (1178)..(1178): n is a, c, g, or t
  misc_feature (1189)..(1189): n is a, c, g, or t
  misc_feature (1200)..(1200): n is a, c, g, or t
  misc_feature (1204)..(1204): n is a, c, g, or t
cagactaaatagagaacaatatatttaaaaaacgaataaaagggtagcntacttangagaaaaaattcattaaaaacttaataatgaaaaanaaagcaatcatggacagcaaganaaatatcaacaaatgtgttttcagttttgatattnatttggnatccacaaaatgatcaagctcaaaacaagagtttgacaaagttaacatcagcannnnnnnnnnnnnnnnnnnnnnnnnnnnnagaatgtgaacaccaaagcactactcagggctctttgggaacataaggntgatcagnggcaggtggttaatcatattaantttgttgtnccacctcaggataattttggttgtctatttgggcttgtagttgcttagctaactcctcaaattcacgaaatgcagaaataancngntcaagantgaaatnatcatcaattaaggacatctttncactttttataatgttactgatattctgaaanattttaataaaaatttgaatattatcatttgtntcttctatgttaaanagacccacaaatattgaaagagctttgagaaatgaatagtttttttgccacagcaggattttcagacaaattcaatagcattttcagaacgtgaaacttcgttctcgcattggctgtggttaataaggagagaaacccggacatatagttggcaatcagttgtgtgatagccaatagtcatagtgaggtgtctaaagcatcccttattcccagtcagctgctcaagggaatccacactatgtgcaagggtttcctcacacacttgacatatgaatgtctcaatcatgtttagatttggataaggtggagccatgtgaatcatattttccaaaaaacttgtcctaactctagaggatggataattaagcaaggtttcaataagtgagacaacacctgaatctcgaatgaaatctcgggtaaattgagaagcacttctcatacccattgcaattttagatatttcatgaataaaaggatcccgaattttgtccattaataaaaggaattcttcaaactcttcagaaccaattttcagctcacattgtatgcagctnngngcccactctngactctgcantctccctggcctaanangtctgnatttccggnntgacggaggangntaaantnaatntnaataggatagntgttagctaanaaaattctgtntttnctt

SEQ ID NO: 352019 - DNA, 713 bp, Homo Sapiens
agcggggtttctctccttattaaccacagccaatgcgagaacgaagtttcacgttctgaaaatgctattgaatttgtctgaaaatcctgctgtggcaaaaaaactattcagtgccaaagctctttcaatatttgtgggtctctttaacatagaagagacaaatgataatattcgaattgttattaaaatgtttcagaatatcagtaacattataaaaagtggaaagatgtccttaattgatgatgatttcagtcttgagccgcttatttctgcatttcgtgaatttgaggagttagctaagcaactacaagcccaaatagacaaccaaaatgatcctgaggtgggacaacaaagttaatatgattaaccacctgccgctgatcagccttatgttcccaaagagccctgagtagtgctttggtgttcacagtctgtttttttgttgtaacttatattttttaatgctgatgttaactttgtcaaactcttgttttgagctggatcattttgtggatgccaaatgaatatcaaaactgaaaacacatttgttgatatttgtcttgctgtccagattgcggtatttttcagtattaagttttcaatgaactgtgtcacctaagtaagctaccctgctattcgttgtttaaatatatggttctctatttgagtctgtgttttcaataaagttctatgttacacattgcgcaaacacc

SEQ ID NO: 352020 - DNA, 1033 bp, Homo Sapiens
  misc_feature (990)..(990): n is a, c, g, or t
aaaggacgggccccccccgacggtaataccaaattcgcctggctggtccctgaccgccaacacggttggctcaaaagaaacttacctgctggtgcgacagttctgacctgttcagcccctggagtcgattgaggcagacatccaatctccaggccacaccacttgactaggaaatgtgtggagggctgcccaggatctcccaggccacacgccaggcaatgaaagattaaggcatcaggtgacacagtgtggactaaggagtccctgaataagccagggtacccttctgttaggggagggaaagcagacgcaacaagcagctgagccttgctggacagagccatccgcaagtactgccacttcaaattcttggaccagttttgtcccaaggccaccttttctgctgaaggcagtttggcctgagctaaatacccagggttttctagaaaggaaatggaagggaagcgggagatgggagatagcagaaagtaaaaagtggtggaaggagaggaacagaaaattgcttcttaggagtggagaggaaagagaatcagcttaggtcttcagtcccagctgaggcagctgaagagtctacctgctccttcccctactggaactcctacccttgccccagttctgcaggctgcagagtccagtgaaacaagagtttcctgaagactctttctcctcctaatccttaaatagttttaaacctcataccactaccctagcccaatgaaccccacataagggttcaaacttccgcctccctcagggaagcctggggaaagggatggcccttgtgaaattacaccaggtctgtggggagctctgggttggaggcacagggccagctgggacaggtagcgcatcccccaaaatttgccactccaggatgtgggccccatttgttcccagagcccagacgccgggcctgccctggttggcaggatgaatgcctaatgaaacacagaggctaaaaggagagantggccatgccctgctgctgcctgctcatacataggtacttggg

SEQ ID NO: 352021 - DNA, 458 bp, Homo Sapiens
  misc_feature (316)..(316): n is a, c, g, or t
  misc_feature (351)..(351): n is a, c, g, or t
  misc_feature (372)..(372): n is a, c, g, or t
  misc_feature (436)..(436): n is a, c, g, or t
gtatttagctcaggccaaactgcctcagcagaaaggtggccttggacaaaactggtccaagaatttgaagtggcagtacttgcggattggctctgtccagcaaggcctcagctgcttgttgcgtctgctttccctcccctaacagaagggtaccctggcttattcaggggactccttagtccacactgtgtcacctgcatgccttaatctttcattgctggggtgtggccttgggagatcctgggccaacccctccacacatctccctaagtcagagtggctgctggccctggtagatttgacttgctcttgcctnaatcgacttccaaattggactgaagacaattggtnaagaagacttaagttcggggnaagtaagccaggggttaaggtccttcctttttttgaaagccaaagacccagttgcattgtgctntgaatcaatggtagaacttcca

SEQ ID NO: 352022 - DNA, 1403 bp, Homo Sapiens
  misc_feature (810)..(847): n is a, c, g, or t
  misc_feature (1193)..(1193): n is a, c, g, or t
gtgggtagaggcacttatctctgggaaatttgcctctcttgggactctccccctcccaggcattttccattcctggaaaggctcctttggggttcagaatccagagaccaaaccctgacccacctccttcctttcctccagcccacgctggtctgtccccatgccttcccagggcttcttcatgtcagatgcacccaagtccttagcccagctgtgccacctgcaggagttcgctcttgcgtttcttcccctccccaagaagggagggggctacttcaggcccttctgtgtgttgcctggcaggataccttgtccaaccagctacccacctcaactcccctgtagtttaggacacaaaaacagctaccagcggtacagagcggtgatcaaagccgagtacttacaactctggtaagcctagcttctccgcctcagcccttctgcttctggaagggctatcctgggggtgaacttgaaactctcatcaggcttctgcaaaagctcttcttcctgaagacagacccagcctttgtgctctcaccctccactctggtaaagctgcacctctgggggaatgaggggctgcaggaatctctggagagcctggtgcttcacgatgctgctctggtgattcttgtacctaatctggtgtgctcaccaatgagtgaaagggatcgtgggtcagggacaccgagagagtgaggtcacttccacttcaaaccttcagtgagggggtgggatggagaagaatgctgaatcttttttttgacgggatggggtttttctctctgtaattatttctttagtttnnnnnnnnnnnnnnnnnnnnnnnnnnnnnnnnnnnnnnggggcgcgcgccgcctcttagaggttctcccccctccgagagggggcccccagcccttttggcgcccgttccccccttttttttgtgctacacaaggtgggcccccctatttgtgaggcgccgtttattattagcgctctgggccatggtggccccctcgtttacaacacacctgctgggcgaccgtggggcaccagcggctcgtcagcctgggggcaaccattgtggttcaaacggggcacccccccatatacctaaacccgtccgggggatccgacacacccacacttgtgggcgacccacaactatccccccccactgcggcaaatttttttaaaacgcctcncccatacgggccgcaccatttctataacccaactcttccacccagagcggggttaataaaccgggtggtgggtctacaccccaacacgcaccgcgcaaaattgttcacgtaggctagcgttgagtaaacaagaatatttacggcctacacaccgaggcatattcttgcgtacttgtctcgcacccacttttttttaccacccgcgaggcc

SEQ ID NO: 352023 - DNA, 1613 bp, Homo Sapiens
  misc_feature (1319)..(1473): n is a, c, g, or t
agcggaagacaagagagaggaagcttgaagccaatatggagtccgtcagttgctccgctgctgctgtcaggaccggagacatggagtcccagcgggacctgagcctggtgcctgagcggcttcagagacgcgaacaagaacggcagctggaagttgaaaggcggaaacaaaagcggcagaaccaggaggtagagaaggagaacagccactttttcgtcgccacctttgctcgggagcgagcggccgtggaagagcttctggagcgcgcggagtcggtcgagcggctggaggaggcggcctctcggctccaggggctgcagaaactaatcaacgactcagtttttttcctagccgcttacgacctgcggcagggacaagaggcgctggcgcggctgcaggcggccttggccgagcggcgccgggggctgcagcccaagaagcgtttcgctttcaagacccggggaaaggatgctgcttcgtctaccaaagtagacgcggctcctggcatccccccggcagttgaaagcatacaggactccccgctgcccaagaaggcggaaggagacctcggccccagctgggtctgcggtttctccaacctggagtcccaagtcttggagaagagagccagcgagttgcaccagcgcgacgttcttttgaccgaactgagcaactgcacggtcagactgtatggaaatcccaacaccctgcggctaaccaaggcccacagctgcaagctgctctgcggtccggtgtctacctctgttttcctggaggactgcagtgactgcgtgctggcagtggcctgccaacagctccgcatacacagtacgaaagacacccgcatcttcctgcaggtgaccagcagggccatcgtggaggactgcagtgggatccagttcgccccttacacctggagctacccggagatcgacaaggacttcgagagctctggtttagataggagcaaaaataactggaacgatgttgacgattttaactggctggcccgggatatggcctccccaaactggagtattcttcctgaagaggagcgaaatatccagtgggactaagcagttgtcactctgttcttcactcctaccaaatactttccacgttggactttcccccttattgggtctcgaagtttacttattgtcacactgtgtatgttttcagcattttaaggctagagattgtaatgggctcctacttgtaatttccattaaattcgtaacaggtataacactaaagcatttttgctattttcgtcatgcctttgaactgagtcttactccgtcccccacgtggtggcnnnnnnnnnnnnnnnnnnnnnnnnnnnnnnnnnnnnnnnnnnnnnnnnnnnnnnnnnnnnnnnnnnnnnnnnnnnnnnnnnnnnnnnnnnnnnnnnnnnnnnnnnnnnnnnnnnnnnnnnnnnnnnnnnnnnnnnnnnnnnnnnnnnnnnnnnnnagccagggctttatttatttatttttaccacaatagtttgaagcagtaagggggaaggagggtgattatattgctttgtaatggtttgtgatacttgaaacatcacggtgcataataaagtaggtctgcagtaaaaaaaa

SEQ ID NO: 352024 - DNA, 1734 bp, Homo Sapiens
gctggagcagtagaagccaaggccttttttctgcaagtaatgatgtaggttatttgcagtctctgtaaccaccatccaggccagtacgcagtatttagctggggaccaagggatgggattccctactctaagaaaatacctttattttaattattattattttttgagactccatctcaaaaaaataaaataatgaagtggaatcaaggtggcaagaaaatttagaatcgtttctgatagggactttcccttatcctaaatgtgttttgaaggcacacgttatttccattgtcattctgactttagaaaggcaggttggggcatgagtgggcattttcctaatgacttgctgctaggaggttataggcagggaacagtctgggagtctctaatccagagagactttcagattccctctcttcacatgaacctccattagttagattttgggaaagtgagcatgaagaagggactcagagctgccaggtacccgagtctcaggtctgacatccttgggccccttctgccacaacttgccacttcacggacttgaattatgttgcttcttcctggaagtctggcctgcagcacaggcctttcctctccaaaaagctgctgctcatttctggccccatctgctgctatctttgccatcagccatcacagtttggcatcatcagagtctcagctagaggagctgtcattctgccttagtgtttgcctgcgacctgaccaggggcatgaccagctgggatgtcaagtgacatttgggaacttgtagaggccaaatgattgaacagtttaattcttctcaagacccactgatttgccagtgtgcatggaaataatacgattagagcagaaactagcagggactgttgtataatcgtgatctactagcagaattgggcccaaagagaaacgaatttctgaggctgggtttcttctgggagggtaccaggttggccttggccagtgctctgtttcccaccagtgttgttcccttttccagcttgcctggcccggctctgtcttccagggtcctgctccagacccctctgcctggggtctcccctccatccagggggttctgggcatcacagctcctttttttcctttctcctctcccagatccagtttcagctggtttgcttcttccagcaggcacccttaggcccaggagcagctcccctgagagaatttgagtcactcatttccttgaacagcacccccctttatactagcagccatttgtgccattgcctgtgccctagggtttgtggggagagagcgagggatcactgagcagttttcccagagctccatgggaaggcaagctctccctcccaatgggagccccactgtcactaactgtaaactcaggctcaggcttcaactgcctacccccatcctcatatttctgtctgtcccagcacctcaggagcattctcattgtggccggctaactccgcctggatgtgaacaggcaagcacagtgggaaatgagtcacgtacttgtattgcacagtggacacctctagaggtccattggtttaaagggatagggaaggaggagggatgagaccatcaccccctcccagaagtaaatctagtatctgagttttctttatgcccttgagtcaaactaataactgtctagtacggaggtgtttgctggttttcttcggtgttttttctaatgcaataaactcatttctgcctgctgaaaaaaaa

SEQ ID NO: 352025 - DNA, 413 bp, Homo Sapiens
  misc_feature (17)..(17): n is a, c, g, or t
cccctccccaaaggganccccccactgtcaaccaaactgtaaaaactcaagcctcaaggccttcaaactgcccctacccccccatccctcataatttcctgtctgtccccagcaccctcaggagcattcctcattgtggccggcctaactcccccccggatgtgaacaggcaagacacagtgggaaatgagtcacgtacttgtattgccacagtggacacctctagaggtcccattggtttaaagggatagggaaggaggagggatgagaccatcaccccctcccagaagtaaatctagtatctgagttttctttatgcccttgagtcaaactaataactgtctagtacggaggtgtttgctggttttcttcggtgttttttctaatgcaataaactcatttctgcctgctgc

SEQ ID NO: 352026 - DNA, 1735 bp, Homo Sapiens
gtggtcaacgtgtccccctacctcaagagcctgtccatggtgaccgccaacaagttgctgcacctgctggaggccttctccaccacctggttcctcttctctgccgcccagaaccaccacctggtcttcttcctcctggaggtcttcaacaacatcatccagtaccagtttgatggcaactccaacctggtctacgccatcatccgcaagcgcagcatcttccaccagctggccaacctgcccacggacccgcccaccattcacaaggccctgcagcggcgccggcggacacctgagcccttgtctcgcaccggctcccaggagggcacctccatggagggctcccgccccgctgcccctgcagagccaggcaccctcaagaccagtctggtggctactccaggcattgacaagctgaccgagaagtcccaggtgtcagaggatggcaccttgcggtccctggaacctgagccccagcagagcttggaggatggcagcccagctaagggggagcccagccaggcgtggagggagcagcggcgaccgtccacctcatcagccagtgggcagtggagcccaacgccagagtgggtcctctcctggaagtcgaagctgccgctgcagaccatcatgaggctgctgcaggtgctggttccgcaggtggagaagatctgcatcgacaagggcctgacggatgagtctgagatcctgcggttcctgcagcatggcaccctggtggggctgctgcccgtgccccaccccatcctcatccgcaagtaccaggccaactcgggcactgccatgtggttccgcacctacatgtggggcgtcatctatctgaggaatgtggacccccctgtctggtacgacaccgacgtgaagctgtttgagatacagcgggtgtgaggatgaagccgacgaggggctcagtctaggggaaggcagggccttggtccctgaggcttcccccatccaccattctgagctttaaattaccacgatcagggcctggaacaggcagagtggccctgagtgtcatgccctagagacccctgtggccaggacaatgtgaactggctcagatccccctcaacccctaggctggactcacaggagccccatctctggggctatgcccccaccagagaccactgcccccaacactcggactccctctttaagacctggctcagtgctggcccctcagtgcccacccactcctgtgctacccagccccagaggcagaagccaatgggtcactgtgccctaaggggtttgaccagggaaccacgggctgtcccttgaggtgcctggacagggtaagggggtgcttccagcctcctaacccaaagccagctgttccaggctccaggggaaaaaggtgtggccaggctgctcctcgaggaggctgggagctggccgactgcaaaagccagactggggcacctcccgtatccttggggcatggtgtggggtggtgagggtctcctgctatattctcctggatccgtggaaatagcctggctccctcttacccagtaatgaggggcagggaagggaactgggaggcagccgtttagtcctccctgccctgcccactgcctggatggggcgatgccacccctcatccttcacccagctctggcctctgggtcccaccacccagccccccgtgtcagaacaatctttgctctgtacaatcggcctctttacaataaaacctcctgctccacaa

SEQ ID NO: 352027 - DNA, 1278 bp, Homo Sapiens
  misc_feature (1157)..(1165): n is a, c, g, or t
cgcgctctgcggagaagcggcccacagccccagccgctcgccgtcgcccaagaagcccctcagccgggacaaggacggcgagggccgcgcaaggcactctgaggccgaggccacccgcgcccggcgccgctcccgcagctactcgcccatccgcaagcggcgccgggactcgccaagcttcatggagccgcggcgcatcaccagcgcccgcaagcgtcctattccatactaccggcccagcccctcttcctcctccagctgcttgagcagcgactactcgacccggagccacagccgcagccccagccccggccacagccacgggagctacagcagtcgcagccatgggacccgcagccggacacgcagcccctcgaggacccccagtcccagctaccacagccggagcagctctgagagcgggggcttctgagcccagacagactcagcttggtgcccccctggcactgggagaggcgaggggcgggccccaggaccccagtggggagggggctatatctccttgcccccaaggctacaaagaggtctcagggccagtgcacgggcagatgggaccggggaagactttgagggtgggcatccagtggacaaggagaagccagatgtgctgcttctacgggtgtcctctcccacctcctgtccacccactgtgcccggggaacaaagagccgttacgaacacaggaatctccccatcccccttcctgctgatgccaactcaccaggcttgggactgctgccggtggatggtaccagagtccatgatctgctctgtcacttcaccttagctcagtgcagccagggacaccttgcaaggtgccagccctgggagccccctcttcgcactacacagctccctccactcctctcttatcactgggcagacgaagaggtggtacagcacatggggtttgggagctagaccgaaaggaaaaacagcctaacccctggtggcacccccatccaagctgggggaagcttgcttccttttgagctggttgcaggaggaaccctggcttgaaggctggggggctggcccccccaaacttccccccagtttcctcccctggacccaggaagaggcccaaaaaggggtgggccccccaaaattccccacccggggggagatctaggggnnnnnnnnntctttggggctgggaccccctcccagaggcagggagttttcccctcccccccagggccccgggggccacaggggtccctaaccccgcccgaggaaaaaatggggagtgagaaa

SEQ ID NO: 352028 - DNA, 300 bp, Homo Sapiens
  misc_feature (180)..(180): n is a, c, g, or t
  misc_feature (223)..(223): n is a, c, g, or t
agctgggactgggggtcctcgaggggctgcgtgtccggctgcgggtcccatggctgcgactgctgtagctcccgtggctgtggccggggctggggctgcggctgtggctccgggtcgagtaggtcctgctcaagcagctggaggaggaagaggggctgggccggtagtatggaataggangcttgcggcgctgccgggaagaaaaagctgattacaggccatnccaggccccgagccccatcccagcagcggccagggcttcctgcctcagtttcccctgagccctggccttagagacac

SEQ ID NO: 352029 - DNA, 664 bp, Homo Sapiens
  misc_feature (310)..(415): n is a, c, g, or t
ccacatggaaaagctgaaaacctgttccagagccaatgaacttgatccagacagtctgaggtggaccccaattttaatttctaatgctgcagtgtctgaagaagagcgagaagctgagaaagaggctgagcggctaatggaacaagctagctgctgggagaaggaggaacaagaaatcctgtcaactagagctaacagtaggcaatcacctgcaaaagtacaatcgaaaaataaatatttgcattccccggagagccggccagtcacaggggagcgagggcagctgctggagctgtctaaagagagcagnnnnnnnnnnnnnnnnnnnnnnnnnnnnnnnnnnnnnnnnnnnnnnnnnnnnnnnnnnnnnnnnnnnnnnnnnnnnnnnnnnnnnnnnnnnnnnnnnnnnnnnnnnaatattcaaagctctcccccaagattgacgaaaccacagtcagttgccataaagagaaagaggccttttgtactaaagaagaaaaggggtcgtaaacgcaggaggatcaacagcagtgtaacaacagagaccatttcagagacgacagaagtactgaatgagccctttgacaactcagatgaagagaggccaatgccacagctggagcctacctgtgagattgaagtggaggaagatggcaggaagcca

SEQ ID NO: 352030 - DNA, 882 bp, Homo Sapiens
  misc_feature (446)..(446): n is a, c, g, or t
  misc_feature (618)..(618): n is a, c, g, or t
  misc_feature (829)..(829): n is a, c, g, or t
  misc_feature (847)..(847): n is a, c, g, or t
  misc_feature (879)..(879): n is a, c, g, or t
ggatgctgaagccggagccgggttggagtctgggcgggggccgggccggagcgggctccagagacatggggtcgaccgactccaagctgaacttccggaaggcggtgatccagctcaccaccaagacgcagcccgtggaagccaccgatgatgccttttgggaccagttctgggcagacacagccacctcggtgcaggatgtgtttgcactggtgccggcagcagagatccgggccgtgcgggaagagtcaccctccaacttggccaccctgtgctacaaggccgttgagaagctggtgcagggagctgagagtggctgccactcggagaaggagaagcagatcgtcctgaactgcagccggctgctcacccgcgtgctgccctacatctttgaggaccccgactggaggggcttcttctggtccacagtgcccggggcagggcgnaggagggcagggagaagaggatgatgagcatgccaggcccctggcagaagtccctgctcctggccattgctgaactgctcttctgcccggacttcacgattcagagccaccggaggagcactgtggactcggcagaggacgtccactccctggacagctgtgaatacatctngggaggctggtgtgggctttcgctcactccccccagcctaactacatccacgatatgaaccggatggagctgctgaaactgctgctgacatgcttctccgaggccatgtacctgcccccagctccggaaagttggcagcaccaacccatgggttcagttcttttgtttccacggagaacagacatgccctgcccctcttcacctccctccncaacaccgtgtgtgcctntgaccctgtgggctaagggatccctacaacanctg

SEQ ID NO: 352031 - DNA, 986 bp, Homo Sapiens
  misc_feature (16)..(16): n is a, c, g, or t
  misc_feature (28)..(28): n is a, c, g, or t
ccagcaaacttgttgncggttcacccanggaacagcctccttgaagttaagggggaacacgttgaacccacgaatggtgaaccaggcaattcgaaagagggcctgcaaaccgctggtgcccgctggtgatgatcttgtggaacacccacaatgagcaggtcggcgtgggtccctgtgaagactgggatgtccatgggcacgcggattgagtagggtttgttcagccgcaccccgaagttccgctccccgctcagaagcagcaagatgaagacaccaatgtgcatcaggcccacccgagactgatcggcccgggcatcgttgaggaagaagaggatggggacaaggatgtctaggacgtcgctgctcttcagcacgaagaagaggaatttcttgttgaagtcgcagagcttccagaagagaactagcagctcctggtggaactggatcttcttggtggagttaggcaggtaggtctggagcagggggttggacagcagccgggctatacccttgaggatgaactggaagtcctcctcacgatggatgcgggacaggtagttcacaaacaggttctcagggcctggaggatcggcatcatccatggcggtgccagtggtggtgccgtccacagtggggctggcactgctggcactgtcgtggtccaaagtgacaatgagcacctgggcagcctcctccaccaggggttcccggtagtcagagaagagcaggtggttgtaggggatcccgtagcccacagggtcataggcatcatcggtggcttccacgggctgcgtcttggtggtgagctggatcaccgccttccggaagttcagcttggagtcggtcgaccccatgtctctggagcccgctccggcccggcccccgcccaagactccaacccggctccggcttcagctccggctccagctccgcggcccccgcggctctcgcaggagacaagcggcgcgccccgcccccggccctcg

SEQ ID NO: 352032 - DNA, 353 bp, Homo Sapiens
ctggaacaaaaccaaaatgtgaccataactgtttaggcttctgtgtgtttgtaatatgctctaataatctgagtagaaatgcgtaatttcaattactgtataaagtttatgtttttttaagtgtgcagaatctgagagcaatggtttttacttctctgtgttaattgtaatattgactctattttgtaacttaagtttctgacctgtcgtacatttgtttgagtcgtttatgtactactgaactgtaccagttgcacatgcttgaactgtagtaatgttagcttgttctaaagctatccattgtgtcatatttactctaaaaattaaagagactctcaacatactgttttgat

SEQ ID NO: 352033 - DNA, 1775 bp, Homo Sapiens
  misc_feature (107)..(146): n is a, c, g, or t
  misc_feature (874)..(874): n is a, c, g, or t
aaagcaagaatgcattgttttttcacctttggaggaaaaaaaattatgtttctacttcacaaagtccataatgagagaacacagaagaacagctatccttcatatannnnnnnnnnnnnnnnnnnnnnnnnnnnnnnnnnnnnnnnctttgagagagagagagaaagagaaagggggtggggctggaaagatcagaaaaaactggcagaagtgttaacagtgtgtctattttcaaactctcgtaaaaatgaaaatgaaacaatgattactcaacgaacacgcaagcctttttctatagacctttgctggatttaaatcagcctatgtgagaacttcacccagccagaggcatcccagccagcccagctttgggtgctgaaaagggccctttctgggacagactgactggctgccttcagctgccaggtggaatgtattatttgacttcccagcaaacttgccagttgtcctgtaggaaaggcccagttcccactgccgtgcaaacactaggccctcggacaaggccatctggcattgcggttagagcttgcttggttgtccaaagtttattatggtgaagaaagcagaagaaagaacagtagttacacatgaatatgatgggcagtattatcatgtcttcctaaaaaatgagatgatgccaccgtaaagatgtttctgtgcttgtactcaactccagaagatagtctctctccagaatgtcaagttaccgaagataaattaaattaatctcatgttcttcatcattcactggtatgccaaacacatgaattgatatatcataatatttaatatttgcaattatcttaagaacagataataattacacctgagtttttaaaaaataaaaacaaangagaactgaatgtcatcattagtaacaaaggctatgaccagccagatgcaaatatggacacagactctctaatgggctcaagatagttactgtccgagctttgaaaccaccatcaaaaacattcctttctctcccccatctctatcagggtataatagagcacagaagaactgtatgtgagatttaatatagcttaatatatgtttacatcttttaaaataaaccaaaatgaaataaacaatacaaagaatccccaacacacccccccatcccccataaaggaacacacctatctctcggtaacttgaaccaatagacttacagagtattgcacctggacattattataattattctttcatagactaaagttttataatatgcctgaacatgcagcagttgatacctctatatgcaacgaattaattcccacaggccttgcagcaaacactatatacaaaaatctcaaatgtacaaaaggcaaaagcttcattagtgccactttgccactcacaagtatatatatttaggggcagctgggaaatccacgtgcaatagttggaatggattccattccctgctaaatcagttcagtaaattaggtaatcaaatgacctctgggaaacatatacacaaagccacagagaacccttggaaatgaaagaataacactgttagcatatctacaggaggtaatgtcacatcccttcaatagtgtccacatgagttgccattgcatgtcacacagaaacaaaactgagtacatcttgcgacattgtcagttttctaacaagttgctcttcagtttccagataccctttgtataacccatgtttagcctcattctgcttattccaaaagcagatatttcgtatatactttcctgtgaaaagggtaccga

SEQ ID NO: 352034 - DNA, 350 bp, Homo Sapiens
agaacatcgagctgttcgacaagctggccctgcgcttccacgggcggctactcttcctcaaggatgtcctgggggacgagatctgctgctggtctttctacgggcagggccgcaaaatcgccgaggtgtgctgcacctccattgtctatgctacggagaagaagcagaccaaggtggaatttccagaggcccggatcttcgaggagaccctgaacatcctcatctacgagactccccggggcccagacccagccctcctgggaggccacagggggagcagctggagctggtggggccggccgcggggaggatgaagagaaccgagagcaccgtgtccgcaggcccactcg

SEQ ID NO: 352035 - DNA, 903 bp, Homo Sapiens
  misc_feature (884)..(884): n is a, c, g, or t
ttctaggtagcgaggcctgggtggcgaattcggcacgagggcgggtgctggcgccatggaggccgagcggggtcccgagcgccggcctgcggagcgtagcagcccgggccagacgccggaggagggcgcgcaggccttggccgagttcgcggcgctgcacggcccggcgctgcgcgcttcgggggtccccgaacgttactggggccgcctcctgcacaagctggagcacgaggttttcgacgctggggaagtgtttgggatcatgcaagtggaggaggtagaagaggaggaggacgaggcagcccgggaggtgcggaagcagcagcccaacccggggaacgagctgtgctacaaggtcatcgtgaccagggagagcgggctccaggcagcccaccccaacagcatcttcctcatcgaccacgcctggacgtgccgtgtggagcacgcgcgccagcagctgcagcaggtgcccgggctgctgcaccgcatggccaacctgatgggcattgagttccacggtgagctgcccagtacagaggctgtggccctggtgctggaggagatgtggaagttcaaccagacctaccagctggcccatgggacagctgaggagaagatgccggtgtggtatatcatggacgagttcggttcgcggatccagcacgcggacgtgcccagcttcgccacggcacccttcttctacatgccgcagcaggtggcctacacgctgctgtggcccctgagggacctggacactggcgaggaggtgacccgagactttgcctacggagagacggaacccctgatccggaagtgcatgctgctgccctgggccccaccgacatgctggacctcagctcttgcacacccgaaccgccgccganactaccaggccatctggag

SEQ ID NO: 352036 - DNA, 1654 bp, Homo Sapiens
  misc_feature (1544)..(1544): n is a, c, g, or t
taggggaggagaaacaatcggtaggtacgaggctgggtggctgaaatcggcacgaggcactctacagcccagatatagtcacttatttcccctttccagccagagacttccgttccctgctggaacttccgatcccattcttctctcggtgggaatgcttgtggggggaaaaagaaacgcaatagataaagcggggcgcatgcgctcccggcacaggcttcgattgtgaggaaggccggctagtctccgagctcatcccgccttgcgcatgcggagaaggtaaaccagcgccccgagttgaggcgcgggtttggtggcgcgtttcagcgaagtcgcacgtgaaggatagcagtggcctgagaaagacccagtcatggcagcctccagcatcagttcaccatggggaaagcatgtgttcaaagccattctgatggtcctagtggcccttatcctcctccactcagcattggcccagtcccgtcgagactttgcaccaccaggccaacagaagagagaagccccagttgatgtcttgacccagataggtcgatctgtgcgagggacactggatgcctggattgggccagagaccatgcacctggtgtcagagtcttcgtcccaagtgttgtgggccatctcatcagccatttctgtggccttctttgctctgtctgggatcgccgcacagctgctgaatgccttgggactagctggtgattacctcgcccagggcctgaagctcagccctggccaggtccagaccttcctgctgtggggagcaggggccctggtcgtctactggctgctgtctctgctcctcggcttggtcttggccttgctggggcggatcctgtggggcctgaagcttgtcatcttcctggccggcttcgtggccctgatgaggtcggtgcccgacccttccacccgggccctgctactcctggccttgctgatcctctacgccctgctgagccggctcactggctcccgagcctctggggcccaactcgaggccaaggtgcgagggctggaacgccaggtggaggagctgcgctggcgccagaggcgagcggccaagggggcccgcagtgtggaaggaggagtgagccggatgccccacacaccgccagtgtcataccaaagagctgagctgcttcggggccatgcagccctcctgccagccccctgcccttttcttgccctgtctctgaaccttcagaacattgatccttgccgcagccccactagccaagagaaacagagaaagaccattccccctgcctgtccttgcggccctgtcttctgaggttctctgtctggggttggctctcttaaccctttctctgctcccagcctgcctcaccagggaaggttggaggggcctccctctggcttctgcatctgcgccagcaaacatcactgccgttggtctctcatgacattaactggcttccctctgctgctgcccttggctttcctcctaatgctcggtgctctcctgtccttctgaagttggctccttgggccaaatctccagctccccntcttgttttcctcatcctcctaccctgtactccaaccaaccatggtccctttaggcacgcctcctgtcctcctccttggccaacaattaagggaggggcaggggttaagg

SEQ ID NO: 352037 - DNA, 1665 bp, Homo Sapiens
tgaccaacaagatcgtgtttgtggtgagcttcgtgggcaaccgtggcaccttcatccggggctataaggccatggtcatggacatggaattcctctaccacgtgggctacatcctgaccagtgtcctgggcctctttgctcatgagctgttctacagcatcctgctctttgacctcatctaccgcgaggagacgctgttcaacgtcatcaagagtgtgacccgcaatggccgctccatcctgctgacagccctgctggccctcatcctggtctacctcttctccatcgtcggcttcctcttcctcaaggatgacttcattctcgaggtcgaccggctgcccaacaaccactccacagccagccccctggggatgccacatggagctgctgcatttgtggacacctgcagtggggacaagatggactgtgtctcagggctctcggtgcctgaggtcctggaagaggacagggagctggacagcacagagcgggcctgtgacactctgttgatgtgcatcgtcactgtcatgaaccatgggctacgcaacggtggtggcgtgggcgacattctccgcaagccctccaaagatgagtctctcttcccagcccgagtggtctatgacctcctgttcttcttcatcgtcatcatcattgtgctgaacctcatctttggggtaatcatcgacaccttcgctgacctgcgtagtgagaagcagaagaaggaggagattcttaagacgacatgcttcatctgtggtctggagagggacaagtttgataacaagacagtgtcatttgaggaacacatcaagctggagcacaacatgtggaactacttgtacttcattgtgctggtccgcgtgaagaacaagaccgactacacgggccctgagagctacgtggcccagatgatcaagaacaagaacctggactggttcccccggatgcgggccatgtcccttgtcagcaatgagggcgagggggagcagaatgagattcggattctccaggacaagctcaactccaccatgaagctggtgtcccacctcactgcccagctcaacgagctcaaggagcagatgacggagcagcggaaacgcaggcaacgcctaggctttgtggatgtccagaactgcattagccgctgaggagagccaccgaaggccccaacaggggatgctcatcactggagactgcgactgggaagaacactgccccctcctcccgggtggggtggcccagccagctggccagcctccactcccactctgccagacaccctgacacccacccaggctttgaagagcatggagggggagcctcagagctgacagtcctgcttagagcccttaaaaagacttgaaagttcactggggactcagtttaccttaatgccttagcagaagataaatcctacctagagacctttgttccttaaagcaataactgacaactctttgtagtcctcccttgtgggtagtttaagaagtggggtcaccccctttaactccaagcactacatttttggcggctgccggcccttctggggggaaggtgggcagttatgctgttacctacgaatttttaggacggctttgtttatttaacttatttccaagggtggctgtgctcaaccctggcccatggctgttgcagctcccttcc

SEQ ID NO: 352038 - DNA, 3207 bp, Homo Sapiens
  misc_feature (3102)..(3102): n is a, c, g, or t
  misc_feature (3174)..(3174): n is a, c, g, or t
  misc_feature (3180)..(3180): n is a, c, g, or t
  misc_feature (3189)..(3189): n is a, c, g, or t
catccagtaacctgtatttacatgcaaatatattggtttatgcaaaacagcggaggcctcgggggagggttttttagtctcaagcttgtgcagtcattgaaaaagagacgcaaagctgtctctggggtactccacgtccgccttgcccctgggagctgggccggttccaggaggacgaagactgaattagctcggcttgcagagaaaggcgagcagcgcccctacacggagagtagcggtgcgcctacaaagtcgcgcatgcccactccggcctcccgctccactcctaaggcaggcggcgaggcttagtgcgcaagcgccattcgtcggcgccgactcctcccgctaaggcgggaacacgcggggcccaagatggcggccagccggtaccggcgttttcttaagctctgtgaggaatggccagtggacgagaccaaacggggccgggacttgggcgcttacctgcgacagcgggtagcacaggcctttcgggagggagagaatacccaggttgcagagcctgaggcctgtgatcagatgtacgagagcttagcgcgactccattcaaactactacaaacacaagtaccctcgccccagagacaccagcttcagtggcctgtcgttggaagagtacaagctgatcctgtccacagacaccttggaagagcttaaggaaatagataaaggcatgtggaagaaactgcaggagaagtttgcccccaagggtcctgaggaggatcataaggcctgagctcaggccttacctcgtgcacatacctaggtgtggagtcttgtacattgccatcgtcaataaaactgccccagtttccccttgaccttacggtttgggaatctcctctagctttcccagaaaggaagcccttgctgctctaaagaaagtttcagcctgagaagggatggtgattgagctatctgctgtgactgctgctcagggtagggaaatctcctggggagaggaaatgcaggtttccctctgggcctgatgagggtaatggggcctcggcacaaggtgcttcctgcattgccacgggagcccccgcccctctggcacgggtctggtgtctcctggcaagatactcaggctcccttttgttgtaggagctcctgggaggaagccaaaaatagcagtaaatactgaaaagggcatcctgttgcaaacagaaagcagtagggaggtgtgaggccgagagaggcaaaaagcctgcttggccctcatccccactgactcagagaaggatggaccttaggcctctatccctgaccttgcaaaaacccacattgcccagttggcttaagggacaggcaagctatagacaggccttggccaagcggggcctcagctgcagttggcttcagcactgtgggcaggttctgtaggtggccacaagtcagaggcctgctggctgaggacacacacagggtcacctcgttattccatggaaccttggctcttactgatattgagcatccttctctctggaaccgtgagggacagggctgggcccacagcggccctggtgggtacaaagtggaagtgggttcttaacctcgtctgtgtctagactcctcaggatgttctgaaatgcataaaataaaatcgacaggactgccgtagaaaccagttatgccgaaatgcagttctgggtaggcaaatctcaggggaggacccttgagacaggatgtcactcagcgtatctcctgagagcctgagaggccaggccagcagggaggggctcttgttcctgtcttctgccagtgtgtcctgttaatccccacagcccccgggggagtgcaggaaacacatccctttttaacggactagatttctattaatttatttaagccaattaacatattagttctcaggccaaaggatttgtaaaacattacaccaaaaggagaaaaacaagcggtcatgaaacagccacgcaagcgcagctcagcccttgttgcctgggcgtacaactcttccccaggaagcctgggaagaggcaggtcctgggagcaagatcgtccatcatggagtcaccaggccacctggagccatgccgggggtggcatggacacgacagtgaggtctgcactggctacagcagatctgaggcacggagggagctgcacagccatgggcagggctgagcacagcacccttgaaataagttaaataacaaagccctaaaatcactagtaacagcataactgccacctcccccagaggccggcagccgccaaaatgtagtgcttggagttaaaggggtgaccccactcttaactacccacaaggaggactacaaagagttgtcagttattgctttaaggaacaaaggtctctaggtaggatttatcttctgctaaggcattaaggtaaactgagtcccagtgaactttcaagtctttttaagggctctaagcaggactgtcagctctgaggctccccctccatgctcttcaaagcctgggtgggtgtcagggtgtctggcagagtgggagtggaggctggccagctggctgggccacccaacccgagggagggggcagtgttcttcccagtcgcagtctccagtgatgagcatcccctgttggggccttcggtggctctcctcagcggctaatgcagttctggacatccacaaagcctaggcgttgcctgcgtttccgctgctccgtcatctagggttaagcagatgccaacaggcctggtcaggccgcctggcaccttccctccatgggtgctgtggaagagcttggcacccgtcttcccctgtgggcccagctgctattcggcactggcggcgggccagggccctatcggggtgctttaaggatgtcgatgtcagcaccaaacccttgttctcaattagcgtgtcacaaaccctggattttgtgcagcttgggaaccagcccactaacagaggctgcctcatcttcatgcaggcactccagatgcagaagaggatgtctaggcaagagggccttaaactcccccatctccagtgatggggatccccttcaaaggacctacctgggcagctgttcagaggaaggggatgagagacagagggccccaccaccctgttantaaagttttccatttgggccttgtttttaggcggcccaaggcagggggttgttcaaccccagttttgatttngccatngcagggggnagattgggtttttgggca

SEQ ID NO: 352039 - DNA, 1142 bp, Homo Sapiens
attcactcttcagagggcagcaaacaggtggtaccaggggagcgacacactcagcttccctacttcaggcaactggccgactccgaccaacagagaaatcgggaacatcatcatacggcttttcggtcacctctgcggacgctcagtcccactccccctccccctcagcgtcgtcctcgtgcggcgcctccaggtcgttgaggtggaagttggccatcatgtcgcgcacagccagcatcagcctgttcaggccctggttgcggttcagacccccagccatctccttcctcgggcctctccccctccatggatatagctttggcaacagtgaccggaagaagagagcaatggtgtttccatggctgataggacttagcctctctggcctgacgtaggagtaagattgtgtccgaaggaggcagaggatcaaaccccatcacagactgcgtggtcacgtccgggggcatgggcagcgactagcttccttgatctcagagaggatcacatggcggtggatattcctgggtagcacgctggtagagcaccttccgccggttctcacaggcttccacggctgggtccccggcgtccactgcttgcagaacctcgtggacgttctcctccagccagctcatggtggcgggctctttccagagcaaagtgtgacctcccaaggtacaggttcaccagctggctcagggcaggaggctggcctggagggagagcaaaggctctgagcagaacccctcttcagaccacaggcctgccctcaaggctaggaaaagcccccatggatggtgcaaacggggggtccagggagtgccctgtgagcctggagtgaaatgaggcccctgagctgcttggcctgaaggcatggggcctggggcaacaccagggtatgttaccgataaagccgttacttttcagccatataggtcccaaaagaaaaccggtgtaaatggcaaaccactggcctttggagccgaacatgtgcgagacttcgaccaggagaacaggaacgaatcccatggaaccattgtgtaacccagtaatgtatattcaggaaaaagagacttaataccgtggacgaagcactggtacaaacacaaggaagaacaaaatgcgagactagaaaaaaacac

SEQ ID NO: 352040 - DNA, 2284 bp, Homo Sapiens
  misc_feature (1984)..(2031): n is a, c, g, or t
gggccccgcccccgaccccgcgcgaagagtgcgcaggcgcgccgacagccgagttttctgcgcttccttctccctctctccagacgtcgtggtcgttcggtcctatgtcgcgccgggccctccggaggctgaggggggaacagcgcggccaggagcccctcgggcccggcgccttgcatttcgatctccgtgatgacgatgacgcggaagaagaagggcccaagcgggagcttggtgtccggcgtcccgggggcgcagggaaggagggcgtccgagtcaacaaccgcttcgagctgataaacattgacgatcttgaggatgaccctgtggtgaacggggagaggtctggctgtgcgctcacagacgctgtggcaccagggaacaaaggaaggggtcagcgtggaaacacagagagcaagacggatggagatgacaccgagacagtgccctcagagcagtctcatgcaagtggcaaactccggaagaagaataaaaaacagaaaaacaagaaaagcagcacgggagaagcatcggaaaacggactagaagatatcgatcgcatcctagagaggattgaggacagcactgggttgaaccgtcccggcccagctcccctgagctccaggaagcacgttctctacgtggagcacagacacttgaatccagacacagaactgaaaaggtattttggtgcccgggcaatcctgggggagcaaaggccacggcagagacaacgtgtgtaccccaagtgcacatggctgaccacccctaaaagcacctggccccgctacagcaaaccaggtctgtccatgcggctgctggaatcaaaaaaaggcctctccttctttgcgtttgagcacagtgaggagtaccagcaggctcagcacaagttcctggtggccgtggagtctatggagccgaacaacatcgtggttctgctccagacgagcccttaccacgttgactcactcctgcagctcagcgatgcctgccgctttcaagaggatcaggagatggctcgagacctcgtagagagagcgctgtacagcatggaatgtgcgttccaccccctgttcagtctcaccagtggggcctgccggctggattaccgcagacccgagaacaggagcttctacctggccctctacaagcagatgagcttcctggagaagcgaggctgcccgcgcacggcgctggagtactgcaagctcatcctgagtctcgagccggatgaggaccccctctgcatgctgctgctcatcgaccacctggccttgcgggcccggaactacgagtacctgatccgcctcttccaggagtgggaggctcatcggaacctgtcccagctccctaattttgccttctctgttccactggcgtatttcctgctgagccagcagacagacctccctgagtgtgagcagagctctgccaggcagaaggcctctctcctgatacagcaggcgctcaccatgttccctggagtcctcctgcccctgctcgagtcttgcagtgtgcggcccgacgccagcgtttccagtcaccgcttctttggacccaatgctgaaataagccagccccctgccctgagccagctggtgaacctgtaccttgggaggtcacactttctctggaaagagcccgccaccatgagctggctggaggagaacgtccacgaggttctgcaagcagtggacgccggggacccagccgtggaagcctgtgagaaccggcggaaggtgctctaccagcgtgcacccaggaatatccaccgccatgtgatcctctctgagatcaaggaagccgtcgctgccctgcccccggacgtgaccacgcagtctgtgatggggtttgatcctctgcctccttcggacacaatctactcctacgtcaggccagagaggctaagtcctatcagccatggaaacaccattgctctcttcttccggtcactgttgccaaactataccatggagggggagannnnnnnnnnnnnnnnnnnnnnnnnnnnnnnnnnnnnnnnnnnnnnnnacaggctgatgctggctgtgcgcgacatgatggccaacttccacctcaacgacctggaggcgccgcacgaggacgacgctgagggggagggggagtgggactgagcgtccgcagaggtgaccgaaaagccgtatgatgatgttcccgatttctctgttggtcggagtcggccagttgcctgaagtagggaagctgagtgtgtcgctcccctggtccacctgtttctccctataaatgtaaatgggtcaccctc

SEQ ID NO: 352041 - DNA, 412 bp, Homo Sapiens
  misc_feature (113)..(160): n is a, c, g, or t
gacacaatctactcctacgtcaggccagagaggctaagtcctatcagccatggaaacaccattgctctcttcttccggtcactgttgccaaactataccatggagggggagannnnnnnnnnnnnnnnnnnnnnnnnnnnnnnnnnnnnnnnnnnnnnnnacaggctgatgctggctgtgcgcgacatgatggccaacttccacctcaacgacctggaggcgccgcacgaggacgacgctgagggggagggggagtgggactgagcgtccgcagaggtgaccgaaaagccgtatgatgatgttcccgatttctctgttggtcggagtcggccagttgcctgaagtagggaagctgagtgtgtcgctccctggtccactgtttctcctataaatgtaaatgggtcacaaaaaa

SEQ ID NO: 352042 - DNA, 405 bp, Homo Sapiens
  misc_feature (107)..(154): n is a, c, g, or t
atctactcctacgtcaggccagagaggctaagtcctatcagccatggaaacaccattgctctcttcttccggtcactgttgccaaactataccatggagggggagannnnnnnnnnnnnnnnnnnnnnnnnnnnnnnnnnnnnnnnnnnnnnnnacaggctgatgctggctgtgcgcgacatgatggccaacttccacctcaacgacctggaggcgccgcacgaggacgaccctgagggggagggggagtgggactgagcgtccccaaaggtgaccgaaaagccgtatgatgatgttcccgatttctctgttggtcggagtcggccagttgcctgaagtagggaagctgagtgtgtcgctccctggtcccctgtttttcctataaatgtaaatgggtcccgctcc

SEQ ID NO: 352043 - DNA, 399 bp, Homo Sapiens
  misc_feature (247)..(294): n is a, c, g, or t
gtgacccatttacatttataggagaaacagtggaccagggagcgacacactcagcttccctacttcaggcaactggccgactccgaccaacagagaaatcgggaacatcatcatacggcttttcggtcacctctgcggacgctcagtcccactccccctccccctcagcgtcgtcctcgtgcggcgcctccaggtcgttgaggtggaagttggccatcatgtcgcgcacagccagcatcagcctgtnnnnnnnnnnnnnnnnnnnnnnnnnnnnnnnnnnnnnnnnnnnnnnnntctccccctccatggtatagtttggcaacagtgaccggaagaagagagcaatggtgtttccatggctgataggacttagcctctctggcctgacgtaggagtaga

SEQ ID NO: 352044 - DNA, 556 bp, Homo Sapiens
  misc_feature (254)..(301): n is a, c, g, or t
tttgagcgtgacccatttacatttataggagaaacagtggaccagggagcgacacactcagcttccctacttcaggcaactggccgactccgaccaacagagaaatcgggaacatcatcatacggcttttcggtcacctctgcggacgctcagtcccactccccctccccctcagcgtcgtcctcgtgcggcgcctccaggtcgttgaggtggaagttggccatcatgtcgcgcacagccagcatcagcctgtnnnnnnnnnnnnnnnnnnnnnnnnnnnnnnnnnnnnnnnnnnnnnnnntctccccctccatggtatagtttggcaacagtgaccggaagaagagagcaatggtgtttccatggctgataggacttagcctgcttccactgtgtcactcgcacctgccacagaggccgacacgcaagcgcttgtacattcggtggagatgggaaagaacgtggcctgcaaacgcagagctgtgacccccaaataacactgttcctctcctcctctcccttcctctctggcctgacgtaggagtagattgtgtcc

SEQ ID NO: 352045 - DNA, 414 bp, Homo Sapiens
ttgcatgagactgctctgagggcactgtctcggtgtcatctccatccgtcttgctctctgtgtttccacgctgaccccttcctttgttccctggtgccacagcgtctgtgagcgcacagccagacctctccccgttcaccacagggtcatcctcaagatcgtcaatgtttatccaaaagctgtgattttcattagttttagggtctcaaatggggaacatttcacaaggttcttgtccacgactgatcttctttaggataaagctcgatcagcatttcacttaataaccaggaaggagttttatctttcttcttagggggagaggaaaatgtccatttttccagctcgaagcggttgttgatctcggacgccctccttcctgcgcccccggacgccgactccatcaaccggtgc

SEQ ID NO: 352046 - DNA, 460 bp, Homo Sapiens
  misc_feature (273)..(304): n is a, c, g, or t
  misc_feature (360)..(360): n is a, c, g, or t
  misc_feature (379)..(379): n is a, c, g, or t
  misc_feature (432)..(432): n is a, c, g, or t
  misc_feature (443)..(443): n is a, c, g, or t
ttttttgagcgtgacccatttacatttataggaaaaacaggggaccagggagcgacacactcagcttccctacttaaggcaactggccgacttccgaccaacaaaaaaatcgggaacatcatcatacggcttttcggtcacctctgcggacgccaagtcccactccccctccccctaagcgtcgtcctcgggcggcgcctccaggtcgttgagggggaagttggccataatgtcgcgcacagccagcataagcctgttaaggcctggttgcgnnnnnnnnnnnnnnnnnnnnnnnnnnnnnnnntttccccctccatggtatagtttggcaacagtgaccggaagaagagagcaatggtntttccatggctgatagganttagcctctctggcctgacgtaggagtagattttttccgaagagggcagaggntcaaaaccccntaacagattgcgtggtc

SEQ ID NO: 352047 - DNA, 430 bp, Homo Sapiens
  misc_feature (37)..(37): n is a, c, g, or t
  misc_feature (52)..(52): n is a, c, g, or t
  misc_feature (66)..(66): n is a, c, g, or t
  misc_feature (236)..(236): n is a, c, g, or t
gtgctctgtgagacggtgaaggacttcgtggcacggntggggaaggcctatnagaagacgaccganagctcggaggagtcagaggtcatggccaagaagtgctctgtcctgaaagagaagctggattcccttctcaagaccttggacgatgagtcccaggcctcgtcctctctgcccaacccgccccccaccattgccgaggaggctgaagatggagatgggtcgggcagcatctncggttccaccggagaccgcttggtggcatcagcttgcccggcccggccgcagatattccggcctcgagaacagctcatgctgagagccaacagcctgaagaaagcaattcgtcagatcatagaacacacagaaaaagctgtcgatgagcagaatgcccagacccaggagcaggagggcttcgtcctggggctct

SEQ ID NO: 352048 - DNA, 504 bp, Homo Sapiens
ctggaatataagagtgaagtcagagtcctttctcaagagtacttccggtactactcagtcctctatccactggagaggaaaatatctgatgccaagtcccgtgaactggtgatgtacatctgggcccatgcagtggtggccagtgtccctgtgtttgcagtaaccaatgtggctgacatctatgccacgtccacctgcacggaagtctggagcaactccttgggccacctggtgtacgttctggtgtataacatcaccacggtcattgtgcctgtggtggtggtgtttcctcttcttgatactgatccgacgggccctgagtgccagcccagaagaagaaggtcatcatagcagcgctccggacccccacagaacaccatctctatttccctatgcctcccaggcgggaaggccgcacttgcacgcaaccctggttctccatggggaaggaccttcatcctgggggtacgttgccccatgcccaccttgggttggtttaaccaa

SEQ ID NO: 352049 - DNA, 490 bp, Homo Sapiens
gaaattcaggtataaaaaagcctaactgtggagttgttaggaagattaaattaaattcattaaaagctcctagttggtacctggctcagaacaagtctcagtgtatgttaatgccgactctttccacagagagcccatggtagcagcagagcccttgtgtaaggcagccccagattttgggacaatggctctgcttgagaagccaagttgaaaggaataggggcagcaatctcaccaaacttcagcagccaggcttccctgaatccccttgagggtaggcacaagaatagatgggtctagcgtccagttcatcagtgtttcagaaagaagacttacctgatcagctgtataagccaatccatatgtgactaagcttttgtacctaagataaaaaagccatcctagaaaagcatggtccctgctttcgttccttgtttgtttcccccaattccaccattttcttgcaggtttaatctttctataactaggg

SEQ ID NO: 352050 - DNA, 917 bp, Homo Sapiens
  misc_feature (72)..(72): n is a, c, g, or t
  misc_feature (110)..(110): n is a, c, g, or t
gccccacctgcccccagcctctgtgacagtgaccgtctccctttgtacatacttgcacacaggttccccatntacatacatgcacatactcaaacatgcgtacacacacncacatttacacacgcaggactctggagccagagtaaaggctgtggcccaggcactaccggctggctcccacctatggtttgggggccatacctgttccagctctgttcccagggtggggcagggaggtgggggttgggggagtagtggggcacggctcctaagatccagcccccatactgacagacggacagacagacatgcaaacaccagactgaagcacatgtaatatagaccgtgtatgtttacaatgttgtgtataaatgggacaactcctcgccctctacctgtcccctccccctttggttgtatgattttcttcttttttaagaacccctggaagcagcgcctccttcagggttggctgggagctcggcccatccacctcttggggtacctgcctctctctctcctgtggtgtcccttccctctcccatgtgctcggtgttcagtggtgtatatttcttctcccagacatggggcacacgccccaagggacatgatcctctccttagtcttagctcatggggctctttataaggagttggggggtagaggcaggaaatgggaaccgagctgaagcagaggctgagttagggggctagaggacagtgctcctggccacccagcctctgctgagaaccattcctgggattagagctgcctttcccagggaaaaagtgtcgtctccccgaccctcccgtgggccctgtggtgtgatgctgtgtctgtatattctatacaaaggtacttgtcctttccctttgtaaactacatttgacatggattaaaccagtgtacccagttca

SEQ ID NO: 352051 - DNA, 866 bp, Homo Sapiens
gtgctctgggccggcgccttcaccatggcctcggcagagctggactacaccatcgagatcccggatcagccctgctggagccagaagaacagccccagcccaggtgggaaggaggcagaaactcggcagcctgtggtgattctcttgggctggggtggctgcaaggacaagaaccttgccaagtacagtgccatctaccactccgagtcactgggtatcccttcacttcgtgttttggcccagaagctgctcgagctgctctttgattatgagattgagaaggagcccctgctcttccatgtcttcagcaacggtggcgtcatgctgtaccgctacgtgctggagctcctgcagacccgtcgcttctgccgcctgcgtgtggtgggcaccatctttgacagcgctcctggtgacagcaacctggtaggggctctgcgggccctggcagccatcctggagcgccgggccgccatgctgcgcctgttgctgctggtggcctttgccctggtggtcgtcctgttccacgtcctgcttgctcccatcacagccctcttccacacccacttctatgacaggctacaggacgcgggctctcgctggcccgagctctacctctactcgagggctgacgaagtagtcctggccagagacatagaacgcatggtggaggcacgcctggcacgccgggtcctggcgcgttctgtggatttcgtgtcatctgcacacgtcagccacctccgtgactaccctacttactacacaagcctctgtgtcgacttcatgcgcaactgcgtccgctgctgaggccattgctccatctcacctctgctccagaaataaatgcctgacacctccccacaaaaaaa

SEQ ID NO: 352052 - DNA, 1243 bp, Homo Sapiens
gggtccggaattcccgggatggccaacatggccgccgccgccgcttggagctgaagtgccgccgccgccgggcagccacggggaatccgcccgcatcgccgccctcgccggccgggcggccgtggggcccagagcgccggaggccagggctggggcggcaccgcgcagcggccacggggtcccgttagagcagcgcccggcggctatgccgagagcccggagcggccggaggagcagaggggccggcgggagggaggaaacctttctgcgagtacgagccaaccggcagacccgactgaatgctcggattgggaaaatgaaacggaggaagcaagatgaagggcagagggaaggctcctgcatggctgaggatgatgctgtggacatcgagcatgagaacaacaaccgctttgaggagtatgagtggtgtggacagaagcggatacgggccaccactctcctggaaggtggcttccgaggctctggcttcatcatgtgcagcggcaaagagaacccggacagtgatgctgacttggatgtggatggggatgacactctggagtatgggaagccacaatacacagaggctgatgtcatcccctgcacaggcgaggagcctggtgaagccaaggagagagaggcacttcggggcgcagtcctaaatggcggccctcccagcacgcgcatcacacctgagttctctaaatgggccagtgatgagatgccatccaccagcaatggtgaaagcagcaagcaggaggccatgcagaagacctgcaagaacagcgacatcgagaaaatcaccgaagattcagctgtgaccacgtttgaggctctgaaggctcgggtcagagaacttgaacggcagctatctcgtggggaccgttacaaatgcctcatctgcatggactcgtactcgatgcccctaacgtccatccagtgttggcacgtgcactgcgaggagtgctggctgcggaccctgggtgccaagaagctctgccctcagtgcaacacgatcacagcgcccggagacctgcggaggatctactttgtgagctatctgccccaggcaggcctcgcctccagcagacccaactgcccacagactctgtgacagttgaccgtctcccttatgtacatacttgcaacacaggtaccccatgtacatacattgcacattactcaaacatgcgtacacacaacacacatttacgacacgcaggactcttggagccagagtaag

SEQ ID NO: 352053 - DNA, 599 bp, Homo Sapiens
aggtcttctgcatggcctcctgcttgctgctttcaccattgctggtggatggcatctcatcactggcccatttagagaactcaggtgtgatgcgcgtgctgggagggccgccatttaggactgcgccccgaaatgcctctctctccttggcttcaaccaggctcctcgcctgtgcaggggatgaacatcagcctctgtgtattgtggcttccccatactccagagtgtcatccccatccacatccaagtcagcatcactgtccgggttctctttgccgctgcacatgatgaagccagagcctcggaagccaccttcccaggagagtggtggcccgtatccgcttctgtccacaccactcatactcctcaaagcggttgttgttctcatgctcgatgtccacagcatcatcctcagccatgcaggagccttccctctgcccttcatcttgcttcctccgtttcattttcccaatccgagcattcagtcgggtctgccggttggctcgtactcgcagaaaggtctgggagaagatcgcgggcagatgcaagaaaagaaaagagagcgtcaggcgcggcctgcagtcctggcccccgcccca

SEQ ID NO: 352054 - DNA, 334 bp, Homo Sapiens
  misc_feature (40)..(40): n is a, c, g, or t
  misc_feature (42)..(42): n is a, c, g, or t
gacctaccatctgaaagctagttcagaagttgagcggcangntgggtgacggccctggaactggccaaggccaaagctgtgaagatgctggcagagtcagatgaatcaggagatgaagagtctgtctcacaaactgacaagactgagctgcagaatacccttcggaccctctctagcaaagtagaggacatagagcacgtgcaatgacttgatagctaagcatggcacagctctgcagcgttctctcagtgagctggagtcctctgaagtttgcctgctgagagcatgaaaagatcaaacaggtcaacgacgagtccactaggtaccgagcccc

SEQ ID NO: 352055 - DNA, 1024 bp, Homo Sapiens
tcccttgtgcttgaggcctcccgcgatttaccacacctttgcgttgtttctcctgtacaaggagtgcctctgtcacttcacgccattgtcgacgttattgaatacctcccttccctaccactggataccgtctgttttagttcgtgacttagcctataaaaagttgaacttaaactcatagacaaactttgggttgactgggtgcctgcgcaagcccacatgcttgggttggtatcttgccgtaggtgcttcccctgctcccccgccaggcaagggccactcgtctcccactaggggaaaaagggggtcccagtgtgggcgactaagtacgtgtgaagctgagctcagccccagacctggggagcgggggacatccgctcggacaggaggcagcggccagggctgggccagggcgagagtcggtcctcccggtgctgggctccccgtctgccttgaggggtgtgcatggatggagggtgcctgaggctgcaggcaggggatgaccgggacaggcctgggcctggggcaggttggaggtatgggcactggtaggggacagagggttagggatcatgttggggggccagggacagtggaggaagggcccatggaagatggggctgtttggtttgaggctggagtgcttcctttgaaatttaattactgttttttaagtggtagggctcacagactgtgtgaagtcctgtgtgaagtgctggtgtggccacctacccaggtgtccctcccttttgttttggaggcctgtgtccttgtccaggggcagccctccttcccaggtgtggccagaagaaccccccatcccaagacttgaaatgtctggttgctcacctctgtccctccagaactcggcttccccatcttcacttgcaaaaacaatgtgcagacctgctgcaccatcagcaccccctccggtgtgcacacaggccagtgaacaggtggccgaccagagcacccaaatcccacaaactccaaagccatcaagcggagggcgcctcgctagggg

SEQ ID NO: 352056 - DNA, 281 bp, Homo Sapiens
  misc_feature (174)..(174): n is a, c, g, or t
  misc_feature (188)..(188): n is a, c, g, or t
ctcaggcagtgacctcttttctgtacaccgaattccttcttcagtacagacagagttactacttcattcttctctcaacattataattgttttgcggtttctggggagaatttatcttacttatttccttatctcaaaggcctatgcagaacagctaaataggtaactgatganaaatatactactanacaaactctaacactcactcaacctaaaggtcttagaaatttgttctgtgacattttattgaaactacaccctgcatccaaccaaaagtaagg

SEQ ID NO: 352057 - DNA, 2231 bp, Homo Sapiens
  misc_feature (1328)..(1328): n is a, c, g, or t
gcaggtcgggaggacgagcaccgagtcgagggctcgctcgtctgggccgcccgagagtcttaatcgcgggcgcttgggccgccatcttagatggcgggagtaagaggaaaacgattgtgaggcgggaacggctttctgctgccttttttgggccccgaaaagggtcagctggccgggctttggggcgcgtgccctgaggcgcggagcgcgtttgctacgatgcgggggctgctcggggctccgtcccctgggctggggacgcgccgaatgtgaccgcctcccgctccctcacccgccgcggggaggaggagcgggcgagaagctgccgccgaacgacaggacgttggggcggcctggctccctcaggtttaagaattgtttaagctgcatcaatggagcacatacagggagcttggaagacgatcagcaatggttttggattcaaagatgccgtgtttgatggctccagctgcatctctcctacaatagttcagcagtttggctatcagcgccgggcatcagatgatggcaaactcacagatccttctaagacaagcaacactatccgtgttttcttgccgaacaagcaaagaacagtggtcaatgtgcgaaatggaatgagcttgcatgactgccttatgaaagcactcaaggtgaggggcctgcaaccagagtgctgtgcagtgttcagacttctccacgaacacaaaggtaaaaaagcacgcttagattggaatactgatgctgcgtctttgattggagaagaacttcaagtagatttcctggatcatgttcccctcacaaacacacaactttgctcggaaagacgttcctgaagcttgccttctggtgacattctgtcagaaaattccctgctcaactggattttcgatgtcagacttggtggctacaaatttcatgaagcactgtagcaccaaagtacctactatgtgtgtggactggagtaacatcagacaactcttattgtttccaaattccactattggtgatagtggagtcccagcactaccttctttgactatgcgtcgtatgcgagagtctgtttccaggatgcctgttagttctcagcacagatattctacacctcacgccttcacctttaacacctccagtccctcatctgaaggttccctctcccagaggcagaggtcgacatccacacctaatgtccacatggtcagcaccaccctgcctgtggacagcaggatgattgaggatgcaattcgaagtcacagcgaatcagcctcaccttcagccctgtccagtagccccaacaatctgagcccaacaggctggtcacagccganaaacccccgtgccagcacaaagagagcgggcaccagtatctgggacccaggagaaaaacaaaattaggcctcgtggacagagagattcaagctattattgggaaatagaagccagtgaagtgatgctgtccactcggattgggtcaggctcttttggaactgcttataacggtacatggcatggagatgttgcactacacatcctaaaggttgtcgacccaaccccagagcaattccacgtcttcctgaatgacgtgcgctgttctgccgcaaacacggcatgtgaacattctgctctttcatggggtacatgacaaagggacaacctgcgcaattgttgactccaccgttgccagggcagcagcctctacaaacacctgtacgcccaggagaaccaagtttccagatgttcccgcccaattgcaattgccccgctagaacgtttcaaggaaatggcactattttgtcatggtaaagaaattttcattccctaggagaacatgaaaatccccaccccacaatattctttctcccctgcaaggccttttaaatcgatcgaaacaaattttgagacaaaacttattgggtttttcggccacaactaggctacaaacccccaccgcctcgggtcaggggggtttttctttccccctaagggcctggaaacccaaccccttaaattggggccttctgcgattccctcatggggcgatgggcgcccccaaacaaagaatgtcacttcctccacaattcttcgtggtaataaaccctctctctcccccttctctaccgttttctcatccctctctgccgatcgcacccacacccctttttcccctgggccaatacgcttaccattggttcccccgacaaacttttcccctgtaacccggcccgggacaa

SEQ ID NO: 352058 - DNA, 1604 bp, Homo Sapiens
  misc_feature (866)..(874): n is a, c, g, or t
  misc_feature (894)..(921): n is a, c, g, or t
  misc_feature (965)..(965): n is a, c, g, or t
  misc_feature (1348)..(1395): n is a, c, g, or t
  misc_feature (1397)..(1403): n is a, c, g, or t
  misc_feature (1405)..(1416): n is a, c, g, or t
  misc_feature (1418)..(1425): n is a, c, g, or t
  misc_feature (1427)..(1434): n is a, c, g, or t
  misc_feature (1436)..(1437): n is a, c, g, or t
  misc_feature (1439)..(1526): n is a, c, g, or t
atcaggccaaatcggccgagctcgaattcgtcgagagcggggggtggctttctctgccatcaggagcaccaaccacgagccgtccgagatgagtaatcgcaccatgatcatctacttcgaccaggtactagtgaacattgggaacaactttgattcagaacgcagcactttcatcgccccgcgcaaagggatctacagttttaacttccacgtggtaaaagtctacaacagacaaaccatacaggtgagcctcatgctaaacgggtggccggtgatttcagccttcgctggtgaccaggacgtgacccgggaggccgccagcaacggagtcctaatccaaatggagaaaggcgaccgagcatacctcaagctggagcggggaaacttgatggggggctggaagtactcgaccttctccggattcctggtgtttcctctctgactggctcgtagccggaagggaggcagggagagggcgaaggcaggaaggggagtgagaaagaggctgaaattaagagggcgagaaagcagcacgacttgaaacttcctacatgttctctaactgtatctgggtaaaaaggtgcgcgccactgtgggacaactttgtccatttccttattaggagaaataaatttcgcttagctctgcgcactcccatttccaaaaataaactcgcctcccccattccagttgcagtaatcaagaaagagactgccttgtcattgtttcttatcccccaacttcatgttccctgcaatttatttaaagaaactttgtatttcactacataatctgaaatctttctccctagccccctctgaatccttctgcctactgaaatctgatatattacacacccccaaccnnnnnnnnncagtttggaaaggggtaaannnnnnnnnnnnnnnnnnnnnnnnnnnngatggggaaggtagttttaaaattggcaagtgttgccccttccntaaaacacggctcaaattaattagctgaagatacttagtatcctcggctgcttgttagcagagaaaggactcaccttagtggtgactggtttaaaaaatataaatatatatcatttgtacacgaagaactcttcccagtggaaactggctgtgtttccgtatttctatgttctattcggagtgatcgtgaaatctaaggctgcttgatgttctgatgcttgtcaatgccgtcgtgctctgtgactccacgaaacgccaaggagcttcttccggacgcctcctcttcctctgtaacatacgtgtgaatagtcaaggtttaattttgctttaatctaataaagtcgaagtgggacttttatttttctgaaacagctttctaaaannnnnnnnnnnnnnnnnnnnnnnnnnnnnnnnnnnnnnnnnnnnnnnnannnnnnncnnnnnnnnnnnncnnnnnnnncnnnnnnnncnncnnnnnnnnnnnnnnnnnnnnnnnnnnnnnnnnnnnnnnnnnnnnnnnnnnnnnnnnnnnnnnnnnnnnnnnnnnnnnnnnnnnnnnnnggggcccccttaaggggggcgtccttttattaaacaccggggccggggcgccctctttttacaaccccgcgggggggg

SEQ ID NO: 352059 - DNA, 3222 bp, Homo Sapiens
  misc_feature (166)..(230): n is a, c, g, or t
  misc_feature (1073)..(1090): n is a, c, g, or t
ggggtctgctccttcctcatgacccgcctgtgaatccgttcctagccgttaggacctaacccacagaagcgtctttccaccaccatcgtctaggcactgagcaagcaaacggccccgccccgccccacgttcacaggaacaccatacgtcacatccgcggtgctgnnnnnnnnnnnnnnnnnnnnnnnnnnnnnnnnnnnnnnnnnnnnnnnnnnnnnnnnnnnnnnnnntctgcgcgacagtgctgaaaataagccacagatatgcccatcgcttccgcgcccggcagttccccaccctcggccctaagccggaagtcagcgagcccgaagcggaaggggctgggctatctaggggcgtggtcggtgcggaggcggggccatcgctagctgggggcggggccggaagctctttccccgcgactgcgccacgtctgaggcggctgtggccacgtctgaggcggctgtggccgcgtcggtgtccgcgtcgaggagccggggcagggcacgatggcggactgggctcgggctcagagcccgggcgctgtggaagagattctagaccgggagaacaagcgaatggctgacagcctggcctccaaagtcaccaggctcaaatcgctcgccctggacatcgatagggatgcagaggatcagaaccggtacctggatggcatggactcggatttcacaagcatgaccagcctgcttacagggagcgtgaagcgcttttccacaatggcaaggtccggacaagacaaccggaagcttctatgtggcatggccgtgggtctaattgtggccttcttcatcctctcctacttcttgtccagggcaaggacgtgagccagtgggagctggtgtctgtgggtgccaagggcagccagggtcttccctgcctggtgtttagggctccagaggacttacctacaaaatactcctttgcaatgataattgtgggtcaggaatcttcttcctgtgtggcaggaggctgcggctgcctgtgacctgatgagctcatgttggctggtcccatgtgtgaaagggactctctcggggaaaccaaggcccagnnnnnnnnnnnnnnnnnnaggtgctagagagccaggcagagctggggccacagcgtgtctggagaagccaggtctgagcagagcagctggtgaatcccagacgtggccacctgtggcttgcagcccttctccccgcgcttgggactctgacatcttaaggctgcacggtcgtgtccttgtctgggtgaggccatgtctgtgatccaaggttcctggaactgacacaggaaggggctgtgaaccctaagtgggtgtcatctcctccgaccgaggcttctcaccctggagatggcagttactcctggccatggttgctgagcatgggcagaccagtggaggccaccctactgtgttatctgcgccttcgatgaagtgagacccttggggagaacgggctgtggatgaaggagtggactgcagccttggcctagccactgggctgggatcttctgggtcatgtgactgtgtatccaggagcagaaacttgtattctcaggattcaggatctacccagcaccaaagatgtattttcaggagaacagacctagaaatgggcctgtctggcatttcagagtcaggcaaagcaggcagggccagggagcttctgtgggtctacacaagaaggttcctgtgagggctatcagttgttgccttctagcttgctggtaactttggcgcctccgccaagccctgccagactcccctggctgtgatggcattctgtgccatcctccttgtccccagcctctgcaggatgccctccctacccacctctccctgggccttccctgtccactgggctggattcatgttcaaaccactggactggcagggcaacgacttcttcccacctcaagatgaggtcctcgcccccttgtcttggcataaaaacacctttaaagcatgagccatgtgcttctttgcccttctctgtcctgttccaatcttctgcctcccagtcactccctggggactatgggatcactgtccccccacctgtgtggccacaccatgtgtcctgtcaatccagaactgcctctgagctccaggctgaccacagatcagccacagcctgatgcctgcagccccactttgctcacccttcccctcccctcctccttccttccacacagcaagcctacctttctccatccatgctcaccatagcccccttccttgtgacctggaccctccattgtacctggctgagactgtcagcctcctggaggagtggggtccaccttcttcttgccctatgcagtgcaagctcacttctcacccagcaaggttgactcatctgcctccatgtctctggggctttgctgttgccctgaaacctagctgggctggtcttgctcccagcttgcttccccctcctcggatgtccctttgcaggcccctgtcgttcctccggcaccagtgtccttggctgccatggcaagctcatcaggggcttgtaccctggtcaccaagcatggtagcagctgcctgcattgtatctccatctggtcactgcaggtgccaacccttcatcccccatgttttcctgggccatggagggctgacctccgtttctggggaatgtggctgagctgtggtaaccagctacaccccaggtgctctttccatggtggtgcctgctcatcttgctgatgcaaactaggaagttaggctgcatctcggagtggctttcgctggagaggtgctttgctgtctctcagactcagtcactgtgttccctccccgcctctcttatctccatggctgtttgcagctctcccaggtactttggggtctgagctggaattcctttgtggtttgctcttctgcttctcactcttgtattaagaaggattccacaaagggagagtggcatccctgctgctgctgtgccagaccagagtttcctgaggggccctgaccctaaccctccagctcagccctgtacacctgaccctgtaaatgagtggggtttgctgactgtaatccctgacaccagtaaaaccaaaaggactcttgggggctcagtgtgagagccagggttacctactctgccaagtgaggacaaactgctaggctgtatcccataatttcaggatgagaaacattaacaataaaaatttgtagtaaacataacctcatgaagaact

SEQ ID NO: 352060 - DNA, 1046 bp, Homo Sapiens
  misc_feature (816)..(816): n is a, c, g, or t
  misc_feature (983)..(983): n is a, c, g, or t
tggaccggtccggaattcccgggatgcgccacgtctgaggcggctgtggccacgtctgaggcggctgtggccgcgtcggtgtccgcgtcgaggagccggggcagggcacgatggcggactgggctcgggctcagagcccgggcgctgtggaagagattctagaccgggagaacaagcgaatggctgacagcctggcctccaaagtcaccaggctcaaatcgctcgccctggacatcgatagggatgcagaggatcagaaccggtacctggatggcatggtaagggcccacggtgtgcgtgtatcagtgccctgccctagcactacctgctgcagagcctgcagtgtctccttcagcactggtgcgggtgggtggtcaaatcaccacttctgtgtgatcttgctgggattcctcccttaggactcggatttcacaagcatgaccagcctgcttacagggagcgtgaagcgcttttccacaatggcaaggtccggacaagacaaccggaagcttctatgtggcatggccgtgggtctaattgtggccttcttcatcctctcctacttcttgtccagggcaaggacgtgagccagtgggagctggtgtctgtgggtgccaagggcagccagggtcttccctgcctggtgttttgggctccagaggacttacctacaaaatactcctttgcaattataattgtgggtcaggaatcttcttcctgtgtggcaggaggctgcggctgcctgtgacctgatgagctcatgttggctggtccccatgtgtgaaagggactctctcggggaaaacaaggcccagnccctccccccctccccaggtgctagagagccaggcagagctggggccacagcgtgtctggagaagccagtctgagcagagcagctggtgaatccccagacgtggccacctgtggcttgcagcccttctccccgcgcttgggactctgacatctttaggctgcacggncgtgtcccttgtctgggttgagcccatgtctgtgatccaaggttctggaactgaccccaggaa

SEQ ID NO: 352061 - DNA, 900 bp, Homo Sapiens
  misc_feature (748)..(748): n is a, c, g, or t
  misc_feature (781)..(781): n is a, c, g, or t
  misc_feature (811)..(811): n is a, c, g, or t
  misc_feature (834)..(834): n is a, c, g, or t
  misc_feature (840)..(840): n is a, c, g, or t
ctcagagaagatccagcagtaagattagagtcaagattcaagtttaggtatgtctgagtccaaaatcagaggaggaagcagcagagcttaggcacctggccccatcttcctgcttggagtggggccttggccactgcttgctggtcggtcctgaaagccaagaggaggctgctgatggtgcctgatggcttcatctcccatttctactccgtatcggagcatgtgagccctgtcctagccttcggcttccttggacccaagcctcagcttgctgaagtctgtgctttcttcaagcaccagattgtgcagtacctgagggacatgttcgacctggacaatgtgcgctacacgtcactgcccgcgctggcagacgacatcctgcagctgtcccggcgccgcagcgagatattgctggggtacctgggggtgcccgcggccagcagcgcaggcgtgaatggggcgctgccccgagagaatgggcccctgggggagctgcagtagaggcggcacgggctggggggtggcagagagaaggctcctcctcccttccctgggttggtatctgacagctgtggtggctgagggccgttgcccctgactttgccccacccccatcatctgggagtccccaaggcccagaggggacatttccatggagaagaacggttcctgggggaagcagaggccaggaccagtggggcctgtgggagagaaaggctgtgagagagggggttgttgtggagaattnggacaggcagagcagggatgccccaggtggggnaccccaaaacctcccatcgctccagggctnctgacaagggtgctgggagggtngaggtnaaggatggggcctagagccttgtggtgaaggtcacagtgtcctgagctagaagccacctg

SEQ ID NO: 352062 - DNA, 445 bp, Homo Sapiens
aatttataaaggaaagtgtttaattgactgaagagttcagcatggccagggaggcctcaagaaacttacaatcatgggggaacgcaaaggggaagcaaagcaccttcttcacaaggcttcaggagaaagagtgaggagttaaaggggcagagccctttataaaaccatcagatcttgtgagaactcacccactatcaggagaacatcgtaggggaaaccacccccatgatccaatcacctcccaccaggtctctccctagacacatggggattatggggattacaattcgagatgaaatttgggtgaggacacagacaaaccataccagccatttatgttatttctaattaacccactgcccccatttcttttttaacttttttcactttctaaaactgttagtctggttttgacccctgtatttatcttctggggctttcatct

SEQ ID NO: 352063 - DNA, 1154 bp, Homo Sapiens
  misc_feature (59)..(71): n is a, c, g, or t
  misc_feature (361)..(361): n is a, c, g, or t
  misc_feature (363)..(363): n is a, c, g, or t
  misc_feature (936)..(946): n is a, c, g, or t
tcctcctaaagggtcggaaaaactcttctaaagagaaaggttttcccccacgtatgttnnnnnnnnnnnnnaaggagagagggtgctctccctcccacaaatttcccccaaaggggggccggtgtttttcccacttcccaagggttgtgtaaaaaaaagggggcccaagcgcccgagatttgtaaattagcggctccccctttggggggccccctttttttacaaaaaaaacgggggtcccgctaaaactgtggggccccctgagggggattttttaaagggggccccccctttctccgtcggaaggggatgggtgggtgttctgacggggggtgggtcaaggagcgggggcgtggcgggncngaaagaaatatttaaggtttatttctaaaggttatatcatggccaataatatagaaaaaaagtgccacacattgacacgtatccactgcttgtccattgttctcataaaagtctacctttcagttttgctgaactaaccaaatattaatagcacataaacactgatacacatctcacaggacataatacattttacaaaatatctctagtactataacttgtaaaaatggacatctctgatactacggacagttacatttcacattatagtgaaagttgtggttacaaaggcattattcatttgatggcatttttccatgggttcttagacttccaattgtgtagccaaaggtttccctcctatttcattgagactttgaaggatcgttcagtcacttaaacaacaggctttcttcactgtaaacccctggagaatggagtttgagtacctaaactatggaaacattagcaaactgataagtgatcatggtgacaatcaccttttcattgagcatggtaaagttaaaaaaatataaccaaggagacaatagactcttctagattttgagcttnnnnnnnnnnnttcttttcctgtgctgccagggaggcatcaggctcacagagcctcggcagacgtgtctgtggacacagacatggttaccttggcaatcttgaccgtgctcttgatgcagctttctgcggccctgtgaacactggctgcattgtttgcgtgtttgtgcaggcagtccgagtcccccatgctgtatccagaatcccaagaattccggacc

SEQ ID NO: 352064 - DNA, 1109 bp, Homo Sapiens
  misc_feature (107)..(107): n is a, c, g, or t
  misc_feature (146)..(146): n is a, c, g, or t
  misc_feature (173)..(173): n is a, c, g, or t
  misc_feature (872)..(873): n is a, c, g, or t
  misc_feature (877)..(972): n is a, c, g, or t
  misc_feature (1094)..(1094): n is a, c, g, or t
gccccctgtccctcacccccgtttggttcagtccatttcctgacctgggggcttttccttcccgatggggctggtctgggccacacagagacagatcttcctagganggctggggtggggagaacacaacctaggcggcccctctnttccacagcccctctcccaaccctgcnaggggggccgaggcctgccacatagaggactcccacactgcatgacccctcatcccaaacccatatccaccaggactctttcccttgggccctgcgtcccgtggctgtctcccagtatctgttccttctcatgcccctgcagggccccggcctgtctatgatcctgcctccaacaaattcaaggtgtggggagacgggtgccgtggttgggagctgttcagcgcactcctgacctcttctagacctatggctttcctgtcctgcattcagagctagaggccagctcggccttgcgagaagcatccaactttgagactttgcaggctgccaggtgctggttggggggcacagagcctggggctctggggaggtaatatgggggtctgggaaactccgtgaagagacatagccatgcggggcctgaatctcctgaactacagccagtttcctgagattagaacctgtgtgtatgcacatgtgaatgtatgtgtgagtgcacatgtgtgtaagtgcagtgtgcgtaaatgtgtgagtctgcgtgtgttaggcatgcctgtatgtgagcgcgtgtgtgagcgcatgtttgtgcaccagtgcacaagtgtatgaatgtggacacatttataagcacacctgtgtgtgtctgagtacatgtgcacacacgtgtgcacaaaatgtgcatttatatgagtgtgagtnnatgnnnnnnnnnnnnnnnnnnnnnnnnnnnnnnnnnnnnnnnnnnnnnnnnnnnnnnnnnnnnnnnnnnnnnnnnnnnnnnnnnnnnnnnnnnnnnnnntttgtgtgttccccttggctgccaggccaacgactgcttctctgcatcctgctgtcttcgctacctgagggtctgtaacttcttccctgtgtgggtccagcctgaccccctgtaagtaaatntccaaaagccccttg

SEQ ID NO: 352065 - DNA, 1632 bp, Homo Sapiens
  misc_feature (420)..(496): n is a, c, g, or t
  misc_feature (960)..(960): n is a, c, g, or t
  misc_feature (986)..(986): n is a, c, g, or t
  misc_feature (997)..(997): n is a, c, g, or t
  misc_feature (1000)..(1000): n is a, c, g, or t
  misc_feature (1018)..(1018): n is a, c, g, or t
  misc_feature (1049)..(1049): n is a, c, g, or t
  misc_feature (1165)..(1165): n is a, c, g, or t
  misc_feature (1179)..(1179): n is a, c, g, or t
  misc_feature (1182)..(1182): n is a, c, g, or t
  misc_feature (1184)..(1184): n is a, c, g, or t
  misc_feature (1202)..(1202): n is a, c, g, or t
  misc_feature (1216)..(1216): n is a, c, g, or t
  misc_feature (1238)..(1275): n is a, c, g, or t
  misc_feature (1280)..(1280): n is a, c, g, or t
  misc_feature (1288)..(1288): n is a, c, g, or t
  misc_feature (1294)..(1294): n is a, c, g, or t
  misc_feature (1301)..(1301): n is a, c, g, or t
  misc_feature (1314)..(1314): n is a, c, g, or t
  misc_feature (1336)..(1336): n is a, c, g, or t
  misc_feature (1344)..(1344): n is a, c, g, or t
  misc_feature (1350)..(1350): n is a, c, g, or t
  misc_feature (1355)..(1376): n is a, c, g, or t
ctccaaggctttggtttggctactccaagatcttcggcgctcttgcagcgatataaccgggctcctggacatatttcctctaaactaatctaccatcctggggctcctatctcctacctcacaccaagtttcctcacattacaccctgggggaatccacatgccaaatgtatggtccaagtgcacatgtgttgtaagtctcagtgtgcgtcaatgtgctagtctgggtgtgttagcatccctgtatgtcagcgcgtgtgttagcgcaatgtgtgtgcaccagtgccacaagtgtatcaatgtgctcacatttataagcacacctgtgtgtgtctcagcacatgtgcacacacgtgtgcacaaatgtgcatttatatgagtgtcagtgcatgcatgtgcatcaacatgtgtgcacaagcannnnnnnnnnnnnnnnnnnnnnnnnnnnnnnnnnnnnnnnnnnnnnnnnnnnnnnnnnnnnnnnnnnnnnnnnnnnntccccttggctgtcaggccaacgactgcttctctgcatcctgctgtcttcgctacctgagggtctgtgacttcttccctgtgtgggtccagcctgaccccctgtaagtaaatgtccaaaagccccttgcccctcccctagggctaccagggaacatactctactgcatatgttctagtgcaagatgaagccggggttctaggaaagcaagagctcaacactttggtggcctttggtgccccctctcagctccccatgacaagacaacggggctgcagacactgtgtgttcagcctgcccaggggctggggctctttaaggctttgtaggtgaggtttccatggaccttcaaaggtgccagcagcctgcaggggaaaggcaaactccctccttgcaaggaaaggagatgtccagccaatgatgcccggcttctgaggcccagaggagcaggtgggatgggagcancccctggggctggtgtcccgaagatnaaatgaagggngcnccctcatctcagttggcnggaggtgttagaagtggatgtgcaagaccanccactggaggtagctctctggagtcaaagagaggcctgcttttctaccagacatgggagcagcatgtaggatacaagggcctacccagagaccagagagagtcagcctagcccttncagccccaggaagnccncngcccaagtgagtcctggnccaaggatcccccnggagagccgcagttcagtgggnnnnnnnnnnnnnnnnnnnnnnnnnnnnnnnnnnnnnngggcncctgtggngctggncattgtntctgacctgtgcntctcccatgggagggctgggcncaggcagncccccnccccnnnnnnnnnnnnnnnnnnnnnnccaataaaagaacttgcccagcgtgaagctctgtgatgctttctctcgccccgtgacgatggagggtcagtcctcatgctccaggaccacatgaggggatactcagctgcctgaactggacctgacatggggagcaggatgaactctgtcctcttggagctcgcagtctactgaagaggcagacacctcagcatctctaatctggaatcttaggggcacttgtagccttggcgtacggggaaatcctctgagagtc

SEQ ID NO: 352066 - DNA, 469 bp, Homo Sapiens
tccttgcaaggaaaggagatgtccagccaatgatgcccggcttctgaggcccagaggagcaggtgggatgggagcagcccctggggctggtgtcccgaagatgaaatgaagggggctgcctatctcagttggcgggaggtgttagaagtggatgtgcaagaccagccactggaggtagctctctggagtcaaagagaggcctgcttttctaccagacatgggagcagcatgtaggatacaagggcctacccagagaccagagagagtcagcctagtccttgcagcctcaggaagtcctcggcccaagtgagtcctggtacaaggatccccctggagagccgcagttcagtgggctccaccgcagcccctggccacggcctatgccctccctgggcccctgtggggctgggcattgtgtctgacctgtgcatctcccatgggagggctgggcacaggcagtgctatggcc

SEQ ID NO: 352067 - DNA, 682 bp, Homo Sapiens
  misc_feature (39)..(39): n is a, c, g, or t
  misc_feature (46)..(46): n is a, c, g, or t
  misc_feature (84)..(84): n is a, c, g, or t
  misc_feature (96)..(96): n is a, c, g, or t
  misc_feature (160)..(223): n is a, c, g, or t
  misc_feature (382)..(484): n is a, c, g, or t
  misc_feature (620)..(620): n is a, c, g, or t
aggctgccaggtgctggttggggggcacagagcctgggntctgggnaggtaatatgggggtctgggaaactccgtgagagaganatagccatgcgnggcctgaatctcctgaactacagccagtttcctgagattagaacctgtgtgtatgcacatgtgnnnnnnnnnnnnnnnnnnnnnnnnnnnnnnnnnnnnnnnnnnnnnnnnnnnnnnnnnnnnnnnntagcatgcctgtatgtgagcgcgtgtgtgagcgcatgtgtgtgcaccagtgcacaagtgtatgaatgtggacacatttataagcacacctgtgtgtgtctgagtacatgtgcacacacgtgtcacaaatgtgcatttatatgagtgtgagtgcatgcannnnnnnnnnnnnnnnnnnnnnnnnnnnnnnnnnnnnnnnnnnnnnnnnnnnnnnnnnnnnnnnnnnnnnnnnnnnnnnnnnnnnnnnnnnnnnnnnnnnnnntccccttggctgccagggcaacgactgcttctctgcatcctgctgtcttcgctacctgagggtctgtgacttcttccctgtgtgggtccagcctgaccccctgtaagtaaatgtccaaaagcccctttgccccttnccctaggggctacccagggggaacatacttttacttggcatatgttcttagttggaagagaa

SEQ ID NO: 352068 - DNA, 359 bp, Homo Sapiens
  misc_feature (191)..(192): n is a, c, g, or t
  misc_feature (285)..(285): n is a, c, g, or t
agaacaagtggatatcaggggacagaaaccattcgcagcccatccctcggcagatgcagagggagtcagcctggaacccccacccctgctggctgtgccccaccgctgtctccacaccccagcccttcctccagacacccagccgtccactgcagcaggagcacaggtgccccaaggggaccactgttggnnaccaggcagccctccactcacccacacagtgtgtctctgcaccccctctttgacatgggagccggggcgctcttggaaataagggtttacctnaggggtctgaagacttgggcagtggggagctgtgaagccttggggagggaatcagcttgtccaagagtctgggg

SEQ ID NO: 352069 - DNA, 353 bp, Homo Sapiens
  misc_feature (29)..(29): n is a, c, g, or t
gctacccggtgcagcagctcctgccgccnaacacccgatactggactcagaagcgacggtaccagggtggagtctgtgagtgtcaggccctccaggtcagcagccagactggtagacacaattgctgggggagacacaggctggacactgggaggggtgactgtgggagtagataagactatgaggaggcaaagtggaggtggcttgggttgagcagggagcctagggatcaaggagcacgcatttcagcaccatggacagcggggcacatggctgcctggaggctctcgcaaaatacccattcctagacctcaaccccagacctgaggaggtcagccatactgccctctcag

SEQ ID NO: 352070 - DNA, 1158 bp, Homo Sapiens
ggggagtccgcagacagtgaccctgagtctgagagtgaatcggacagtaagagcagcagtgagagcggctctggggagtccagcagtgagtccgacaatgaagaccaggatgaggatgaggagaaagggagaggcagtgagagtgaacagagtgaggaggatggtaagaggaagacgaagaagaaggtgccagagagaaaaggagaagcgtcatcctctgatgagggcagcgattccagcagtagctcatcagagtccgagatgacatcggagtccgaggaggagcagttagaacctgcctcctggagcaggaaaacacctcccagcagcaaaagtgctcctgcaaccaaggagatctccctgcttgatctagaggatttcacccctcccagtgtccagcctgtgtctcccccagcaattgtgtctaccagtctggctgctgacctggagggcctgacactcacagactccaccctggtaccgtcgcttctgagtccagtatcgggtgttgggcggcaggagctgctgcaccgggtagctggcgaggggctggctgtggactacaccttcagccgccaacctttctccggggatccccacatggtgtccgtgcacatccacttctccaacagctctgatacccccatcaagggcctgcatgtgggcactcccaaactgcctgctggcatcagcatccaagaatttcccgaaattgagtccctggcacctggagaatctgccactgctgtaatgggcattaatttctgtgactcaacccaggcagccaacttccagctgtgcacccagacccgacagttctacgtctccattcagccacctgttggggagctgatggcccctgtgttcatgagtgaaaatgagtttaaagaaggaacagggaaagctgatgggcatgaatgagatcacagagaaactcatgctgccagacacctgtcggcagtgaccaccattgtggtgccagaaaagtgactgccactgccgaccctgctgtacgtgttaccttgtggggacatctgcatgagtacaaggtattgcacgggcaggaccaatgacttggtggaagcctacgtcttgatggatccctggatgccccggccacgctggagctgcaccaacttgaccgtacaaacgagagaa

SEQ ID NO: 352071 - DNA, 1170 bp, Homo Sapiens
  misc_feature (68)..(68): n is a, c, g, or t
  misc_feature (974)..(974): n is a, c, g, or t
  misc_feature (976)..(976): n is a, c, g, or t
  misc_feature (979)..(1067): n is a, c, g, or t
  misc_feature (1078)..(1093): n is a, c, g, or t
  misc_feature (1122)..(1122): n is a, c, g, or t
  misc_feature (1124)..(1124): n is a, c, g, or t
ctttggaggaaaagacttcccctacaacaccttggggtttaaccagatgaaccggtcctggacccaanggcccctacaaaaaaagatcaggggttacttggtccacacaaaaggcataccggctatccctatcagggccttttgtttaagggtttgataaaaacaggatcggaccaggggattggccctcaggaaagtaaagccttagggagctggggtcctggggccttctccctcaagtgtggaaatcctgcccaccagaccaaaaactgctgcaaaatggggactgccagcccaggcctgtgggcgcagctgcctgcacagcggatggagcagctctgtgccttctgtgtggtggggagtggctgtctctatgaggctgctaggatgcttgggccccagccagtctgtgcttgcttcctcttctgcctggctccctgacaggtcccccagaagccccagagccctatttgcactgccttaagagtgcccgctggccatgcagctacctggcctttcaggcaggagggatctgatctcaggtggctcacagtggaccacatccatccttgggccagagacactagaggaaaactccagctgtggggtttcagagttgtcaggaactggtgggctcaggaccgatgtcaggctctagggagtcaggctctggggatgtcggttcccacttctgaggagagggacagggaggcctcccaggtggtgaagcaccgacctcagcatccctggaggcaattgggagcctgacgggtttggcggctgctagatccacatcggcgacccacatcctgccggcgtgcacctgcgtctgtgtctgctcctggtgggttgtggggcaggaatcagattcactcattagtaagccgcactcgctgaaggggagagcaggagcaaggcagacgtgagccaggccttggttattaggagctaattatgggccaagtatggtattnantcnnnnnnnnnnnnnnnnnnnnnnnnnnnnnnnnnnnnnnnnnnnnnnnnnnnnnnnnnnnnnnnnnnnnnnnnnnnnnnnnnnnnnnnnntttctctactnnnnnnnnnnnnnnnnttagttgggtgtggtgacgcacgcctatnancccagctatctctttgatgctgaagcaggagaataaattgaacaaa

SEQ ID NO: 352072 - DNA, 773 bp, Homo Sapiens
  misc_feature (448)..(448): n is a, c, g, or t
gagctggtggtggccctgatgtgcgacagcagctgcgggaggcgacgggctgcggcctgcggaacctgaggcagctggggagtggccggtgcgcgccggcctggatagctgagccgcgctggcgtgcggcggtggccgcgatgatggagatccagatggaccgagggcggctggcgtggtggtgtaccaggacgactactgctccggctcggtgatgtcggagcgggtgtcgggcctggcgggctccatctaccgcgagttcgagcgcctcatccactgctacgacgaggaggtggtcaaggagctcatgccgctggtggtgaacgtgctggagaacctagactcggtgctcagcgagaaccaggagcacgaggtggagctggagctgctgcgcgaggacaacgagcagctgctcacccagtacgagcgtgagaaggcgctgcgcaanacgctgaggagaaattcattgaatttgaagactctcaagaacaggaaaaaaaggacttacagacccgagtggaatctttagaatctcaaacaagacaacttgagctgaaagcgaataaactatgctgaccagattagcagacttgaagaaagagaagcagaactgaagaaggaatataaatgcattacatcaaagacacacttgagatgatccataattatatgggaacatttagaaagaacaaaacttccatccagctcttcagggagtggttcaactaggattccacagctccttagttaggatttggaaaagaacgccctat

SEQ ID NO: 352073 - DNA, 921 bp, Homo Sapiens
  misc_feature (28)..(28): n is a, c, g, or t
caccagggccctgaggatgttgtggggnccatggcctggcagtgaaccatctaaaagcattatctatttttcaagcataaaccacgcagagaggctcagatgcatcgctgggctacagaagtggcctctggggaatctggagtatgttcagcctgccgaccgataactacgttccaggtggtgacaagtattagcgtcaactcaggtagatgccttttaaaaacgccctgccagaaacaccctagggaaaactggagtgaagagcgggtctttcagaacatttggtactttctggatgaatatctttttgatataccaagaggcatcaagtcaaagtctcacttctatagcgaggaagccattaacttgctgaatcctaaagggaagaatcaaaccgcaggccacaggcatcctggacttagcttacatgagtcttacaaggccaggggcgggtcagagaaaagcagcggggtgaagtgtggagtgtggaagcaggggtgcagcagtgtgctagatctgtttcctttgaagtacagcaccttggcagcatgaagcatgagttgttccactgttctactgggtgtatggagctgggccaacaacctcagcagactatctaatgttctaagagccttcctcaaagaaaatgttttcaggacgggggagaaggcccagaatgcatctgcaattccaacaggcaatcgctatgctcttccttggtctgtaaggactggatgcctggagtagactgttttaagtaccaaaacaagacacccattttagtgtggaggaagaccagcctatatggcccagaacaataatatttggcatgagtatgccactcttgagaaaattctccttagcttagaaaatgcatctttcacacagctgctgggagaaaacgctgcaatgcaccaaaag

SEQ ID NO: 352074 - DNA, 794 bp, Homo Sapiens
  misc_feature (24)..(24): n is a, c, g, or t
  misc_feature (138)..(138): n is a, c, g, or t
agttttgcgataagcatttgttgnatgactgagtgagtgaatgaatgaagcctctgactttccagcctctccgccattgctcaactatccctgcaacctagaatgcctcaaccacaacagcccttcaaggaccagctnaaaatgcctcctccaagaagccttccctggtctccactagaaaccatcactccctcccctccacggccactccagagctgccctgctcagcaacacagtgtccctgaggactcaaggtctgggcctgtgcccactgcgggacccagttctgagccagcccatgactcacatacactcagctgccagcttgagaccaagggggaagcagccggtggaggagctggaggagcgtatctgggttatgggtgcatatgtgcctgtgttctaggaaagggcacccgttgcctagagccagccaccctcacagacgacagcgtcctgggaaatcggctgcatcttaaagtccaaccccctcatggtatatagctagggaaaccgaggcctcagaaggaaggaacctgcccagggtcctccaggttggtaacagccgaaactcaggattggacttgggggtcagggtcacttgggtttgaatttcagctctgctttaccccagcaagttgtacctttctgcttccccgaagccgtcctcctcgccttccgctcccgcctccaccggcatccccaggtctccgttggggcccgacattgcgggctcgggcgcccgaaggccgcgcgacgatggaacgcggcgaccgtcgcgccgaaagccggcg

SEQ ID NO: 352075 - DNA, 450 bp, Homo Sapiens
aggagggctaggggctcagcatagaggcctgatccagtctggggcattgggtgggctcccggtggtgacatccatactgaaacttgaaggatgagtgggactcatccaggaggagagaagggaaggaagatgggaggacccagcaccttccaggcaaagacagcagcatgttcaaagggcctgggctaggttttggcctgggcactcaccccctggtttaaacacctttttaagggttggccttcagggacccctggtgggtttgcctgcctgggccacccttcctgcctgggcctccccttggcctacctgggccagcccccaccacctggcatgccctcctggggccaaaagtgggcctgcaacccacccacttgcctgcccacccaatttttgggcgctccccactttgcccaggccttgagtgtccacattaaatgggtttccccc

SEQ ID NO: 352076 - DNA, 917 bp, Homo Sapiens
  misc_feature (760)..(760): n is a, c, g, or t
ccatgtgcatgaaactgtgaaaagcaggctgtccggtcggaatcccgggatatcgtcgacccacgcgtcagctgccgcgttctacccttccggcccgtgttctatccgccgcctccaccttccatccggcgccggctttcggcgcgacggtcgccgcgttccatcgtcgcgcggcccttcgggcgcccgagcccgcaatgtcgggccccaacggagacctggggatgccggtggaggcgggagcggaaggcgaggaggacggcttcggggaagcagaatacgctgccatcaactccatgctggaccagatcaactcctgtctggaccacctggaggagaagaatgaccacctccacgcccgcctccaggagctgctggagtccaaccggcagacacgcctggagttccagcagcagctcggggaggcccccagtgatgccagcccctaggctccaagagcccccaaccgggacccaaccctgcctccctgggctaggctctggcctgggcactcaccccctggcttagacaccttctcaagggctggccttcagggacccctggtgggtctgcctgcctgggccacccttcctgcctgggcctccccttggcctacctgggccagcccccaccacctggcatgccctcctggggccaagagtgggcctgcaacccacccacttgcctgcccacccaactcctgggcgctccccactctgcccaggccttgagtgtccacattaaatgggtctcccaccantacaccactcccacttgcgcccttttggcctttccaaatacgcttaccatccaacccctgttgggcgccttcggcccttaaaaaattttcaaaaaccctctttttgggccgcgggcccccatagggaacgggacaagggctaaaaccgtgttcccca

SEQ ID NO: 352077 - DNA, 1335 bp, Homo Sapiens
  misc_feature (1279)..(1279): n is a, c, g, or t
tccttctcctcatccttcctgagctgctcctttatcatgattcttcttggttcgctggtgtacgactataccctggtcgctggccacgtatgtatgaggccatggtggttgcgtgtgttctcttcgggatttccatggccatgcgttccgggcggctttgcttcgtgtgctggtgcggaatatggcaaggagccctgcggcgggccctgtgggtgcaggagctgggaccaagcaccatgcactcactcccggcgccccatctcccccagccccatgcaaagaggccaggctaggggctgaggctggggagggggtccaggccaggcttgcagcccaccggcagtgtggcggcctcgctgggtgggatgtggtgggtcatggtagcgcttgcccatgaaggagcgcgattccgcgagcggctccgggggcctcctccggccaccacaggctggagaagcgcatggtagaggctgccaagaaggccaagagtaggaggccggccagagaagagaggatggaggtaatgacgatcatgctgccacttcgccgccctggccaggtgtcgatggatccgggggtcttcccttggtggagagtgatggggtctgaccacttggtctcagccctgggtgagcccctggtgtccatcaggaggaacttcacccgatagggtccagggccagggaggggcgcgttgcagaagggctgctggtggcagccgtggtcatggcccacccgcagcacgggggcgcctccgctgcccgccatggggtcgccacagggcagctggtccggagacaggggcagcgtcatgtagtggccatcggtcagcagctgtggggaggccggaatgtcagccagtgtctccgggttctggaagcccctggaggcattgctgaaggccaccacgagccagacggtatcgctggcgctggcaagcccatcgaagacacagcgcggctgctccagggagaaggtggtggctgtgaccttcccttccaggtcccaagctgttatctgtggtgtgtagggcaccagctccaggctcaggctgggccggagacagttcaacgccaggaggagcatctgcagccctaggtgaggctgcccccagggtagccccatgacagctgccagcacccgggaggctcaggggctggtctggctgcttcgggctgcacctcacccccaacagcttggccctggagaagctggttaatcaggctgccccaggggctggaaagacctgcaaatgtaagtgcaccccacccccttcctnccaggccagcccacagcagggaggagctggggggactctggtgggaggcaggccag

SEQ ID NO: 352078 - DNA, 2040 bp, Homo Sapiens
  misc_feature (878)..(895): n is a, c, g, or t
tgctgaagtacaaatttaataaagcctttgatcacatcccaatccataagttagctacaaaaacaaaaaatcctacaactttttagagccatcaagagccatcaaggtgtcagtgaacaccagttacaaaaggagattcagtgtttcagatagtgcaatatttccagctgctgaaaagaatttaaatgaaattacaaactacccctccttgtcaaaaatccacatgaagttgatattggtgcttataaatcactctctcccagtccctcactggttccaaccttcaggtgataaaaattaggatgggatccatcttccctgtgctgacagtctggggtccccgcatgtatgcacgaacccgcccagcgtgcgcacacacgttcagaagaaatcttcaaaggaaccgagcgtttggagaaagtggcaagtccacagaatcagaggttacgaacacaccttcaataatattaatacattcctgtctttaaattccttgccatgtttccatcaaagtagagcacacactcttttccagaagcctgggggctcgacctgggtgggacaccaggatgcagctgaaactctgaaggactgtggagacgggtggcccctgctttgctgccactgtgacagctcttgttggaaaatgttttgcgtctttgaggagagcagaggagggactgggccttcctggcttcgaatccggcatcaaccttggtggtgcaggtgcaggagcatgaggtgggagagggtgggtggctgtcaacacagaccacaaacagggcctctgcctcagttccctggagctaaagttcttacaacaaaggtaaagaatgagggcagaggaacacaatgggttggaagagaaatgaagtttnnnnnnnnnnnnnnnnnncccagagggtgtgagcctctgtcagtgcaacgggcttccgggttccctgtgctgaggaaggatgggcagcaagacccaagtttcctgggattttgcagactcaggagtgaagccaccgcccagatgggatgtgtaccttaggttagtgtttgttcctcattagataaccagtgagacaaataagcagggtcaaaggcagccgtcctccgcgggacaagcaggctttggggaacaggcagcacattctggaaacggggctgctgctaagggccgttgtttttcttcccccaaaccaggatgccaatgtgaatgcataggacgggaataggtccgggaagactctctggcagctcagcccgctgaggacgcagaaaatgggagggccgcggcgtggagcgcgtggcttcaaggcaggagcagcgccttggactcacggtgtccatagcgtccctagcaggcgcctgcgcttccctgggcagcagatgggcctggctgtctgggaagaggcgctgtggacggcatggaggcagaaactttgtggggtgcatagaggcttggcgaggccttacctgagtaagagatttcagaaacggaaggagaggatctcacgcacagtagctttgtacactcaacccatgctgcaaaaaccactctaaactcttgaaacccctgggacttgttcatacacagctcactcagacggctaaggaaagacagactcccaaaagatcaaactagctaaaaagaagcccctctgccatcacccaggaagaatggacccgtgttggtggaatctggaggtttattttctgcagccctgtgccttgggcatcacctggagatgctgtgtagtgctgtcgtgggcgtctaaatttcttgaggccacaaggagtctcatggctatagagagggtctaggggccaatgtcacctggcatgttggtcacattcccaggaccacactgcctctgggagctgaaggtccctggcagcccaggagccctggaggcagggctgggacaggagctaggagagttcaaagcccgtgttcatgctgatggcgtagcgcagcttctcgcggaggacgctcttcttgctgtagttgggcagcttgagcaggttgaagcaggtggaggaggtgggcag

SEQ ID NO: 352079 - DNA, 1482 bp, Homo Sapiens
  misc_feature (165)..(203): n is a, c, g, or t
  misc_feature (205)..(258): n is a, c, g, or t
  misc_feature (1310)..(1431): n is a, c, g, or t
ggatgctcaccagtgaccacgaaggctttctaaggtttgaggccaccgatgccctcagggccccgaggggaatcataatagtatgagaacaggaaacagactgcctggtttcagacctcggctgcttgctagttgcatgactgtgggacgggttacttaaatctnnnnnnnnnnnnnnnnnnnnnnnnnnnnnnnnnnnnnnntnnnnnnnnnnnnnnnnnnnnnnnnnnnnnnnnnnnnnnnnnnnnnnnnnnnnnnatttgtagatactaagggggacttgcctggaagcagacttgtgtccgcagtatacaaactcaccctttaatgcacacactgaccagataacacaaacacatttacccccacagcacctagactcttctcacagtacacacacttgccttccagtacacagacatatccaaaggcacaccgacaagcaccacagcaaaaagatgttccccagaacacatggacaccccaatccccgtatcattagactctcccagaggcacgtatgtactgcttaatgcagagactcacctgaggcacactgatgcaccccgcatgacacagacttgcccccccataaggactctactatgacacacagacaatcccaacatcacacactgttcccacatcacacgaacccattttaggaaacacacagcatacagacttaccccatagaacacggcttccccgacaagcacacatactctcaaggccagtagactcaccccacagcacacagactttctctagagtgtacagcttcttcccacagcaaacagactctccccagggcacacagacacccctgacatcacatactctcaccacagaccatagactcgtcctagagcacagggactcttgccaatgaaacagactttcccgagaatagactcatgagacagcttgaagacccgcatcatgacacaaagactctcccacaacagacagactcaccccattgtgtacagacaagcaccataggccacagaccatcacctcaggacacagacttgcccagcaccacacagacactctgcagagcacgtagagtcaccccgcaaagcacagactaaacccatactacagagactctccctatagctttcagacaagtttaccccaccacagagacatgcaacggtacatcttacaacatatatcactccttgatgcacacaattgtgccacagcacacaaacttgtcctacagtgcacaaattcatgtcacaaaagacacactcaccacacaatacatatacttgctccagccggacgcggtgcgtcannnnnnnnnnnnnnnnnnnnnnnnnnnnnnnnnnnnnnnnnnnnnnnnnnnnnnnnnnnnnnnnnnnnnnnnnnnnnnnnnnnnnnnnnnnnnnnnnnnnnnnnnnnnnnnnnnnnnnnnnncatggtggtgcatgcctgtggtctcagctgctccggtcgaatgcttcagta

SEQ ID NO: 352080 - DNA, 1001 bp, Homo Sapiens
cctctccacctcttccgagcggggtaacggcccggccgtcggtaacctggtttccgagagtgccgggcggtcggcgggtcagggcagcccggggcctgacgccatgtcccggaacctgcgcaccgcgctcattttcggcggcttcatctccctgatcggcgccgccttctatcccatctacttccggcccctaatgagattggaggagtacaagaaggaacaagctataaatcgggctggaattgttcaagaggatgtgcagccaccagggttaaaagtgtggtctgatccatttggcaggaaatgagagggctgtcatcagctctgattaagaaaggagatttcttcatgctttcgattctgcatggggtacagccagtcacctcaccagagaatgacggctggagaagaaaactctgtaataccataaataagagtgcttgtaataaaagactgtgcacaaggattaatatttcccttcttaagtatcaaaagaactctggaacaaattataccattaggaaggttttcatgattcagttgattttccaaaaatgaagctatctcacccagctgggtttggaggagcaatctgcttattattctgtcgttaccacttactcaagcgagctgtgatatgaatacaagcaaccagtgggctcgggaaggtccgggtctcttctgccatcttccagataagagatttcagtaaaaaactgccatgctgagctgccttatagagctcttcgaaaatgttcgagttgataaagctctttgaggacaaggtacttcgtgcacctcatgctgaagattgcaccatgttggaaaataaatatgaagcaagtcaaactagatgcatacacttgtgtagaaatcaataatcaattaatagaagtgaaaaaatagacattaaaatgatttatttctactttgcagtggtgtctttttgtaaatcatcttttgtaaagcaattaaaattatagtgccgagaagtacaattt

SEQ ID NO: 352081 - DNA, 693 bp, Homo Sapiens
  misc_feature (30)..(30): n is a, c, g, or t
  misc_feature (182)..(194): n is a, c, g, or t
  misc_feature (656)..(656): n is a, c, g, or t
  misc_feature (677)..(677): n is a, c, g, or t
acctggctgttaatgctttaaaagtgccanagctgtaatcgttctttggttcaggagctgccccccttagtctcctaaaaaccctggggtcccagggctcaaacccccgcctgctgggccctgaggaagcagagcaggaggacacattccccttctgcggctgtgggtgctctcctgtgctnnnnnnnnnnnnnaaaaatcactgaaatccaacagctttcaggaagcaggatgcccccagggaaatttgggtccttagaaagagagaagggactagaaatgctttggtcacagtcctgatacccacagccagggcagagcttgctccaggagagcaagcgggagccgattacagcactgcacatgtcacgcagcaggagacgtgcctgacgcagactggcttctgagcataagccagaagtcactgaataaatattcaaggcatcttttggttctcagagaaagagcagggcttaaaagaaaaatctctcccctgcctgactggctgcagctctgatcttcaggctgacaatgctgagggctgggagaggtggcaggcgggccccagaactggctcccccgcagcaggtggctttggtccatcacgtgtcagggccgcttgtgtccggcctgcccgggccctcagaagctgaagnggtcatcctgctctgtgccgntgctgtcaggcttgtc

SEQ ID NO: 352082 - DNA, 383 bp, Homo Sapiens
  misc_feature (11)..(11): n is a, c, g, or t
  misc_feature (32)..(32): n is a, c, g, or t
  misc_feature (318)..(318): n is a, c, g, or t
  misc_feature (323)..(323): n is a, c, g, or t
  misc_feature (337)..(337): n is a, c, g, or t
cgaggagccanggagaggcagcccaggcgtgngttgtgagtgacaccctaaaagaagctggcacccactacatcatggctactgatggtacccagttgcaccacattgagctcaccgcagatggctccatctccttcccaagtccagatgctctggcctctggtgccaaatggcccctgctgcagtgtgggggactgcccagagacggccctgagcccccatctccagccaagacccactgcgtaggggactcccagagctctgcctcctcacctcctgcaaccagcaaagccctggggcctgggcagtgcccccgtnaccgncattttgcagccantgttgaattcaaagaagttttttcttgcaagatttgttgccgaggg

SEQ ID NO: 352083 - DNA, 941 bp, Homo Sapiens
  misc_feature (38)..(38): n is a, c, g, or t
  misc_feature (45)..(45): n is a, c, g, or t
  misc_feature (117)..(117): n is a, c, g, or t
  misc_feature (126)..(127): n is a, c, g, or t
ggaaaatagataggaacctgccctgaaagatgcttcanttggggngaaaaggtgaaattccattgttagacaatttgtttaagacaatacatcttgcttgagaaggaatagaagggnaatgaaatnnggggagggagtggtaggagatggaggctttgaaagaaaataaccagatttagaaacatgggtatagaaagcatcctccagtacttctgtaacaatttatcaagacctacaggaagtcagttttggatttgctcctccgagatttgcgagccagaggaaaatacttagactatcaggttggaaagttcacacttggaccaggaaaagaccaagcagttgctatagtctcctggattgtgactaatctggaggaagcaagtccctgtatccttggcaaagcttgaaaggcaggcaaatgtcttctctgtgttttctgacaggtggttgggtggtgggggttggtctctgtacctcctgttctttaccttgcttaccaagcccttccaccgactcactcctgcctccccagctaaaaattggctgtgttgcttttaccacagttaccaaggtctgagttttataaaatccaggatcacatctgacctcacctggtagatatctaggccaataaagtctaaagggctaaaaagaaggtacctctccatcctgtctcctcgaggccaggcagcacatgtgcagttaagaggcctcctggatccattgtcctcctgttgcttttcgttctaagtgatccaaactctattgctgatagggaataacaagcagggcaggctagtaagtgggcaagtgctttgatggagcgtatctccaagcagggcccaagtttaggaggaggaaagacctgacacaatgaatgaccagtgccgtctcccaaccaaacaagaagtgtaattgtgttccgtctttaaccctgg

SEQ ID NO: 352084 - DNA, 2068 bp, Homo Sapiens
  misc_feature (2052)..(2052): n is a, c, g, or t
tttagaggcatgaatatgacaaattttttatttcaaaaatctcaagttgtaaccagcatagcaccactgacatggatgccttgatagaactccttgatagaactttatgatctgttcaccagaaaagattctacatgatcacgccagactataattaaggctaaccaatcaaaattcaggtacccaaaaccagttataatccaggtagaaactacagatcataggaaccctgggactggttttccagggaaccctggaattattttttaagtgctacagcatgtacaaggacactggcccacaagcttgcttctcacacgtagaaactgacagactaagaggtagatgagagattccaggttccatctagcagtggagaggcagggctccagcatgtatcagagataagccccaaaagcaaagtccacttatgcttcagcagaggtaagcgggcaggctcctggcaccacctcctccaaatggaagggaaggagggctgcaccgctctgcctgtgtcactggctcctctccctgggtccaggcagggcctctcattttctccaggctaacccactgtgtcccaaggttaatctcacaagacactggtccctacatcatgtaaagggtggatggggagcctcctaacaccatgtcaacatgactgctaacaaggagccacacacacaactgaatttcacaggacctcatatcctccaatgggctctttcccacatctactcgaaaggaatcgtgggtttccctttgggcttttcttcctgggaatcagtccatgggagatgccaagcgcccctggaacatgaaattatccacacatgtgtaactgcacactctagattaacaggagagaaaacacgctcatttttgtttccagctacacatacttagctttctaaacacaaaaactgaataatttatctgatttatgaatgatggtttggtatgtctaagaaagctatataaaacataaaatgaactcatgttcatgcatgaattaaactgacttcatgagttctagggagacgcattaacctgtgctgttcccctggacgcacacttggcctcatacaggtgccactaacagccctgatggcagtgtcagaggacagcaaggtgaggctggggaagtgaggctgttagggcccagagaggccctagtgcctccaacagtctcagatgctacttgattacttctatgctatgggctgctaactcttacatagcctagaaaatatttacccatgaacactaccatgtttggatttcaaacaactttaaacatttggtatcagattgggggagcaacaaataataaaatttagggtctgtactgttaaaagtatagtatataacagtaataaaacctgtgtggggcatttttggttaatctgtcgtcgaaaacggtaatctaaacctgggagagttgctatatggggaggggagagtgaagaaatggagaacaggcttgtcctcgggtaggatgtgtcagcctagactggccctcaacatctggacggagcaacaggtaaatgtgccatggaagaccccacaaaacatgactccacatcagcagaacaaagacaaacacaagtcttttctgacttcctaacatggaactgtaacatctgtaatacaagttggttaaaatactgctcaaacagcacatagggaaacaataccttgtcactctctacaagtacacactccatttacaatttggtttttaaaccagaaaaaactgttaaaacatctatccaacagtgatgtattcaaaagtatatacatctaatagtccaagagaatgctcactctggacccagtgtcagcaccaaagtgcagtgtttatgactgcaaatcaggtaaaaataaaaaatacagtactttgaggcctaggactagctcatgatacactttaaagcatttgtggcagacaggtgtgtcctcaaaggccttcctttaagacaggcaccaaatcaccactggttacacataagtgcattttgcatcactatacagggatataatacccatcanaggtataggaaattta

SEQ ID NO: 352085 - DNA, 488 bp, Homo Sapiens
  misc_feature (16)..(16): n is a, c, g, or t
  misc_feature (74)..(74): n is a, c, g, or t
  misc_feature (83)..(83): n is a, c, g, or t
  misc_feature (102)..(102): n is a, c, g, or t
ccccgcctaaccctcngcggaaagcaaaaaaggggaacttgcctttggggggccttaacccccggaaaaaacanggctggaancccctgccctctcccaacngccaagaagggaaccccgggaaacctcctcatcctaccctccttaagtcctgtcagtttccaacgtgtgaagaagcaagcttgtgggcccagtgtccttgtacatgctgtagcacttaaaaaataattcccagggttccccggaaaaccagtccccagggttccctatgatctgtagtttcctacccggattataactggttttgggtacctgaattttgattggttagccttaattatagtctggcgtgatcatgtagaatcttttctggtgaacagatcataaagttctatcaaggagttctatcaaggcatccatgtcagtggtgctatgctggttacaacttgagatttttgaaataaaaaatttgtcatattcatgcctct

SEQ ID NO: 352086 - DNA, 1447 bp, Homo Sapiens
gggtggcgatttcggacgaggcttaacgcacgcaagcggctccagggtacgtccccgccacgcgcgctcgcaggatcggtgcgtggtgacgtttcgccggcgcgggcgccatcccggaagcgcgagcaaggccgccagatgtgcaggcagcggaggaggagaaagagatggacctcccggactcggcctcgagggtcttctgcggccgcatcctgagcatggtgaacacagatgatgtcaacgccatcatcctggcccagaagaacatgctggaccgctttgagaagaccaatgagatgctgctcaacttcaacaacctgtccagtgcccgcctgcagcagatgagcgaacgcttcctgcaccacacgaggaccctagtagagatgaaacgggacctggacagcatcttccgccgtatcaggacgctgaaagggaaactggccaggcagcacccagaggccttcagccatatcccagaggcatccttcctggaggaagaggatgaagaccccatcccacccagcaccacgaccaccattgccacctcagaacagagcacgggctcatgtgacaccagccccgacaccgtctcgccctccctgagccccggcttcgaggacctgtcccatgtccaggctggctccccagccatcaacggccgcagccagacagatgacgaggagatgacgggcgaatagccctgctgcccggtgccttgagggggtctcagggcagcagcatacaaggtggcagcgggtaaccctgccttgttctgtcatccagggctcctttgctgccccgttctgtcacccagggctcctagggggacaaggctctctcccgaggggtgtggaattcctgggggggtctttaattctggctccttccttcctcagaacatctctattctgcaagacccctctgccatgccagggcacgcccattccagctggagtcgtggggctgggcacaggggaatttttccagagctgagcctgacgtctgctctgaagaatgcttagaaggttcccagacaccagagccagatgtcccccaccaccggtcaggacctccttgaggtgcacaagcacggtctcctctgagttcaccccagcccacccccgcacccactaattctgcttttcctgccccttgctccgtaaaagtatcaaatactttctccttggtatctcaaggaggtttctgagataggtagaagtcttgagacggaggctggccatccattcagccctgagcgtgctgagttctgtgtttctctgaatagaggtgtggaacctgaggggccagcaggcctctctgaaggcctccatggagcaaacggagccacctcgggaaagagtttaatggaatatttttgtacccgatgtttacagatgctgttgggaagttatcaataaaaagacaccattactaaaaagggaaaagt

SEQ ID NO: 352087 - DNA, 1720 bp, Homo Sapiens
  misc_feature (36)..(36): n is a, c, g, or t
  misc_feature (150)..(165): n is a, c, g, or t
  misc_feature (423)..(432): n is a, c, g, or t
  misc_feature (492)..(537): n is a, c, g, or t
  misc_feature (1607)..(1636): n is a, c, g, or t
aatgagacctccccgaggcttacgctctgcgcctangccccgccgacgttattgtgatgcgccccccagaatgtgcccttactataccgccggatagctcgcagcgtgtaatgcgccaccaacaccctgatgtggcccccctcttttccnnnnnnnnnnnnnnnnccccaccacgctgaccaagttgtgtaagcacaaaacctccccaaaaaaaataatgtgaggggggccctctagggttcgatgggggcggggagacactttagacccacatacaagagggatgaataacccccgcgagagggcccccacgagaacaataaagagcgcccccaacgaggggcgggacgggggggaccaaaatcatgtagccccccccacaaaaaacccgcggggcccccttttttcatttgggacccacannnnnnnnnnccccatagaggggtccacaagtggtgatgggggaattttatctcataccccagcccaaannnnnnnnnnnnnnnnnnnnnnnnnnnnnnnnnnnnnnnnnnnnnnagcccatggcggaatttgtggctaaccaaggggccctcttacaggaggggaagacctcttttacaagaaaccattcttctcaacccagggggggtgctagccagggaggcgcccccaattggaaaaaaaattaggggttttccattcccttttccgtagggaaaaaaccctccaaaaattagccaaggagggatgactgaaagttcaaagtcacccccacctgcgggtcccagggtgttttcagtgctccccgtcaagcccctcttgaccctcccatttccctcaaaccagacccttcccccaagggcaagccacaaaacctggttttctaggcccctcactcttgcccaccccatccccattcaataagttaatgccatttaaagtgctaaatcaggaaactaaaagtaccaaatacccgtccgggccgccctctcccaaggcagtgtccccgatatccggctgtccgtgcaacccaccctccacagccagcagaccaaagggcctctgccctccactccccactggacggcaaggcccaggaggccagcgcctccccagggatacagactccatggcctcacacccacccagaggcctctcaaactccggcctcgtctccagcctgtccgtctatactccaggcccacttgggtgtgagtgggaggaggcagagcagccacagaggaagtcacagtcttgtcggagcttagacagggagtggggcatctccaaggccagtctccctaagccccgccctctggcttgatgtatgggttggtccgatgtccccgcgttcctccaggaaggtatcgagaaacgggagaggggtctcccactgctccaagtctccgtggttcagagtttgtttggagtattcttgggaagtgaggggaaggcgggaagggggtgcaggagcttcaggatggactgggggaaagagtggtgaaagagaagagggagagacgtgacaggtgcggccagcgagaggccagctgggatcaaggaaggtggtgtgtttggtttttagttttactgtttaaaaaaagataattaaaagttaattgttnnnnnnnnnnnnnnnnnnnnnnnnnnnnnncaccaacagatgatgggtaggggtcgctgaggagggccgcaccctcctcttcagggcacacccctcagggcgtctggagagtag

SEQ ID NO: 352088 - DNA, 1011 bp, Homo Sapiens
  misc_feature (12)..(12): n is a, c, g, or t
  misc_feature (21)..(21): n is a, c, g, or t
  misc_feature (53)..(53): n is a, c, g, or t
  misc_feature (201)..(315): n is a, c, g, or t
tttcctccaaanttgtgaaanaactgagaaacccccacgaatcagcgtgctgncaaaactggtaatccacctattgagggccccagtcctcaagcttcctaggacggggccctgttgcctgtgtccctcatatggtggaagggaatcgaagggcaaaaaggaggtaattggttcccttgagcccctttataaaggcactannnnnnnnnnnnnnnnnnnnnnnnnnnnnnnnnnnnnnnnnnnnnnnnnnnnnnnnnnnnnnnnnnnnnnnnnnnnnnnnnnnnnnnnnnnnnnnnnnnnnnnnnnnnnnnnnnntatgtgatctagtagttctgctcctggatatgtatccctaaaggacctaagaagggacttcaagagagatgtgtacacccatgttcatagcattactcataatacccaagagggggaaacaatcagcagatgagtggataaacccaaatgcggtcctatggatatagtggtgtattatttggccataaaaatttctggtacttgctaccacatggctttttcccagggaaagtattagtttttgtttgacaaaacaccttgaataggtcatggttctgcaaggcagagatgtgaaacaaagaaagctaactaactgttgcaaataataaaaagttggagttcctttgagctaaagctaaagtggcaaaggaggaagaggttcatccctacccttctgcaccccattattttgaagaaaaagagtggcctgaccctccagacctttcttttctggaggacactgggcgaaaagtagttgccccagtgactgttcgagcagttgatggcttgctaagtaagaatgctaaacacaaaaggacaactcttgtttgatcccactcatatgaagggaaattcagaaagaaagtgaaatagtggttaccagggtctggggtgagggtggaatttggagctctttttcagtgggtacagagtttcagtttgtggtgataaaaaatgcatgtaagccgggtgtgg

SEQ ID NO: 352089 - DNA, 480 bp, Homo Sapiens
gcaagcagcgcccatacgtgggggctcgaatccaggtcgaaggatcaccagagcgacagttggagaacgtggaactaagctggaggacacccgagtactcttaaagcagtccccatggtcagtaagaaggggagctcggaggcatcaaggtaacaatgggacaagggtggactctggttcattccaccttggaaccttttcacactgatgatgaggaggaaggggagtataacgaagtaacagaagaggttacagagcaggtttgtttgccagctaaagctaaagcggcaaaggagggagaggttcatccttacccttctgcaccccctccttattttgaagaaaaagagtggcctgaccctccagatctttcatttccagaggacagtgggcgaaaagtagttgctccagtgactgtccgagcagcaccttgagcgacccctctcagttctattcaggtaggaattcagcaagctagat

SEQ ID NO: 352090 - DNA, 467 bp, Homo Sapiens
  misc_feature (379)..(379): n is a, c, g, or t
  misc_feature (439)..(439): n is a, c, g, or t
  misc_feature (451)..(451): n is a, c, g, or t
tgaaaaagagctccaaattccaccctcaccccagaccctggtaaccactatttcactttctttctgaatttcccttcatatgagtgggatcaaacaagagttgtccttttgtgtttagcattcttacttagcaagccatcaactgctcgaacagtcactggggcaactacttttcgcccagtgtcctccagaaaagaaaggtctgggagggtcaggccactctttttcttcaaaataatgggggtgcaggaagggtaggggatggaacctctttcctcctttggccactttaggctttagcttcaaagggaactccaacttttttattaatttggcaacagttaggctttcttttgtttttcacatctctggcctttgnaggaacccatggacctattcaagggtgttttttggtccaaacaaaaacttaatacttttncccggggggggnaaaaggcatttggggt

SEQ ID NO: 352091 - DNA, 470 bp, Homo Sapiens
  misc_feature (27)..(27): n is a, c, g, or t
  misc_feature (34)..(34): n is a, c, g, or t
  misc_feature (44)..(44): n is a, c, g, or t
  misc_feature (89)..(89): n is a, c, g, or t
  misc_feature (99)..(99): n is a, c, g, or t
aatttgggtggggggaacaattcaagncccttanccatatgtgnacccaagtagttccggccccccgggaatatgtaccccctaagggnccctaagaangggaccttacttcaaagaagaagatgtgtacaccccatgttccatagcattactcataataccccaagagggggaaacaatccagcaagatgaagtggataaaccaaatgcggtctatggatatagtggtgtattatttggccataaaaatttctggtacttgctacccacatggctttttcccagggaaagtattagtttttgtttgacaaaacaccttgataggtcatggttctgcaaggcagagatgtgaaacaaagaaagctaactaactgttgcaaataataaaaagttggagttcctttgactaaagctaaagtggcaaaggaggaagaggttcatccctacccttctgcaccccattattttga

SEQ ID NO: 352092 - DNA, 450 bp, Homo Sapiens
taaagcctatgaaacaaggggtgtaacaacatcctcctccttggaaagtccccctcccttagggtccctttaggggaataacataaccccaggagcagaaactacctaagatcaccatatgcctaaggtcctgaatgtcccccccaccaaattcgtatgttgaagcaacccacccaacgtgataggtgaggctttaggaggtgattatgtcatgagagctccatcctcattaatggatttagtgcctttataaaggggctcaagggaaccaattacctcctttttgcccttcgattcccttccaccatatgaggacacagcaacaggccccgtcctagaagctgagactgggccctcaatagatgataccagtctgccagcacgctgatcgtgggcttctcagtcttcacaactatgagaaataaattcgtacttttaaattaaaaaaaa

SEQ ID NO: 352093 - DNA, 995 bp, Homo Sapiens
atggctgtccccggcactgtgatggcaacgtgagctcctgtggggaccatccctccgaaggctgtttctgccctccagataaagtcatgttggaaggcagctgtgtccctgaagaggcctgcactcagtgcattggtgaggatggagtccagcaccagttcctggaagcctgggtcccggaccaccagccctgtcagatctgcacatgcctcagcgggcggaaggtcaactgcacaacgcagccctgccccacggccaaagctcccacgtgtggcctgtgtgaagtagcccgcctccgccagaatgcagaccagtgctgccccgagtatgagtgtgtgtgtgacccagtgagctgtgacctgcccccagtgcctcactgtgaacgtggcctccagcccacactgaccaaccctggcgagtgcagacccaacttcacctgcgcctgcaggaaggaggagtgcaaaagagtgtccccaccctcctgccccccgcaccgtttgcccacccttcggaagacccagtgctgtgatgagtatgagtgtgcctgcaactgtgtcaactccacagtgagctgtccccttgggtacttggcctcaaccgccaccaatgactgtggctgtaccacaaccacctgccttcccgacaaggtgtgtgtccaccgaagcaccatctaccctgtgggccagttctgggaggagggctgcgatgtgtgcacctgcaccgacatggaggatgccgtgatgggcctccgcgtggcccagtgctcccagaagccctgtgaggacagctgtcggtcgggcttcacttacgttctgcatgaaggcgagtgctgtggaaaaggggccctgcccatctgccctgtgaggtgggtgactgggctcacccgcgggggggactccccagttcttccctgggaagagtggtcgggctccccagtgggccctcccccgggaaaaccccctgccctcatcaaatggagtgtggtcccaagttga

SEQ ID NO: 352094 - DNA, 956 bp, Homo Sapiens
  misc_feature (671)..(711): n is a, c, g, or t
gtcttccagtccttgggcaacacgtgtcacacagcaggtctaccaggtggcgttctggccagatggggtgcccactgggcttgcaactgccaggcaatggcccagagttgccagagcctcactgatagagccacgtacaggtgaggcttctgtgcccgcagcaagctccagctagcacgaagaagtcctgcaggtccggggcattgcgcagctcaggcactgcctgcaggggacccaaaaactgctcaaaagccccgcctacggcgggcaatggtctctgcagtaaaattccggcgcagccgcttacgggggaaggagatggcagccattgggccccggaattgccgctgcaggtttcgggtgcagccgctcaaagtccgagtaacggcgagagatctgggctggctggcaatctggcggtcctgggccgatcacggcgagggtgtagagctgaggtttgtcacgtacttggagggcgggtccttgacaacgttagcgctggtcacttcgaagagcagccgctggggtgccaaggtgttccgggacttcttccagaaatcctgcagctgccgcgccaggagctgactgccccactgcccatcaggtggggggctccgttctgcgtcttctcctgacgtcccatccccgaggggcagctggtcagggccagnnnnnnnnnnnnnnnnnnnnnnnnnnnnnnnnnnnnnnnnngcgctggtgaagctgagggtgccgctgagtcgggaggacaggccctcggcgtcgtcgtcctccagctctgagctctccggaaactgctcggcctctggactggccgccgcctccccggggccgtcgccggccaaggcgtgccgcagccggtgcaggagccgggaggccatggcaccctggggggagcgcgcgacgctgtgtaccggatcccggaggaggggtccccatcccgggaattccggacc

SEQ ID NO: 352095 - DNA, 1121 bp, Homo Sapiens
  misc_feature (733)..(773): n is a, c, g, or t
ccccccaaaacactttccggggcctttttcacaagcatgcccggggccctctccagggttttcccagcttcgtgggggcacccgggccagtcccagcccgggtcaggcagggggcggtttgggccagaggggggtccccagctgggcttggcaactcccaggcatggccccagagtgccagagcctcacgatagaaggccagtacaggggaggctctgtgccccccgcagctccggcagcaagaagaagtcctgcaggtccggggcatggcgcagctcaggcactgcctgcaggtgacccaaaaactgctcaaaggcccggctacggcgggcaatggtctctgcagtaaaattccggcgcagccccttccgggggaaggagatggcagccattgggccccggaattgccgctgcaggtttcggtgcagccgctcaaagtccgagtaacggcgagagatctgggctggctggcaatctggcggtcctgggccgatcacggcgagggtgtagagctgaggtttgtcacgtacttggagggcgggtccttgacaacgttagcgctggtcacttcgaagagcagccgctggggtgccaaggtgttccgggacttcttccagaaatcctgcagctgccgcgccaggagctgactgccccactgcccatcaggtggggggctccgttctgcgtcttctcctgacgtcccatccccgaggggcagctggtcagggccagnnnnnnnnnnnnnnnnnnnnnnnnnnnnnnnnnnnnnnnnngcgctggtgaagctgagggtgccgctgagtcgggaggacaggccctcggcgtcgtcgtcctccagctctgagctctccggaaactgctcggcctctggactggccgccgcctccccggggccgtcgccggccaaggcgtgccgcagccggtgcaggagccgggaggccatggcaccctcctgcgtcccacggtgcattcaggggcgcgccgcgccccaggggtccgggtgcagccccccgcagcccatggaggtcaggccggaatctgcagggctccagccgggcatcaggccagctcagagcgccgcatcagggcagcattccatgccagccagccaccagccatcc

SEQ ID NO: 352096 - DNA, 1044 bp, Homo Sapiens
  misc_feature (185)..(224): n is a, c, g, or t
taaggtagcgaggcctgggtggcgaattcggcacgaggctgcggcacgccttggtcggcgacggccccggggaggcggcggccagtccagaggccgagcagtttccggagagctcagagctggaggacgacgacgccgagggcctgtcctcccgactcagcggcaccctcagcttcaccagcgcnnnnnnnnnnnnnnnnnnnnnnnnnnnnnnnnnnnnnnnngctggccctgaccagctgcccctcggggatgggacgtcaggagaagacgcagaacggagccccccacctgatgggcagtggggcagtcagctcctggcgcggcagctgcaggatttctggaagaagtcccggaacaccttggcaccccagcggctgctcttcgaagtgaccagcgctaacgttgtcaaggacccgccctccaactctacaccctcaccgtgatcggcccaggaccgccagattgccagccagcccagatctctcgccgttactcggactttgagcggctgcaccgaaacctgcagcggcaattccggggcccaatggctgccatctccttcccccgtaagcggctgcgtcggaattttactgcagagaccattgcccgccgtagccgggcctttgagcagttttttgggtcacctgcaggcagtgcctgagctgcgccatgccccggacctgcaggacttcttcgtgctgccggaagctggcggcgggcacagagccccacctgtactgggcctctatcgtgaggctctggcactctgggccaatgcctggcagctgccagcccagctgggcacccccctctggcccagaccgccccctgctgacccttggctgggggctggccgtgtggcaccaaggagctggaagaacccttggagaggcccgggcaatgcctggggagaaagccctggcgccttgcctggggggacaagaagctcccacccctttgctggggacccctttcccgggaggggccattggtcccggtttctccccgggggccctgggggccttggaacaaaacggtcaa

SEQ ID NO: 352097 - DNA, 2478 bp, Homo Sapiens
  misc_feature (2365)..(2365): n is a, c, g, or t
  misc_feature (2427)..(2427): n is a, c, g, or t
  misc_feature (2432)..(2432): n is a, c, g, or t
  misc_feature (2437)..(2437): n is a, c, g, or t
  misc_feature (2459)..(2459): n is a, c, g, or t
gctggtaccggtccggattctccggatggaccagctgaggacatgtcttccaaactcaaccaagcccgaagcatgagtgggcatcctgaggcagcccagatggtccgccgagaattccagctggatctagatgagattgagaatgacaatggtacagtccgatgtgaaatgccagaacttgttcagcacaaactggatgacatttttgagccagtccttattcctgaacccaagatccgggctgtttctccacacttcgatgacatgcacagtaatacagcatccacaatcaatttcattatctcccaagtagccagtggtgacatcaacacaagtatccaagctctgacacagatcgatgaggtcctgagacaggaagacaaagctgaagccatgtccggccatattgatcagtttctgatagccacttttatgcagctaagactcatctacaacacacacatggcagatgagaaattggagaaggacgagatcatcaagttgtatagctgtatcattggcaacatgatttcgctgtttcagatagagagccttgcccgggaggcctccactggagtactaaaagacctaatgcatggcctcatcaccttaatgctggattctcggattgaagatcttgaggaaggacaacaggtcatccgctctgtgaacctcttggtggtgaaggttctggagaagtcagaccagaccaacatcctgagtgccctacttgttttgctccaagacagcctgctagcaacagccagttctcccaaattctcagagcttgttatgaagtgtctctggagaatggttcgactgttgcctgataccatcaatagcattaacctagacagaattcttctggatatccacattttcatgaaggtcttccccaaagagaaactgaagcaatgcaaaagtgaatttcccataaggaccctaaagaccctgctacacaccttatgcaaattaaaagggcccaagatcctggaccacctaacgatgatcgacaacaaaaacgagtctgagctggaggcccatctctgccggatgatgaagcacagtatggaccagactgggagcaagtctgataaggaaacagaaaagggagcatctcgaatagatgaaaaatcatcaaaggccaaagtgaatgatttcttagctgagatttttaagaagattggctctaaagaaaacactaaagagggactagcagagttatatgaatataagaagaaatactcagatgctgacattgaaccatttctgaaaaattcctcacagttcttccagagctatgtcgaaagaggccttcgggtgattgagatggagagggagggcaaaggtcgtatttccacttcaacaggcatctcccctcagatggaagtcacatgtgtgcccacgcccacaagcacagtgtcctccataggtaacacaaatggggaagaagtggggccatctgtctacttggaaaggctaaagatcctccgacagcgatgtggtctggacaacacaaagcaagatgaccgacctcctttgacctctttgctctccaaaccagcagttcctactgtcgcctcttccacagacatgctccacagcaaactctctcagctccgggagtcacgggagcagcaccagcattcagacctggattctaaccagactcactcttcaggaactgtgacctcctcctcctccacagctaacatagacgacttgaaaaaaagactggagagaataaagagcagtcgcaaatgaagctgccccactcccccggcaccctgcagctttagtttactaaactagaagtcctcatagtttaaaatggcctcagcaggcctagtgtatacaaactggttgtatgtatcatgccgtggagctagggggaggagtcattgtggcacaagtatttgtacatactctgcttctctctgtcagcgtcctgctgctctagaagactgtccgtggatgagtttagtgtacagacttgtaaacagctgccccctctctgctcagtctagttcccagatccttttctttttaattgctcatttgtaaaattgtcctaatctttcctagctttttaatagttaatattagaaactctttaatagttttcctttcagtttgtgagctcttctctgtcgccctgaagggtcactgtattctgtatgaatgcatggcatgatacaactaatttaagagtcttttataaataaagtttgcattaactatacctgactcccaagatgctccatatcatggagtgttggggcagcaattttttaacttttgggtaccagctggggtattcagccagttaggagaaaggttaattactgcttacagaggcttcccnttttcttgggctcacagactttgggagctgtcttttattccctttgggattgggaggggacncttcntcccnggcttttccacaaacaggttcnagggggggcagggaaaatt

SEQ ID NO: 352098 - DNA, 1636 bp, Homo Sapiens
  misc_feature (742)..(742): n is a, c, g, or t
ggcctgggtggcgaattcggcacgaggcttcgttccacccctacagaccttatcctttgtgttcctcatctctactcctgcctagaagatcgaaatggagatgtgcgaaagaaggcccaagatgccttgccattcttcatgatgcatttaggatatgaaaaaatggccaaggctactgggaaactaaagccaacttctaaagatcaggtattggccatgctagagaaagccaaagttaacatgccagccaagcctgctccacccactaaagcaacttctaaaccaatgggagggtccgctccagccaaattccagcctgcatcagcacctgctgaagattgtatttccagcagtacagaacccaaacctgatccaaaaaaggccaaagctccaggattatcctctaaagcaaagagtgcacaagggaagaagatgccaagcaaaaccagcttaaaggaggatgaagacaaatccgggcctatttttattgttgttccaaatggaaaagagcaaaggatgaaagatgaaaaaggattgaaggtgctaaagtggaattttactaccccacgggatgaatacattgagcaactaaagactcaaatggctagctgtgtggctaaatggttacaagatgagatgtttcactcagactttcagcatcataacaaagcccttgctggtatggttgatcacttggagagtgaaaaagaaggagttattggttgcctggatcttatcttanagtggcttaccctgaggttttttgacaccaatacaagcgtcctgatgaaagcactagaatatttaaattgctcttcaccttgctaagtgaaaaagatatcatcttactgagaatgaagcatcttccctcattcccctatctttgtcgtcaggttgggagacccaaggatgtcattcgtaaagatgttcgtgccatcctgaaccggatgtgccttgtctacccagctagcaagatgtttccctttatcatggaaggaaccaaatccaaaaactctaagcagagagcagagtgcctggaagagctgggatgtctggttgagtcctatggcatgaatgtttgccaaccaaccccagggaaaagccttaaaggaaatagctgttcacataggagaccgtgacaatgctgtacgcaatgctggcactcaacaccaagcaacgatgcacaatgtacatgaggatcaggtgttcaaactgattggaaatctttctgaaaaggatatgagcatgctcgaggagaggattaagcggtcagcaaagagaccctctgctgcaccaataaaacaggtggaagagaaacctcagcgcgcacagaacataagctccaatgccaacatgttacgcaagggaccagctgaggacatgtcttccaaactcaaccaagcccgaagcatgagtgggcatcctgaggcagcccagatggtccgccgagaattccagctggatctagatgagattgagaatgacaatggtacagtccttattcctgaacccaagatccgggctgtttctccacactttgatgacatgcacagtaatacagcatccacaatcaatttcattttctcccaagtagccagtggtgacatcaacacaagtatccaagctctgacacaga

SEQ ID NO: 352099 - DNA, 2600 bp, Homo Sapiens
  misc_feature (257)..(257): n is a, c, g, or t
  misc_feature (287)..(287): n is a, c, g, or t
  misc_feature (2361)..(2361): n is a, c, g, or t
tgagcagctttgctaccacctgtaccgtcagccaatccccgtgaaagacctcctgctggaagacctccaggatggagaagtgagggctgggtggctccctgcgaggggcattcagcaacaatgagagaattaaaaacttcttcagagtcagtttcaaaaatggcccccaaagtcagacccactcgctacaagccaatgacactttcaacaaacagcagtggcttaactgtattcgtcaagccaaagaaacagttttntgtgctgccgggcaagctggggtgcttgantccgagggatcgttcctaaatcccaccaccgggagcagagagctacagggagaaacaaaacttgagcagatggaccaatcggacagtgagtcagactgtagtatggacacgagtgaggtcagcctcgactgtgagcgcatggaacagacagactcttcctgtggaaacagcaggcacggtgaaagtaacgtctgacagaagcatgtgcacttcgggaagcaggcctgcatcttacctgtacagtatttgcattccacagatggaacggtttggagaagcactttttcatacttttgtgaaagtatacatgttggcccagtctctcgtatctgtacctttgtccctagtactgtaactgccaatctgtctgtgtaagctggaatctgtggcaactattaccctgtgttgtatttcccaagtgtctggatggatggagaggtactcaaacaagttactttcagttgtcctgctggattttaaaaaaatagaaaaagaattctcaaaacctactgttttacatagattgtttgaagagtccttcctcttgtgcttctgtaccactttcccagctcttagatgtggtagctaaaggcacggaatttagacggccttgtaaatagggcatgaggaactcatctgtgtattgggatggtattagagagagaatcaggaaagaccaactcatgaagtgaacttggtttgatcttactcaactagaaagcttgaaaacatccctggggattctgaaggcttaattttgcaaaggaggatgcattgtctgaactttgcaacttcatccagtgcaagtttgatgcaagaatgtattaggacataaaatagaggctgaccttaaaagggccaggacagaagcggctgccagctctgaatctttaactgaaatgcacatggcaccaggaggtgtctctcatagttggttgctagcctaaaacatcagaatagaacccaaagggcttaggaaggcctgccaggataacaagaaggccctgtattcattgtgtttcatctgcctaggcctactcattattttagagaatgaatgaagcaacaaggaagagagaccatgactctatccgatgacactgtttatagaaaacacaggagaggaagaatttggaatgaaaagcacttcgtcagaaccttctgtgggagccattgagagaaaagcatggtccagtgccttctgagaaaggccagagctttgggctttccctgctctgcttttgggtcgtcaatttgccatctctggttctgtgctataatcagaattgtaattatgttctccagaggccaatttcattaactctgattaattagaatcagctagccagattagtaacctctttgtccagccttgatttacagtgcagggtaaagtgcagaccttaaaaacagctaagtacctagaagagctccctgcaagtgtaaatattaaggatgacctgtgcaaaattatacccacaccagcactagtggtaattattctaaattattgccaaaaagttttttttaatctgtctctcaagttcacagaaaagaaagcagtaaatgcattgatggcattttattatgtacatatatcatgtgcattcaagctgtgtgacaagatatatcaatataaaaacaaggtatatactttattattttttgaaaacaaggatattgtgatcaattttaccctgtaaaacatatttctgtatttataggtcttaaacatgatgaattttttctattacaagtttatttaaaactgctttctcaagtcgttattgatacagcaagtgaacctgctgcagacagaagcagaggaaagccaagaacagcctttattggtgaagaaaagaatgaatgattctttgtaggcgccatcagccacttttagaagccatcagccagtgtgttgggaaaagaggtttgtcaagtgttggcctatgggaaggtggtcaatgaatgttttgatgaaatgaatgtttttgtataatggccttaaacttttctggaagtatttcaaataaattacattattaagtcccgccgaaacattcagcattgatgnaaaaaagggcgggccgctctagagtatccctccaggggcccaagccttaccgcgtacccagcttttcttgtacaaaagtggccccctataggggagtcggaattaataaacctaggccactgggccgtccctttttaacaacggtcctgggattggggaaaaactgccctaaccttgggggatcttttgtgaaagggaacccttactttctggggggggtggaattaatttgggacaat

SEQ ID NO: 352100 - DNA, 1904 bp, Homo Sapiens
  misc_feature (274)..(274): n is a, c, g, or t
  misc_feature (1190)..(1201): n is a, c, g, or t
cagcctaattctgcccccagcgtcgaatcccaccccgtccttgaaaaactgaaggctgctcacagctacaacccgaaagagtttgagtggaatctgaaaagcgggcgtgtgttcatcatcaagagctactctgaggacgacatccaccgctccattaagtactccatctggtgtagcacagagcacggcaacaagcgcctggacagcgccttccgctgcatgagcacatacggggcccgtctacctgctcttcagcgtcaatgggagtgggcantttttgtggggtggccgagatgaagtcccccgtggactacggcaccagtgccggggtctggtctcaggacaagtggaaggggaagtttgatgtccagtggatttttgttaaggatgtacccaataaccagctccggcacatcaggctggagaataacgacaacaaaccggtcacaaactcccgggacacccaggaggtgcccttagaaaaagccaagcaagtgctgaaaattatcagttcctacaagcacacaacctccatcttcgacgactttgctcactacgagaagcgccaggaggaggaggaggtggtgcgcaaggaacggcagagtcgaaacaaacaatgagggcgaaccagtttcttacatgttctaacgtttgactttgaaaacagtttaaaacacgtgtgcttggtcagctccagtgtgtcgtcccgtgcgggggttgagtgttgcatctttgcctttcttgtcgttgatttttgcccagatggatctgcatttatttgtactttttctatgtattataatcctgtagaagtcactaataaaggagtattttttttgtcagcttatcaatcagactgatctaatgtgaaatgtaagtatccttaaaaacaaagcatctattttggcagaaattgtgttcttaaattcagtcatttgatattctgtgagacttcatatttctcatccctttattgctttttagcaaacataagaaaccatgagtcattttgtcatttagagtattctgataaaatctcttgaaaatactgaaatcaaaaggttaatgattttttgttcattctgatttgtcattttattatctgttatcggtctaaagtgctaatttacccatttgatttttctgctagacagataactcttaatttttcaaatttggcagacactttnnnnnnnnnnnngaaaatctttccttccagatctgttgcccactgaacagccacccgtccctcactgtcctggtgtccgattgggctggatggtgttggggcatgatgtgtggaggaactggaaggtgctttaggtctggttcagggtcgggcattctttgttgtttgcacatctttttaaattttacaccttttcttaagaattctaatgccgtcttaagtttttataccaataatgctgagctttaagtgtaggatctggtagtacagacagtgtgatggatgatgctgctggttgtaaatttcatcgtgtgtgtctaattttttttcctgttgaatgggtaaaaacaaaacaaaactttttttagaagatgaatttgctgtcatgttttgtggaatgagggaccgttgagctcactaccacctggagtttgagttgaagcatgaaaatggtgcccatgcctgacgctccagcgcctggatctgcacgtgcccttgtagaggatccttaccgtcctagagagcagacgctttctgaaaactacttgctccaaaagaccctctgagttaacgtttcagctgtatcattagacttgtatttagagcgtgtcacttcctctgaactgttactgcctgaatggagtcctggacgacattgggtttttcctctaggagaatacaagccttaataaacaatactatttagcaaaaaaaa

SEQ ID NO: 352101 - DNA, 939 bp, Homo Sapiens
tccggaattccccggatgggtcagttaccagtgaccttcaatcaactccatcacttcttaaatcggtatttgttaaaaaaatcagttattttatttattgagtgccgactgtagtaaagccctgaaatagataatctctgttcttctaactgatctaggatggggacgcacccaggtctgctgaactttactgttcctctgggaaaggagcagggacctctggaattcccatctgtttcactgtctccattccataaatctcttcctgtgtgagccaccacacccagcctgggtctctctacttttaacacatctctcatccctttcccaggattccttccaagtcagttacaggtggttttaacagaaagcatcagctctgcttcgtgacagtctctggagaaatcccttaggaagactatgagagtaggccacaaggacatgggcccacacatctgctttggctttgccggcaattcagggcttggggtattccatgtgacttgtataggtatatttgaggacagcatcttgctagagaaaaggtgagggttgtttttctttctctgaaacctacagtaaatgggtatgattgtagcttcctcagaaatcccttggcctccagagattaaacatggtgcaatggcacctctgtccaacctcctttctggtaaattcctttctcctgcttcaaataggccaaaacctcagggcaagggaaacatggggggtaaaagtgatgcccgtttacaaccataccggtctaaccctctttggttgaactccaaatcttcctatccccatattgccaaatcgatttcacagattctccttataacccgtcccccaacctgattaactttctctgcgccctctatatatcgacattggttattcaacctactgcatctactatactctgagatacgtgccacctct

SEQ ID NO: 352102 - DNA, 793 bp, Homo Sapiens
ttttgcagagacaacctcattgtgatgcttttaattacaaaagatgtaaaatgatgcattataaaacttggaagcaactttatacaaattccaatttttaaatatggttgaacagggtgccctgggggttaggacactggcaggaagtctgattagttgctgggatggtcccatccatgaagcactggacacatgctgggaaccatctgtgcataaatcagaagagccaacaagagtgggaacaggaaaggtctgcaaatacgcatatggacttgaagatacaacaccagctcaggtaatatacagcaggcggaggagaaatgaaacaggagaaacaggacaaaggagaattcatgacatgatcaagaaaccccttctcctaaccccctatgtcctaaaacccacaaccatacagaaagaaaaaatggaaatgcagacaggtttttaagttctatgctgtttaaactgctgtaagtgagagtagtacaatggtcgatttcttgtgacaaaactaaataatgaaaaatagtttactctgaagtatgcagctgcttcaaatgctgaggaccacaactggttttgttacaaaggccgcagtgagtgcaggctcacgtgctgtgggccagggcgaccctgcccgtggtgagtcctccacaccttctaggcagactggcttgtacgatgcccaaaacctttcaacaagaaaagatcggactcactcatagactctaaggacaaattgaattcagtgctaaaccatattgcccccagtgtacacccccaataaatcacc

SEQ ID NO: 352103 - DNA, 1029 bp, Homo Sapiens
acggagacagttaggctaggtacgaggctgggttgtgaattcggcacgagggtcggcggcacaaaatggcggcggcggcggcggcggctggtgctgcagggtcggcagctcccgcggcagcggccggcgccccgggatctgggggcgcaccctcagggtcgcagggggtgctgatcggggacaggctgtactccggggtgctcatcaccttggagaactgcctcctgcctgacgacaagctccgtttcacgccgtccatgtcgagcggcctcgacaccgacacagagaccgacctccgcgtggtgggctgcgagctcatccaggcggccggtatcctgctccgcctgccgcaggtggccatggctaccgggcaggtgttgttccagcggttcttttataccaagtccttcgtgaagcactccatggagcatgtgtcaatggcctgtgtccacctggcttccaagatagaagaggccccaagacgcatacgggacgtcatcaatgtgtttcaccgccttcgacagctgagagacaaaaagaagcccgtgcctctactactggatcaagattatgttaatttaaagaaccaaattataaaggcggaaagacgagttctcaaagagttgggtttctgcgtccatgtgaagcatcctcataagataatcgttatgtaccttcaggtgttagagtgtgagcgtaaccaacacctggtccagacctcatgggtagcctctgagggtaagtgactaagacttctcctctgctgtccaagcgctttggtgcagggacagcggcatcttcagccaatccagtgcaggctctccaccgaagcttggctctagactggtggtacgcacatagcatagccatggccgactcctgctgtggttctctgacgattgtgcttcttgttaatcctctgtcgtgctttggtaatcgtattgattagagttggtaactgtcttgacttgaattttgtccctttaaaactgctgtacctgtatgataaagatgcagtacctttctctt

SEQ ID NO: 352104 - DNA, 1351 bp, Homo Sapiens
  misc_feature (911)..(983): n is a, c, g, or t
  misc_feature (1069)..(1127): n is a, c, g, or t
  misc_feature (1224)..(1287): n is a, c, g, or t
gtatgatgcatataagcgttaccaaagtcagcaacaatatgctacacagctgctttgctcaaagcaagagctgtctctgacaaattctctcctgaggctgcatctcggcgggagctgagcacagcagagatgaatgcagtagaggccattcatagagctgtggaattcaatcctcatgtgccaaaatacctactagaaatgaaaagcttaatcctacccccagaacatatcctgaagagaggagacagtgaagcaatagcatatgcattctttcatcttgcacactggaagagagtggaaggggctttgaatcttttgcattgtacgtgggaaggcacttttcggatgatcccttatcccttggaaaaggggcacctattttatccttacccaatctgtacagaaacagcagaccgagagctgcttccatctttccatgaagtctcagtttacccaaagaaggagcttcccttctttattctctttactgctggattatgttccttcacagccatgctggccctcctgacacatcagttcccggaacttatgggggtcttcgcaaaagctttcctcagcactttgtttgcccccttaaactttgtcatggagaaagtggagagcatcctcccatccagtctgtggcaccagctaacacggatctgagagaagccctgtcctccactcacctcacccgccgctgccaccatctcctctgtgccaactccttgtggaccgcaagaaagcatgactttgaaaaagggaagccattccgagattttaaaatgttcatggactattccatattaaaagctgtttttgttgtacaaaattcactgatgttcagttctattttattttgccttcagaaaagaagaaagtcaaaaataaaacttttgtgtattacagcnnnnnnnnnnnnnnnnnnnnnnnnnnnnnnnnnnnnnnnnnnnnnnnnnnnnnnnnnnnnnnnnnnnnnnnnngggggggcgcccccacaaacataaaacccaagagaggagcacaccaaaagaaaagacaacacagtaacaacaacaacagggagcgnnnnnnnnnnnnnnnnnnnnnnnnnnnnnnnnnnnnnnnnnnnnnnnnnnnnnnnnnnngaggaggaggaaaacaagcacgcacgaacgacacaaaaaggagagaagaacaagcacaaagacaagggaagacgcaacaaacaacgagaggacacannnnnnnnnnnnnnnnnnnnnnnnnnnnnnnnnnnnnnnnnnnnnnnnnnnnnnnnnnnnnnnngaagcatacaaaaggccgcacacacacgacgaagaaacgacaaagaagcgaacaaaagacagaa

SEQ ID NO: 352105 - DNA, 747 bp, Homo Sapiens
ggcttgcatcttgggctggactcctacaacagccacaacttccctgctggtctcccagcttctagccttcccccatctcctgtcgttttcgacacagcagccagaaggatcctttaaaaacagaggttgatcctgtcgttcctcaaaatcctccaatgcttttcctactgcactcagagtaaaagccagtctctgccttagatgctctgggatcctgtaccctctttggtctcatgtcctacaatctgcattctggccataatggtcttctctgctgttccttgaacattccaggaacattccccccatcccctcgtggcctcaggactggctgcttcctttggtatgctattctgatacacactaagcaccctccctcacctgttataaaaaattcgctgggaggccaataggctgaaatggctcctgcactttgggttcctaagtcagcaaactgaaactcaactcagagtgaaagtgttgtgtgtaacctaggagcaggaaacttcagcttaaccagtcagaaactaccgactaacctctaacaagagatttatggtcagttaacctctaaatatgaactttccactctaaccaatcaaatagtttctttgtcttgctcccagagacaccttgtaagtgtcccctctggtttcctcggtggtggcgccctgaactgctggcggtctgccactgcctgattgataaaattgctgaatgctcaaataaacctgttaaaaggaatta

SEQ ID NO: 352106 - DNA, 1740 bp, Homo Sapiens
tgtccggaagacatggattgtctggaagatgtggattttctggaagctcaggattatctggaagaccttgagattattggaagacttgaagtcgctggaagacccggagttgttggaagaccttgacacaggtgccatcggaaaccctggatattgcagacactggaagacctgaatgtcagaagatcagcacactggagacgttggaagacatggatattgagccagttgatggaagactgggtagttgttggaagacatgaagatgctggaagacacagagatgctggaagacgtggagatgttggaagacgagcagatgctggaagccctggagatgctggaagacctggagatataggaagacatggatttgttggaagacgtagcttagttggaagacatatattttctggaagacgtggattttctggaagacatggcttggttggaagacgtggattttctggaagacgtacctttgttggaagacatacctttgttggaagacgtacctttgttggaagacgtacctttgttggaagacacaagtaggctggaagacattaatttgatggaagacatggctttgttggaagacgtggatttgctggaagacacggatttcctggaagacctggatttttcggaagctatggatttgagggaagacaaggattttctggaagacatggatagtctggaagacatggctttgttggaagacgtggacttgctggaagacacggatttcctggaagacccggattttttggaagctatagatttaagggaagacaaggattttctggaagacatggatagtctggaagacctggaggccattggaagatgtggattttctggaagacatggcttttttggaagacgtagattttcaggaagacccaaattatccggaagacttggattgttgggaagacgtggattttctggaagactgggaggttactggaagacatggattttctggaagacatggattttctggaagacgtggatcttcaggaagacatatattggctggaagacctggattttttccggaagatgtggattgactggaagacctggatttggtggaagacgtagatttttctggaagacactgactgactggaagacctggatttctttctggaagacactgattgactggaagacctggatttctttctggaagacactgattgactggaagatctagatttttctggaagaactagatttactggaagacttggatttggtggaagacacagatttttctggaagacatggattagctggaagatctgtatttgatggaagaccttgaaattattggaagacatggatttcctggaagacgtggattttcctggaagatctggatttggtggaagaccagtaattgctggaagactggatttgctggaagacttgatttactggaagacttggagcttcttggaagacatggattgtccggaagacatggattgtctggaagatgtggattttctggaagctcaggattatctggaagaccttgagattattggaagacttgaagtcgctggaagacccggagttgttggaagaccttgacacaggtgccatcggaaaccctggatattgcagacactggaagacctgaatgtcagaagatcagcacactggagacgttggaagacatggattatgagccaggtgatggaagagaagttcctagaagcc

SEQ ID NO: 352107 - DNA, 536 bp, Homo Sapiens
accctactttgccacagggtcaaggtcttccaacaactccgggtcttccagcgacttcaagtcttccagcaagtccacgtcttccaacaaagccatgtcttccagactatccatgtcttccagaaaatccttgtcttccctcaaatccatagcttccgaaaaatccaggtcttccaggaaatccgtgtcttccagcaaatccacgtcttccaacaaagccatgtcttccatcaaattaatgtcttccagcctacttgtgtcttccaacaaaggtacgtcttccaacaaaggtacgtcttccaacaaaggtatgtcttccaacaaaggtacgtcttccagaaaatccacgtcttccaaccaagccatgtcttccagaaaatccacgtcttccagaaaatatatgtcttccaactaagctacgtcttccaacaaatccatgtcttcctatatctccaggtcttccagcatctccagggcttccagcatctgctcgtcttccaacatctccacgtcttccagcatcctgtggaaaagta

SEQ ID NO: 352108 - DNA, 486 bp, Homo Sapiens
tgggttggacgacatggatattgagccagtgtgatggaagactgggtagttgttggaagacatgaagatgctggaagacacagagatgctggaagacctggatttctctgctggaagacactgattgactggaacatctagatttttctggaagaactagactttagctggaacgacttggatttggtggaacacacagactgttctggaagacatggattagctggaagatctgtatttgatggaagacctcgaaattattggaagacagtggatttccgtggaagacgtgagatttgtcctcggaagatcgggatattggtggaagaccagtaatagatggaagactggatatactggaagacgtgatttactggagagacttggagcttcttggaagacatggattgtccggaagacatggattgtctggaagatgtggatttgctggaagccctggagatgctggaagacctggagatatag

SEQ ID NO: 352109 - DNA, 265 bp, Homo Sapiens
  misc_feature (249)..(249): n is a, c, g, or t
ccattcttctttctttctttttatgttgtttgctgtaaatgctgcacatccagattgcatatcaggacattggttattttatgctttcttggatataaccatgatcagagtgccatggccactaccccactgtttgctctcctgcaaatcaactgcttttaatttacacttaaacaaattgttttgagtgttagctactgcctttctagatattagtcatttgggaaaaaaagttcatttgcacttagngttttttaatattttt

SEQ ID NO: 352110 - DNA, 810 bp, Homo Sapiens
  misc_feature (595)..(595): n is a, c, g, or t
  misc_feature (615)..(655): n is a, c, g, or t
ggtacctgtaactattatggatgtgtttgatcagagtgcgctttcaactgaagctaaagaagaaatgtacaagctgtatcctaatgcccgaagagctcatctgaaaacaggaggcaatttcccatacctgtgcagaagtgcagaggtcaatctttatgtacagatacatttgctgcaattccatggaaccaaatacgcggccattgacccatcaatggtcagtgccgaggagcttgaggtgcagaaaggcagccttggcatcagccaggaggagcagtagtgtgtctctcgctgtcaatgatgagttgacccggtgtgttcttgtatagtcagtggcatcagcacccgttcagccggcctttttccttcaggttcgtcaggctcaccggttctcactgtgtctgggaagtaggactgatggtcatcttcatgacaggcggcatctccactaagcctgtgtaactgttccctctttggttttcttagcttttgaatttggagaagtacttttgaagactcccattttaagaaccgtgcagattttgctaccaaaagtcttcaccactgtgttcttaagtgaatgttaatttctgangtttgggactttgtggtggnnnnnnnnnnnnnnnnnnnnnnnnnnnnnnnnnnnnnnnnnatggtgtttgctgtaaatgctgcacatccagattgcatatcaggacattggttattttatgctttcttggatataaccatgatcagagtgccatggccactaccccactgttttgctctcctgccaaatcaactggcttttaatttacccttaaa

SEQ ID NO: 352111 - DNA, 759 bp, Homo Sapiens
  misc_feature (458)..(500): n is a, c, g, or t
  misc_feature (736)..(736): n is a, c, g, or t
ggacagatacatttgctgcaattccatggaaccaaatacgcggccattgacccatcaatggtcagtgccgaggagcttgaggtgcagaaaggcagccttggcatcagccaggaggagcagtagtgtgtctctcgctgtcaatgatgagttgacccggtgtgttcttgtatagtcagtggcatcagcacccgtctagccggccttttccttcaggttcgtcaggctcactcgggtctcactgtgtctgggaagtaggactgatggtcatcttcatgacaggcggcatcctccactaagcctgtgtaactgttccctctttggtttgcttagcttttgaattacaacaagtactgttgaagactcccattttaagaaccgggcagattttgctaccaaaagtcttcaccactgtgttcttaagtgaatgttaatttctgaggtttgggactttgtggtgnnnnnnnnnnnnnnnnnnnnnnnnnnnnnnnnnnnnnnnnnnnatgttgtttgcgctgtaaatgccgcaccttccgagattgcatatcaagacattggttattttatgctttcttggatataaccatgatcagagtgccatggccactaccccactgtttcgtctcctgcaaatcaactgcttttaatttacacttaaacaaaattgttttgagtgttagctactgccctttctagatattagtcatttgggaataaaaattccttttcaccccgggtnagacgtactgctttaaagttatc

SEQ ID NO: 352112 - DNA, 2029 bp, Homo Sapiens
  misc_feature (93)..(129): n is a, c, g, or t
acccgacgaggcagggaggcaaggaaccggaaggggggaagagtaatacgaaccactaagggcgaactggagcgtaaccgcggtggcggccgnnnnnnnnnnnnnnnnnnnnnnnnnnnnnnnnnnnnnatcaggccaaatcggccgagctcgaattcgtcgagagcggagtcgttgcggggggcggggtcgcgtctgccgcagcaacggggtgcggcagggtggggaacgcgggagcggggccagctcccaggaaagctggtctgcgagcggcccctgcccggctcccaggtccctgcgcgaccccgcccttcccgagaccccagccgggctgccgcccgcgtcccggaagctccagcctgaaccatgtttttcacttgtggcccaaatgaggccatggtggtctccgggttctgccgaagccccccagtcatggtggctggagggcgtgtctttgtcctgccctgcatccaacagatccagaggatctctctcaacacactgaccctcaatgtcaagagtgaaaaggtttacactcgccatggggtccccatctcagtcactggcattgcccaggtaaaaatccaggggcagaacaaggagatgttggcggccgcctgtcagatgttcctggggaagacggaggctgagattgcccacattgccctggagacgttagagggccaccagagggccatcatggcccacatgactgtggaggagatctataaggacaggcagaaattctcagaacaggttttcaaagtggcctcctcagacctggtcaacatgggcatcagtgtggttagctacactctgaaggacattcacgatgaccaggactatttgcactctttggggaaggctcgaacagctcaagtccaaaaagatgcacggattggagaagcagaggccaagagagatgctgggatccgggaagctaaagccaagcaggaaaaggtgtctgctcagtacctgagtgagatcgagatggccaaggcacagagagattacgaactgaagaaggccgcctatgacatcgaggtcaacacccgccgagcacaggctgacctggcctatcagcttcaggtggccaagactaagcagcagattgaggagcagcgggtgcaggtgcaggtggtggagcgggcccagcaggtggcagtgcaggagcaggagatcgcccggcgggagaaggagctggaggcccgggtgcggaagccagcggaagcggagcgctacaagctggagcgcctagccgaggcagagaagtcccaactaattatgcaggcggaggcagaagccgcgtctgtgcggatgcgtggggaagctgaggcctttgccataggggcccgagcccgagccgaggctgagcagatggccaagaaggcagaagccttccagctgtaccaagaggctgctcagctggacatgctgctagagaagctgccccaggtggcagaggagatcagtggtcccttgacttcagccaataagatcacactggtgtccagcggcagtgggaccatgggggcagccaaagtgactggggaagtactggacattctaactcgcctgccagagagtgtggaaagactcacaggcgtgagcatctcccaggtgaatcacaagcctttgagaacagcctgagccttcagccctcacagatgcccagcctcatagctgaagttgcctgaatgatcctcctgttgcatgtaacccactggcctccctgagcatgtccattgacagtgaggtcccacccctcatctctccttgccaaatagtttgtgccttgtcttgaagggggttgctccccttgccaacctcacactgctatgattgccaactccagcggtcccatgtcagccttctgatgatcccactccaccccacctcaacttatttaacttcctaattaaatcagactgtttgagcctgttgtctagaatattttcctgaccaagactgagggatgggctggaggttttcaactttgctacccaaataaattgctgtaagtaagtac

SEQ ID NO: 352113 - DNA, 1249 bp, Homo Sapiens
  misc_feature (992)..(992): n is a, c, g, or t
ggaccggtccggaattcccgggatcaacggggtgcggcagggtggggaacgcgggagcggggccagctcccaggaaagctggtctgcgagcggcccctgcccggctcccaggtccctgcgcgaccccgcccttcccgagaccccagccgggctgccgcccgcgtcccggaagctccagcctgaaccatgtttttcacttgtggcccaaatgaggccatggtggtctccgggttctgccgaagccccccagtcatggtggctggagggcgtgtctttgtcctgccctgcatccaacagatccagaggatctctctcaacacactgaccctcaatgtcaagagtgaaaaggtttacactcgccatggggtccccatctcagtcactggcattgcccaggagatctataaggacaggcagaaattctcagaacaggttttcaaagtggcctcctcagacctggtcaacatgggcatcagtgtggttagctacactctgaaggacattcacgatgaccaggactatttgcactctttggggaaggctcgaacagctcaagtccaaaaagatgcacggattggagaagcagaggccaagagagatgctgggatccgggaagctaaagccaagcaggaaaaggtgtctgctcagtacctgagtgagatcgagatggccaaggcacagagagattacaaactgaagaagggcgcctatgacatccaggtcaacaccccgccgagcacagggttgaccttggcctattcactttcaggtgggcaaagactaagcagcagaattgagggacaacggggggcaggtgccaggtggggggaaccgggcccccaccaggggggcattgccaggtaaccgggaaaatccccccgcgcggataaaaagggcctgggaaggccccggggggccgggaatgcctatcggaaaggcgagagcgcttacacaaattggagccgcccttcaccctaagccaggcacaattncccacactattttattcgcacagccgctaggccataaaacccgctgcacttagttgacaatactcccgggggaaaccttaagaggtctctttttcccttaggacgactctgggactccaaaataccaaagcggctggcctaaaagcggcctccacaaacggcagaaagactcctctcacctgcgtcgtgccacaagatgagagcgactcccctgcagtgacaacacattttccatactctgatacgacatcgcccag

SEQ ID NO: 352114 - DNA, 867 bp, Homo Sapiens
  misc_feature (413)..(413): n is a, c, g, or t
cgatggttccctgcccctaggccaaccttccacagtcatgtgggcccatgaagcccctcttggtggccctctaacgtctccagggcaatgtgggcaatctcaggcttccgtctttccccaggaacatctgacaaggcggccgccaacatctcccttggtctgcccctggattcgtacctgtagccagagtaggggtaggaaaggtgtggtgggggtctcatgaagtcagagaaaaagcagagagagaagggagagccctctaagaaatgcttcttccatttcagggaaagaaaggaggaggaggcaagtgccttggggtgcctggaaaagatgagactagcagaggaacttctctgcaggcaagggttgagaagactgtggccagaagatgtcttaatgtctgggagagaggngtgatggggaagtggactgtggggaaaaggctctgaaagcttcacctgggcaatgccagtgactgagatggggaccccatggcgagtgtaaaccttttcactcttgacattgagggtcagtgtgttgagagagatcctctggatctgttggatgcagggcaggacaaagacacgccctccagccaccatgactggggggcttcggcagaacccggagaccaccatggcctcatttgggccacaagtgaaaaacatggttcaggctggagcttccgggacgcgggcggcagcccggctggggtctcgggaagggcgtggtcgcgcatggacctgggagccgggcaggggccgctcgcagaccagctttcctgggagctggccccgctcccgcgttccccaccctgccgcaccccgttgctgcggcagacgcgaccccgccccccgcaacgccgct

SEQ ID NO: 352115 - DNA, 281 bp, Homo Sapiens
tgaagtcaagggaccactgatctcctctgccacctggggcagcttctctagcagcatgtccagctgagcagcctcttggtacagctggaaggcttctgccttcttggccatctgctcagcctcggctcgggctcgggcccctatggcaaaggcctcagcttccccacgcatccgcacagacgcggcttctgcctccgcctgcacaattagttgggacctgtggacagaagggaagtggagggtggagcccagcagcccttactcccaggagaaaggcccag

SEQ ID NO: 352116 - DNA, 1518 bp, Homo Sapiens
  misc_feature (174)..(220): n is a, c, g, or t
  misc_feature (877)..(948): n is a, c, g, or t
cctggttaccgggtccccggaacgttttctggggcactactcggttcagaaccctcaacggcgtcgtaatggtgtgtgctgtagtctcagctattcaggagactgaagcaggaggatcacttgagcccaggaatttgaggctatagtgtgctatgattgtgccagtgaataggnnnnnnnnnnnnnnnnnnnnnnnnnnnnnnnnnnnnnnnnnnnnnnngcgtatctgctgctctgaatttggtattttaacaccacttactgatacctttcctgtaaacctgtagatggtttaattcttagtcaagagaccagtctcatctaaaactatcctgttgtggtctgacggcaagtaactcatcttgagtaatttttgtttctccttaagtggcattttgactgtccattgcagcattctgatcttaaaagacatccactttgctaatgcacacgagattctcttagttgaagtaggagaatcaaatggagcagttgtcctccccccaccccatgttcttagaagcacctctgatggagttattctgaccttgagtcactgcctcccatcatttcccagatgtttggtccttgctctccctttgagaatcatctcccattttctttcctctcccacctctatttgaggtaatggcatctgtgccattgggtggtttcactgctccttgacttcatttgcagtttctttcccatgatagttttatagttgggcagtcttaaaactcatctgataggaaggaaattagatgtaattgtgagagagaccacagtaaaatgtgggtaatatagggagaggggtggggtatacaaatcttctctttcctccccatccccccatggggtgtattggagatcaacnnnnnnnnnnnnnnnnnnnnnnnnnnnnnnnnnnnnnnnnnnnnnnnnnnnnnnnnnnnnnnnnnnnnnnnntccattgtatatcttctcgcatgatcacaccaacctgaccctccctgggtcgcctcgctcactacgttaaacttaccgacaacccacaaaaaccgaagacctctctgacgtctccggacgtcccctgcgctccacccacctgggcgatcctttgtgaaccctcctgttgccaccctgcccctttgccctcggggcccaaactaccaagcggagagccccaccctctccacgttcatttcgccatacgaccgacggggatgccccccatggaggtacaccagcctaccaaaaatctgcaccccgaaaacaacgcccctcacggtataccaaaacctactcctcctccctaggcccccgcaaccctctcacgtcgcgccttcacacaattgcactcctaaaagtattagacaacacaaccgaagcgatctctgacacatccgaccctaccatgccggcggcacaaaacaaatatcaaccgggccacggcgcacacagcgagaactatggtcaacagaacattctagtgcggtccgagactacctgccggcacgtgaacatcaaccagccaca

SEQ ID NO: 352117 - DNA, 982 bp, Homo Sapiens
cggtccaaggaagcgaggcctgggtggcgaattcggcacgaggcacctaatggatcttacgaagcgtgttgtccaagtatagagatgattccaaagtggttggactgtgtttctttctcccagctgggtggaaggagaacactagtggattgctgagacttggtgctcggtatttttaattatggacagcctggctggcgttttgtggtgtctaattgcggagtagcgtgtcttactgtataatggcctcttttgtatgtgggagaccatggtgttgaggggaggcagttacacaaaaagcccagataccgagtgttagttccatgggtgtggctggtcatggtgcgcactcacgaaggatgtaggtgatgccctccactccgcagagccagtcccacaggggtacccattctgactcctaccaccgcagctccctacctcccgcctgccatgggttccacgtgcatggctctgggcagtctgtgtctttgcgtgcgtctgtgtatgtctgcgtgtatctgcttacattcgctcagcatctgagattcacccaggcttttgcgtggatcagcggcagactcctgattgccgcgtggcggcctgttgtgtgggtgtgtgccgcgtgtgtatccagtccctactcaggagtgtacgtttccagtgtgggttgcagtcaggatccatttctcccttaactttcagattatttgctgcataggcttttttctcctaatttggcgcctttgtcagaaatcaactgacctacctggtgtgggtctgtttctgtttgtccttacgctcttgccattgccacactttagacaaggtcttgctctgtcccctcagggctggaatgcaattaccgtgatctcagctcactgcaccccttgacctcccatactccagcaatccccctcgcctcagttcttcttggagtaatagctgcgaaccacagggcgtgtgtccccaccaccggggttga

SEQ ID NO: 352118 - DNA, 851 bp, Homo Sapiens
  misc_feature (78)..(78): n is a, c, g, or t
  misc_feature (218)..(218): n is a, c, g, or t
  misc_feature (555)..(555): n is a, c, g, or t
  misc_feature (653)..(653): n is a, c, g, or t
  misc_feature (671)..(671): n is a, c, g, or t
  misc_feature (707)..(707): n is a, c, g, or t
  misc_feature (712)..(712): n is a, c, g, or t
  misc_feature (736)..(736): n is a, c, g, or t
  misc_feature (752)..(752): n is a, c, g, or t
  misc_feature (762)..(762): n is a, c, g, or t
  misc_feature (776)..(776): n is a, c, g, or t
  misc_feature (782)..(782): n is a, c, g, or t
  misc_feature (791)..(791): n is a, c, g, or t
  misc_feature (831)..(831): n is a, c, g, or t
  misc_feature (836)..(836): n is a, c, g, or t
atcctaatttctaaagcaatcaggagagaaagcttttagaatggcacatcatatctcattgatgccaacatggttttntccatggttctgactttctgtgaaggcaccagcttgcaatatgccatcccatttcaccttgcatgtgagacagcaaacaaaatccacaaatggtgtgaactaatatgctggctgctaccttgcataaattaatgatttgntcacacgggttcttcgtggggttacatctgtggaatagcctgttttccacatgtaaatttgtgccttacaccttgagttgtgtacacttgtaaactctttatgatcaactgttcccccttttgaaataagtgcagatatttatttaaccctcccttccccaccctctgccccacttccagccctctgaaagattggagtcaagcagatggaagaatgcagtggtgatagttgtcatgcgacagctgagaacgctgggcagcaccacaccctccaattcacactgccttctagttgtgccaactggaaccaccctttggctgtgctgcgaagatgggnaccccagtgttgttgtgggtgtgtcaaatcccctttcatcctcaagagctccctgcttcccttaggattattttcaatacggtgatatccttatttgntaggcaggaaaaggggantaacgtcccatttcctctttttctgctggcgtccantgggntaggaggaggcagggcggtgcgcngttgggggcagacacnggggggaggnatttttccaagccntgttgncaacagcanacacgttgcagttgcaaaacaaaagaattgacatggggantaggntgcagggaggttggg

SEQ ID NO: 352119 - DNA, 984 bp, Homo Sapiens
ccgccaaccttagatggcaccggtcctgaatttccaggatcccgcgccccgccgccgctgctgcccccagccccggtcccaggcgtcccagccatggtccgcccaatgctcttgctcagcctcggcctcctggctggtctgctgccggcgctggccgcctgcccccagaactgccactgccacagcgacctgcagcacgtcatctgcgacaaggtggggctgcagaagatccccaaggtgtcagagaagaccaagctgctcaacctacagcgcaacaacttcccggtgctggctgccaattcgttccgggccatgccgaacctcgtgtcattgcacctgcagcactgccagatccgcgaggtggccgccggtgccttccgcggcctcaagcaacttatctacttgtacctgtcccataacgacatccgcgtgctgcgcgcaggtgccttcgacgacctgaccgagctgacctacctctacctggaccacaacaaggtcactgagctgccccgggggttgctctccccgctggtcaacctcttcatcttgcagctcaacaacaagcaagatccgtgagctgcgcgcaggcgccttccaggtagccaaggacctgcgctggctctacctgtcggaaaacgcgttgagctccctgcagcccgtggccctggacgacgtggagaacctcgcccaaattccacgtggacaggaccagctgtccagctaccctcagctgccctgagcaagctacgggtggtggaggagctgaagctgtccacaaccccctgaaaagcatccgggacaatgccttcagtcctttggcagaatacctggagaacctctggctggaacaacagcaaccctggagaagttctccaatggtgccttcctaggttggaaccaagctgaacaggtccattggagaaaaaccggttgaccagtacctccaattccctttaagcctggagacctgcctacaataacctg

SEQ ID NO: 352120 - DNA, 779 bp, Homo Sapiens
ggggcttcatcggcgctttgccacttgtacccgagtttttgattctcaacatgtccgagactgctcctgccgctcccgctgccgcgcctcctgcggagaaggcccctgtaaagaagaaggcggccaaaaaggctgggggtacgcctcgtaaggcgtccggtcccccggtgtcagagctcatcaccaaggctgtggccgcctctaaagagcgtagcggagtttctctggctgctctgaaaaaagcgttggctgccgccggctatgatgtggagaaaaacaacagccgtatcaaacttggtctcaagagcctggtgagcaagggcactctggtgcaaacgaaaggcaccggtgcttctggctcctttaaactcaacaagaaggcagcctccggggaagccaagcccaaggttaaaaaggcgggcggaaccaaacctaagaagccagttggggcagccaagaagcccaagaaggcggctggcggcgcaactccgaagaagagcgctaagaaaacaccgaagaaagcgaagaagccggccgcggccactgtaaccaagaaagtggctaagagcccaaagaaggccaaggttgcgaagcccaagaaagctgccaaaagtgctgctaaggctgtgaagcccaaggccgctaagcccaaggttgtcaagcctaagaaggcggcgcccaagaagaaataggcgaacgcctacttctaaaacccaaaaggctcttttcagagccaccactgatctcaataaaagagctggataatttctttacaaaaa

SEQ ID NO: 352121 - DNA, 535 bp, Homo Sapiens
  misc_feature (394)..(489): n is a, c, g, or t
ggcacgaggaaactagacaaatgacagtatccagttcccctcacccagacgcagccattgctgacagctgtcagtgttgaagatggccagcatctcatgcccttggtttcactcgttccctgggtggccctcgtccccctccccacgtcccgcgccccgcataccctgagcagtcatggccaggaacttggcacgtgggtttgttttttctgaatctgcatgtgcgcagccatgagcatgaggtcactttttgaatgtgaccgaagctgcatcctgctgcgtgtattgctgtgtggctggctttcctccctgtcttctgttcaggaatactgttcaggctgaataccgtcctgtgacatgggtttaaaaacacaggccaggcatggtgtctcannnnnnnnnnnnnnnnnnnnnnnnnnnnnnnnnnnnnnnnnnnnnnnnnnnnnnnnnnnnnnnnnnnnnnnnnnnnnnnnnnnnnnnnnnnnnnnnaaaaaattaaaaaatgagccgggcgtggtggtggcacgtgtcattg

SEQ ID NO: 352122 - DNA, 477 bp, Homo Sapiens
  misc_feature (27)..(27): n is a, c, g, or t
  misc_feature (34)..(34): n is a, c, g, or t
  misc_feature (55)..(55): n is a, c, g, or t
  misc_feature (267)..(267): n is a, c, g, or t
ttttttaactgggttttacaacttacntgctgcntggccttaccaaagtactggntatattgagtctcttgacccataaaacaggggtaacaactaacaagcgattattaaagagttggcgctagtaaagtaccgcaataaaaaccagcggctgcaagctgctaaaattcctcctttaggtctttttcccatacttgcgaaaatgacagggcaacaaaatttccttccaaccaccactgagaaagtataccacgtttgcccaagganaaaaaggccccgcccggcccgcgccacacaggtcacctacgcagaatgcagtcctggggggttccacttgtgtcgctcagcgatggagggcgcgatcgatgacaggccactccagagacggacctagataggttcgcatgaggccgagccgaatttcaccaaaaaccagtttacaccacctcccgatttgtccacacgaaaagccatgga

SEQ ID NO: 352123 - DNA, 766 bp, Homo Sapiens
  misc_feature (119)..(119): n is a, c, g, or t
agatggccaaggcgctggaggcggactcaacgacctcatgtgagcgcgggcagcgggcagggactgaagcctgaccgacctccagcagcactcagacgtccccggaccagccctcagtntcggtccacgctgctttcttcccaaaggacatgtatatttgcagagctccacatacagaaacacattattttgcagaaataggtgtttttaagaagttttactacaggaatgtctacttttgtaagtgacaggtgttaaaggcccaggtgtgctgtgccaaagagctcagcagaggctcacgtggcccaggctggtgcgcccgctgtctcggtaaggggcgggttggtgtgttttccccttgtgtaccagagcacattccttaggggacggctttgggggtcccacgagacatggactaggagtttaagcaggacagtgtgcgtgcacgagctccgagcccagcacagacatgccctggaacccccgccgcctgctgctccctcctagggaacccatttccggggaacgccgtgactgtcgggcagcctggagcttcctgcagcctcctacgcagggtccacgccacgtggcctgggctgccatcctgccgtcctcccactggcatcctggcaagggggcgttgcttttcctgggcggccttttatgtcttggagacacctgatgtaaagtttctgtaaatctatttcatatctgacccaccaaacagatttctctttaataaaaatcctttttgtaagttctaaag

SEQ ID NO: 352124 - DNA, 2419 bp, Homo Sapiens
tcttcttcgtcagcctcccttccaccgccatattgggccactaaaaaaagggggctcgtcttttcggggtgtttttctccccctcccctgtccccgcttgctcacggctctgcgactccgacgccggcaaggtttggagagcggctgggttcgcgggacccgcgggcttgcacccgcccagactcggacgggctttgccaccctctccgcttgcctggtcccctctcctctccgccctcccgctcgccagtccatttgatcagcggagactcggcggccgggccggggcttccccgcagcccctgcgcgctcctagagctcgggccgtggctcgtcggggtctgtgtcttttggctccgagggcagtcgctgggcttccgagaggggttcgggccgcgtaggggcgctttgtttggttcggttttatttttttgagagtgcgagagaggcggtcgtgcagacccgggagaaagatgtcaaacgtgcgagtgtctaacgggagccctagcctggagcggatggacgccaggcaggcggagcaccccaagccctcggcctgcaggaacctcttcggcccggtggaccacgaagagttaacccgggacttggagaagcactgcagagacatggaagaggcgagccagcgcaagtggaatttcgattttcagaatcacaaacccctagagggcaagtacgagtggcaagaggtggagaagggcagcttgcccgagttctactacagacccccgcgtccccccaaaggtgcctgcaaggtgccggcgcaggagagccaggatgtcagcgggagccgcccggcggcgcctttaattggggctccggataactctgaggacacgcatttggtggacccaaagactgatccgtcggacagccagacggggttagcggagcaatgcgcaggaataaggaagcgacctgcaaccgacgattcttctactcaaaacaaaagagccaacagaacagaagaaaatgtttcagacggttccccaaatgccggttctgtggagcagacgcccaagaagcctggcctcagaagacgtcaaacgtaaacagctcgaattaagaatatgttttccttgtttatcagatacatcacttgcttgatgaagcaaggaagatatacatgaaaattttaaaaatacatatcggttgacttcatggaatggacatcctgtataagcactgaaaaacaacaacacaataacactaaaattttaggcactcttaaatgatctgcctctaaaagcgttggatgtagcattatgcaattaggtttttccttatttgcttcattgtactacctgtgtatatagtttttaccttttatgtagcacataaactttggcgaagggagggcagggtggggctgaggaactgacgtggagcggggtatgaagagcttgctttgatttacagcaagtagataaatatttgacttgcatgaagagaagcaattttggggaagggtttgaattgttttctttaaagatgtaatgtccctttcagagacagctgatacttcatttaaaaaaatcacaaaaatttgaacactggctaaagataattgctatttatttttacaagaagtttattctcatttgggagatctggtgatctcccaagctatctaaagtttgttagatagctgcatgtggcttttttaaaaaagcaacagaaacctatcctcactgccctccccagtctctcttaaagttggaatttaccagttaattactcagcagaatggtgatcactccaggtagtttggggcaaaaatccgaggtgcttgggagttttgaatgttaagaattgaccatctgcttttattaaatttgttgacaaaattttctcattttcttttcacttcgggctgtgtaaacacagtcaaaataattctaaatccctcgatatttttaaagatctgtaagtaacttcacattaaaaaatgaaatattttttaatttaaagcttactctgtccatttatccacaggaaagtgttatttttaaaggaaggttcatgtagagaaaagcacacttgtaggataagtgaaatggatactacatctttaaacagtatttcattgcctgtgtatggaaaaaccatttgaagtgtacctgtgtacataactctgtaaaaacactgaaaaattatactaacttatttatgttaaaagattttttttaatctagacaatatacaagccaaagtggcatgttttgtgcatttgtaaatgctgtgttgggtagaataggttttcccctcttttgttaaataatatggctatgcttaaaaggttgcatactgagccaagtataattttttgtaatgtgtgaaaaagatgccaattattgttacacattaagtaatcaataaagaaaacttccatagctattaa

SEQ ID NO: 352125 - DNA, 1056 bp, Homo Sapiens
cagcgatggcggcccctattagagaccaggtttgttaaaacaccaaatattgctgtccacactagacattaaccggcttcagaaaagatggacaccttttcccacgctgtttcgcttcttaactttggtccagctttagccaccacacagcgtgtgagggactgctgctgcggagtcagcctcgtttgtccctccgcctcccaccagcacgcgccgcttctgagagacaccagctccctgcctccaagcctggtgccacaggcctgtcgtgagggacccctgcttccgagagctcctgggggggttctgcccttcaccacctgggagaggtgtcagttcagttccgagttgaacaaggcccgtgcacacagcatgttgggggcccagcccaaagttcttgtcacctcctcatgcaaagccagccatcaccctccggccagagctcaaggtggccccttggccagcccctccttgggtcctccaggaggactgagcacccctcctagcggcatcccttgccctccacagtgctgccaggggcacgtcgctctgtgccgtggactgagaccatcccctggtgacagaatgacccgtttgttggaaatgcctcgttgccagagaaactccccaggcatctcggaacgaaactatttagttccattgtgaactggccacgggacagctttttatcaacttattaagttggagcactgtaatcgcgcttgctgagttagcagtggtggtaagcgtgtgttaaacacataatgttacgttttaggagagagaggtcgtaaggaagtgtcgtgtcgctcatgactctcttctattagttgggtaacagtggcctcatgtttgtgtctgtgtgtacacaagagcccttaggttctgctctgtttctttgccaggtgaatgtttgtggcatgcgctgctgtccgcgcccctctgtcctgcgcagggttcaactgtccggcgccctgatttcctccatgcacacagaacctccttgtgtctgtttctctgttcctctgtggctgactcaataaacttttccctctg

SEQ ID NO: 352126 - DNA, 730 bp, Homo Sapiens
  misc_feature (572)..(572): n is a, c, g, or t
  misc_feature (698)..(698): n is a, c, g, or t
gatggtatctctgggcgttcatagaggcacgggaaaggagtctactgataggagaaaatgttggcggcctggagatatttagatggagtagaaggcagattggggtactaggggaggcgccaagtcaatagaaattggaggaaaaataacgttgttgaagggagaggggaatgaggcaaaggttggggaagctgagagactaacataagggatctgagaatcacttccacaataaaggaggcttagaaaagggagtagaacggtgacaaaggtggaggagaatcggccagggaaggtggagggaagtggggaatgactgagagaaaagttgaggggaattgggccaacaactaaggaaaggtttgggaggagtagatattatcagagttctaatatctgcactgtgagaactagatactagaaaagctgaggggggtagaaaacactcgagacagggctggagaaggaaagaggagaactaggaagcagacgattctagagaattcccagaggtgtaaagacagattcagcgaatgagaggtgagattaggtctcttaagggagaatgaggnaagttatggagaattaatggacagggaagtgataggtgttactgggttatattctgttactattaagacctaaggagtcatggggaaggctgaggactcagaaaagaaacggaaagaaaaagaggnaagcctccagggaaaagaaggtaggagacagt

SEQ ID NO: 352127 - DNA, 411 bp, Homo Sapiens
  misc_feature (121)..(180): n is a, c, g, or t
  misc_feature (318)..(318): n is a, c, g, or t
ccagcccagagtggaagcagccgtgtgttggaggccatgcggagggggtcaggcttgcttggagagggggcatccctcacttttccatgtttccttaatgaccaaacagtgtccttgttgnnnnnnnnnnnnnnnnnnnnnnnnnnnnnnnnnnnnnnnnnnnnnnnnnnnnnnnnnnnnctaagccactgggcactggagtttgcttctgctcacttcataagcaaaggctaaggactggtcacccattttcactgtttagtttaaaaagcataaatatttactgagcagccactgtgtgacagtaaagtatttatntgtatgactaaggccacagggcactggagcttgcttcgctaactccataacataggctaaggactgggtcatccattttcactgtttagtatg

SEQ ID NO: 352128 - DNA, 1960 bp, Homo Sapiens
aacgcgcggcgacctgtgaggggatccgacttgccggcagaacttacgctgcgggaccccgggcactgttgctgctgcgggagactgtgggctgtttagtgccatgcaccctttacagtgtgtcctccaagtgcagaggtctctggggtggggaccattggcctctgtgtcttggctgtcgctgaggatgtgcagggcacacagcagtctctctagtaccatgtgtcccagtccagagaggcaggaggatggagctcggaaggatttcagctccaggctggctgctggaccgacttttcaacattttttaaaaagtgcctcagctcctcaggagaagctgtcttcagaagtggaagacccacctccctatctcatgatggatgaacttcttggaaggcagagaaaagtcttacctcgagacctatgggcttgccagatggaatgtgaatgacacagagatagcctggtccatcttacagaagagtggctacctgcggaccagtaacctccaagaggcagatgtgattctcctttgtcacgtgctctatcagggagaaggctgagcagaccatctggaaccgtttacatcagcttaaagccttgaagacaaggcggccccgctcccgggttcctctgaggattggaattctaggctgcatggctgagaggttgcaaggaggagattctcaacagagagaaaatggtagatattttggctggtcctgatgcctaccgggaccttccccggctgctggcttgttgctgaagtcgcgccagcaagctgccaacgtgctgctctctctggacgagacctatgctgatgtcatgccagtccagacaagcgccagtgccacgtctgcctttgtgggctgaaagaagtgacacttcttggtcagaatgttaatagttttcgggacaatttcggaggtccagttcaacagtggcagtgcctaccaatcttcagtcgtggcttttaccaccaactataaaaccaagcaaggaggacttcgttttgctcatcttctggatcaggtctccagagtagatcctgaaatgaggatccgttttacctctccccaccccaaggattttcctgatgaggttctgcagctgattcatgagagagataacatctgtaaacagatccacctgccagcccagagtggaagcagccgtgtgttggaggccatgcggaggggatattcaagagaagcttatgtggagttagttcaccatattagagaatctattccaggtgtgagcctcagcagcgatttcattgctggcttttgtggtgagacggaggaagatcacgtccagacagtctctttgctccgggaagttcagtacaacatgggcttcctctttgcctacagcatgagacagaagacacgggcatatcataggctgaaggatgatgtcccggaagaggtaaaattaaggcgtttggaggaactcatcactatcttccgagaagaagcaacaaaagccaatcagacctctgtgggctgtacccagttggtgctagtggaagggctcagtaaacgctctgccactgacctgtgtggcaggaatgatggaaaccttaaggtgatcttccctgatgcagagatggaggatgtcaataaccctgggctcagggtcagagcccagcctggggactatgtgctggtgaagatcacctcagccagttctcagacacttaggggacatgttctctgcaggaccactctgagggactcttctgcatattgctgacctgagaggatggcctcagagctgacttgggcaatcctccccaacaggaaggggagacattgcctgccactgaggaaacaggtcatgaaggtggagataagctgcaaggggcgaagcaactttatgtcagtggaaaacgtgtctctttaaagctgctatgtgaacagcttttacagtcattaaatttacctaaactaaggtt

SEQ ID NO: 352129 - DNA, 775 bp, Homo Sapiens
gggaacgcagcggcggacctgtgaggggatccgacttgccggcagaacttacgctgcgggaccccgggcactgttgctgctgcgggaggcagatgtgattctccttgtcacatgctctatcagggagaaggctgagcagaccatctggaaccgtttacatcagcttaaagccttgaagacaaggcggccccgctcccgggttcctctgaggattggaattctaggctgcatggctgagaggttgaaggaggagattctcaacagagagaaaatggtagatattttggctggtcctgatgcctaccgggaccttccccggctgctggctgttgctgagtcgggccagcaagctgccaacgtgctgctctctctggacgagacctatgctgatgtcatgccagtccagacaagcgccagtgccacgtctgcctttgtgtcaatcatgcgaggctgtgacaacatgtgtagctactgcattgttcctttcaccccggggcagggagaggagtcggcctattgcctccattctagaggaagtgaagaagctttctgagcaggggctgaaagaagtgacacttcttggtcagaatgttaatagttttcgggaacattcgggagtcccgttccaacagtggcagtgccctaaccaatctccagtcgtggcttttaccccaaactataaaacccaagccagggagggaacttcgttttggttcctccttccgggatcaggggcccccagaagtaaattcctgggaaatggagggatcccgtt

SEQ ID NO: 352130 - DNA, 548 bp, Homo Sapiens
  misc_feature (49)..(49): n is a, c, g, or t
  misc_feature (84)..(163): n is a, c, g, or t
ggcgggacccttcccatcccaaccttgagccccaggagataccgcgccntcacccaatcttgggacactccctatctggttggnnnnnnnnnnnnnnnnnnnnnnnnnnnnnnnnnnnnnnnnnnnnnnnnnnnnnnnnnnnnnnnnnnnnnnnnnnnnnnnntgctgttgaatcagaaacagatcaacagcccaaagattttcctgtccctggagtgccagccccaggaagctccagggctgagtggtcaggagccagtttctccagcccctcctccccacaacccctagtggggaggggcagctgtccatttgcccaaagtattaatgcaactgaagctgtgatatttccaacgactgtaggaggaaaaattaaggggagagaggaaaacaaaaccaaccaacccctaaaatcattttcttattgtacataacgacctcattctcctgtatatgcggaagatataaccttatatttggtaagtgtttcttgtgctattttatcacgtgacctgtttataaaaatatatattaaaaaagttgtaaaa

SEQ ID NO: 352131 - DNA, 1155 bp, Homo Sapiens
cggtggttcaacagcctgggtctacagcgcgggacccgtctggggtgaagaccttggggctgttgtgagtcggtggcaggaacgtgggctctagactgtgcattcaggctctcctacttggcagaatgatcttggggaaacgacttcatctgaacttcagatatttcacatgtgaagcggggacaaaaccatgcagctcagaggtccctgtgggggctgggggagctgccctgcaggtcttggcacatgcacagcaggctccccatagctttgtcaccacaaagggcactgttctattcacagcacctcctgcttctgcctggcaactgtgtctccctgtgctatatttaattccaccagcaaagctggccgaggcagggcccagccctgaaggagatctccttgcctgacccctggacctggaaatggaggcttcatgtgcccgccttggcggcttaagcctgctgctttggcagtgccatgggtgagccgagcagctgtgaggtgggtggggcaggctgtagcccacgccgggtgctattccaggctctaggggctggtgctcatccccacccccagcgacttccgtcctacctggcatgctgcagccctctgccggctgtggtgtcctctgaatttggacccaggttgcctgctcttgtagtgggggtgggattggggctgtctgtgtttcccaggtggagctcatgtttgtgatcctctatctggacagctctccagaatcctgtgttgcccctgttctgcctttctgggatgggagagaaggtgaggggagccggcgagccggttctaccctctctgctaagggcctagcacgctttgatgaggttcctggacgtgagaccctcacaaagaccaaccattcctctaatagccatttaacggtactgcagttcatgggaaaatgtcctcattcttaggagatagatgctggattatataggtgaatgccttcaagaaatgtgtaatttaattccaaatagttccccccaaaatacacaaagcaaataaggccaaaatgttcattgttgaatctgcagtggctggtatttcagtgaacagtgtacttgttctttcaacttttctgtatgtttggaatttttcttaataaaagattgtgggaaatgaaaaaaa

SEQ ID NO: 352132 - DNA, 430 bp, Homo Sapiens
  misc_feature (30)..(30): n is a, c, g, or t
  misc_feature (52)..(52): n is a, c, g, or t
  misc_feature (57)..(57): n is a, c, g, or t
  misc_feature (66)..(66): n is a, c, g, or t
  misc_feature (206)..(206): n is a, c, g, or t
  misc_feature (229)..(229): n is a, c, g, or t
  misc_feature (273)..(273): n is a, c, g, or t
  misc_feature (334)..(334): n is a, c, g, or t
cctgtgttgcccccctgttcctgccctttnctgggatgggagagaaaggtgnagggnaagcccganaccggttcctacccctctctgcctaagggccctagcacgcctttgatgaggtcccccggaccgtgagacccctcacaaagacccaacccattccctctaatagcccatttaacggtactgcagttccatgggaaaatgtncctcaaccttaggagatagatgnctggattatataggtgaatgccttcaagaaatgtgtaatttaantccaaatagttccccccaaaatacacaaagcaaataaggccaaaatgttcattgttgaatnctgcagtggctggtatttcagtgaacagtgtacttgttctttcaacttttctgtatgtttggaatttttcttaataaaagattgtgggaaatggtc

SEQ ID NO: 352133 - DNA, 787 bp, Homo Sapiens
  misc_feature (209)..(209): n is a, c, g, or t
  misc_feature (300)..(300): n is a, c, g, or t
tcaacccaaggagccaaggaggggaaggccggcctgagcagcaacgtagacaagagctcaggagggcagggacagagccctggcttcagcaagagcgtggggaacagagggcaagggggtccatgcagcccaggatggcagggtgctcatacacacagccttggtcctgtcccctctcccactgccgcttttgagcttcaccttgtttnaaggccaaagcacacaccattcctcccacagagccacttaatgcaatttaacaaaacacattcataaatcttgcatggcgtccggagctgnctcctctccctaagcacaaaggccagctccagagatgctgtgcagagagctgtctgacctctccagcgtcagggccccctgaaaagtgcagcataacccttagtaggacagaaagaccattgtcttctgccaaccattacaaagtggagtggggctggggttaggaaacacagacaaatcagaagaggctgagaaggcggagatgaaagtgcataggtgtttgcagggagctggggaatagttcgtgccttccaagctcaacaagagagcattcagcagagaccagagaatcaccacttttggagggtgattttaccttgtgagaacagagcacagggtgtgtgggacccagggcatcttcggcaatgcgggcgtgacttggcgggatgtcggtgtttgtgtttgcatgtgtgtgtgcgtgcgtgcatgctcagtctggaaaactggtgactcactaaaacaccgagctttctgatctgaaaaaaaa

SEQ ID NO: 352134 - DNA, 3131 bp, Homo Sapiens
  misc_feature (2957)..(2984): n is a, c, g, or t
ccgggatctctgaacgcatccgtgcccaccctcaccccttgggttttgggaaggactaatgaaatcatgaaaactgacttccttggggcttgacctggggcggctctaagtgcgctacagacaaccttttagtcctcacggtggccactaaggagaccgagggattccgtcgcttcaagcgctcagctcagttcttcaactacaagatccaggcgcttggcctaggggaggactggaatgtggagaaggggacgtcggcaggtggagggcagaaggtccggctgctgaagaaagctctggagaagcacgcagacaaggaggatctggtcattctcttcgcagacagctatgacgtgctgtttgcatcggggccccgggagctcctgaagaagttccggcaggccaggagccaggtggtcttctctgctgaggagctcatctacccagaccgcagctggagaccaagtatccggtggtgtccgatggcaagaggttcctgggctctggaggcttcatcggttatgcccccaacctcagcaaactggtggccgagtgggagggccaggacagcgacagcaatcagctgttttacaccaagatcttcttggacccggagaagagggagcagatcaatatcaccctggaccaccgctgccgtatcttccagaacctggatggagccttggatgaggtcgtgctcaagtttgaaatgggccatgtgagagcgaggaacctggcctatgacaccctcccggtcctgatccatggcaacgggccaaccaagctgcagttgaactacctgggcaactacatcccgcgcttctggaccttcgaaacaggctgcaccgtgtgtgacgaaggcttgcgcagcctcaagggcattggggatgaagctctgcccacggtcctggtcggcgtgttcatcgaacagcccacgccgtttgtgtccctgttcttccagcggctcctgcggctccactacccccagaaacacatgcgacttttcatccacaaccacgagcagcaccacaaggctcaggtggaagagttcctggcacagcatggcagcgagtaccagtctgtgaagctggtgggccctgaggtgcggatggcgaatgcagatgccaggaacatgggcgcagacctgtgccggcaggaccgcagctgcacctactacttcagcgtggatgctgacgtggccctgaccgagcccaacagcctgcggctgctgatccaacagaacaagaacgtcattgccccgctgatgacccggcatgggaggctgtggtcgaacttctggggggctctcagtgcagatggctactatgcccgttccgaggactacgtggacattgtgcaggggcggcgtgttggtgtctggaatgtgccctatatttcaaacatctacttgatcaagggcagtgccctgcggggtgagctgcagtcctcagatctcttccaccacagcaagctggaccccgacatggccttctgtgccaacatccggcagcaggatgtgttcatgttcctgaccaaccggcacacccttggccatctgctctccctagacagctaccgcaccacccacctgcacaacgacctctgggaggtgttcagcaaccccgaggactggaaggagaagtacatccaccagaactacaccaaagccctggcagggaagctggtggagacgccctgcccggatgtctattggttccccatcttcacggaggtggcctgtgatgagctggtggaggagatggagcactttggccagtggtctctgggcaacaacaaggacaaccgcatccagggtggctacgagaacgtgccgactattgacatccacatgaaccagatcggctttgagcgggagtggcacaaattcctgctggagtacattgcgcccatgacggagaagctctaccccggctactacaccagggcccagtttgacctggcctttgtcgtccgctacaagcctgatgagcagccctcactgatgccacaccatgatgcctccaccttcaccatcaacatcgccctgaaccgagtcggggtggattacgagggcgggggctgtcggttcctgcgctacaactgttccatccgagccccaaggaagggctggaccctcatgcaccctggacgactcacgcattaccatgaggggctccccaccaccaggggcacccgctacatcgcagtctccttcgtcgatccctaattggccaggcctgaccctcttggacctttcttctttgccgacaaccactgcccagcagcctctgggacctcggggtcccagggaacccagtccagcctcctggctgttgacttcccattgctcttggagccaccaatcaaagagattcaaagagattcctgcaggccagaggcggaacacacctttatggctggggctctccgtggtgttctggacccagcccctggagacaccattcacttttactgctttgtagtgactcgtgctctccaacctgtcttcctgaaaaaccaaggcccccttcccccacctcttccatggggtgagacttgagcagaacaggggcttccccaagttgcccagaaagactgtctgggtgagaagccatggccagagcttctcccaggcacaggtgttgcaccagggacttctgcttcaagttttggggtaaagacacctggatcagactccaagggctgccctgagtctgggacttctgcctccatggctggtcatgagagcaaaccgtagtcccctggagacagcgactccagagaacctcttgggagacagaagaggcatctgtgcacagctcgatcttctacttgcctgtggggaggggagtgacaggtccacacaccacactgggtcaccctgtcctggatgcctctgaagagagggacagaccgtcagaaactggagagtttctattaaaggtcatttaaacccnnnnnnnnnnnnnnnnnnnnnnnnnnnnaaggggcggcccgctctagaagtatcccctcggagggggccccaagccttacggcgtaccccaggctttcctttggtaacaaaggggggcccctaataaggggaaggtcggtatttattaagcctaagggaccctctgggccgttca

SEQ ID NO: 352135 - DNA, 1046 bp, Homo Sapiens
aaaaccacccggcgcgaccccaaggggaaccgttggggccaagaagttttcattcccccccaaatgccccttggagggcttgcgccaaagccttcggtccacaccacggtgcagccttgtttcgaaggtcccagaagccgcgggaatgtagttgcccaaggtagttccaactgcagcttggttggcccgttgccatggatcaggaccgggagggtgtcataggccaggttcctcgctctcacatggcccatttcaaacttgagcacgacctcatccaaggctccatccaggttctggaagatacggcagcggtggtccagggtgatattgatctgctccctcttctccgggtccaagaagatcttggtgtaaaacagctgatcgctgtcgctgtcctggccctcccactcggccaccagtttgctgaggttgggggcataaccgatgaagcctccagagcccaggaacctcttgccatcggacaccaccggatacttggtctccagcctgcggtctgggtagatgagctcctcagcagagaagaccacctggctcctggcctgccggaacttcttcaggagctcccggggccccgatgcaaacagcacgtcatagctgtctgcaaagagaatgaccagatcctccttgtctgcgtgcttctccagagctttcttcagcagccggaccttctgccctccacctgccgacgtccccttctccacattccagtcctcccctaggccaagcgcctggatcttgtagttgaagaactgagctgagcgcttgaagcgacggaatccctcggtctccttagtggccaccgtgaggactaaaaggttgtcctccggcttggcgtcgcccttcgcttcggccagcagcagccagcccagcagggccagtagcagcaggggccgcatggccgaggtatgggggacgatcggccgacccggcggcgctcgcagggctggaaacttcgcgacggggccgcaggtcccgctgccacgcactgggcccgccccggatcccgggaattccggaccggtacc

SEQ ID NO: 352136 - DNA, 730 bp, Homo Sapiens
gagagagcgtacggctaggtacgaggccgggtgttaatcggcacgaggcccatacctcggccatgcggccctgctgctactggccctgctgggctggctgctgctggccgaagcgaagggcgacgccaagccggaggacaaccttttagtcctcacggtggccactaaggagaccgagggattccgtcgcttcaagcgctcagctcagttcttcaactacaagatccaggcgcttggcctaggggaggactggaatgtggagaaggggacgtcggcaggtggagggcagaaggtccggctgctgaagaaagctctggagaagcacgcagacaaggaggatctggtcattctcttcgcagacagctatgacgtgctgtttgcatcggggccccgggagctcctgaagaagttccggcaggccaggagccaggtggtcttctctgctgaggagctcatctacccagaccgcaggctggagaccaagtatccggtggtgtccgatggcaagaggttcctgggctctggaggcttcatcggttatgcccccaacctcagcaaactggtaggccgagtgggagggccaggacagcgacagcgatcaagctgttttacaccaagatcttcttggacccggagaagagggagcaggatcaatatcaccctggaccaccgctgcgtatcttccagaacctggatgagccttgggtgaagtcgtgcccaagtttgaaag

SEQ ID NO: 352137 - DNA, 663 bp, Homo Sapiens
  misc_feature (391)..(415): n is a, c, g, or t
gagtatttttacgtgataaggattttcggcagatggtaggaattaagaagtccccaccacctttgagaatgcacgctgcatgcagtccactaactactaattggaaacggaaagtatcaaagtgttaacccagcagttgagacgtgagggaactgtgaatcaaatggaaggtaagccacccccagttaacctcacagagcttgcaaagtgggaagttaagttttcttggtttatgcatccggcaccgtattggatcctggccaccgactatgagaattatgccctggtgtattcctgtacctgcatcatccaactttttcacgtggattttgcttggatcttggcaagaaaccctaatctccctccagaaacagtggactctctaaaaaannnnnnnnnnnnnnnnnnnnnnnnngtcaagaaaatgacggtcacagaccaggtgaactgccccaagctctcgtaaccaggttctacagggaggctgcacccactccatgttacttctgcttcgctttcccctaccccaccccccgccataaagacaaaccaatcaaccacgacaaaggaagttgacctaaacatgtaaccatgccctaccctgttaccttgctagctgcaaaataaacttgttgctgacctgctgtgctcgcagtagattcc

SEQ ID NO: 352138 - DNA, 883 bp, Homo Sapiens
agcgggaaggaaatcgggggaggaggatggacacaacatcccatctttgtgtttcgatacagactaagcttttaggccaaccctcctgactggatgggggcggcgggcgtggcatgcatgaaaagtaaacatcagagacctgaagaagcttataaaatagcttgggagaggccagtcaccaagacaggcatctcaaatcggctgattctgcatctggaaactgccttcatcttgaaagaaaagctccaggtcccttctccagccacccagccccaagatggtgatgctgctgctgctgctttccgcactggctggcctcttcggtgcggcagagggacaagcatttcatcttgggaagtgccccaatcctccggtgcaggagaattttgacgtgaataagtatctcggaagatggtacgaaattgagaagatcccaacaacctttgagaatggacgctgcatccaggccaactactcactaatggaaaacggaaagatcaaagtgttaaaccaggagttgagagctgatggaactgtgaatcaaatcgaaggtgaagccaccccagttaacctcacagagcctgccaagctggaagttaagttttcctggtttatgccatcggcaccgtactggatcctggccaccgactatgagaactatgccctcgtgtattcctgtacctgcatcatccaactttttcacgtggattttgcttggatcttggcaagaaaccctaatctccctccagaaacagtggactctctaaaaaatatcctgacttctaataacattgatgtcaagaaaatgacggtcacagaccaggtgaactgccccaagctctcgtaaccaggttctacagggaggctgcacccactccatgtt

SEQ ID NO: 352139 - DNA, 985 bp, Homo Sapiens
  misc_feature (45)..(81): n is a, c, g, or t
gcgaacgaccactatgggcgactggagctcaccgcggggcggcgnnnnnnnnnnnnnnnnnnnnnnnnnnnnnnnnnnnnnatcaggccaaatcggccgagctcgaattcgtcgagagcggaagacaggcatctcaaatcggctgattctgcatctggaaactgccttcatcttgaaagaaaagctccaggtcccttctccagccacccagccccaagatggtgatgctgctgctgctgctttccgcactggctggcctcttcggtgcggcagagggacaagcatttcatcttgggaagtgccccaatcctccggtgcaggagaattttgacgtgaataagtatctcggaagatggtacgaaattgagaagatcccaacaacctttgagaatggacgctgcatccaggccaactactcactaatggaaaacggaaagatcaaagtgttaaaccaggagttgagagctgatggaactgtgaatcaaatcgaaggtgaagccaccccagttaacctcacagagcctgccaagctggaagttaagttttcctggtttatgccatcggcaccgtactggatcctggccaccgactatgagaactatgccctcgtgtattcctgtacctgcatcatccaactttttcacgtggattttgcttggatcttggcaagaaaccctaatctccctccagaaacagtggactctctaaaaaatatcctgacttctaataacattgatgtcaagaaaatgacggtcacagaccaggtgaactgccccaagctctcgtaaccaggttctacagggaggctgcacccactccatgttacttctgcttcgctttcccctaccccaccccccgccataaagacaaaccaatcaaccacgacaaaggaagttgacctaaacatgtaaccatgccctaccctgttaccttgctagctgcaaaataaacttgttgctgacctgctgtgctcgcagtagattcc

SEQ ID NO: 352140 - DNA, 500 bp, Homo Sapiens
aattcacgctcgtgtaccccagttctgtcatcttgaaatcaaatgttattatgaatgtcaggatattttttaagagagtccactgttctctggcagggagattagggtttcttgccaagtatccaagcaagaatccacgcttaaaaagttggatgatgcaggtacaggaatacacgagggcatagttctcatagtcatagctcaggactctcagtacggatgccgatggcataaaccaggaaaacttaacttccagcttggcaggctctgtgaggttaactggggtggcttcaccttcgatttgattcacagttccatcagctctcaactcctggtttaacaccttgatctttccgttttccattagtgagtagttggcctggatgcagcgtccattctcaaaggttgttgggatcttctcaatttcgtaccatcttccgagatacttattcacgtcaaaattctcctgcaccggaggattggggcacttcccaagatga

SEQ ID NO: 352141 - DNA, 1850 bp, Homo Sapiens
gtcgcggactggctgggggcgtctcggcgcggctggcggcggggccggcctaagcgcgcccgcgcacccatctgcccccgtcctaggtgccgaccaacccccaggatggcggaagctcaccaggccgtggccttccagttcacggtgaccccagacggggtcgacttccggctcagtcgggaggccctgaaacacgtctacctgtctgggatcaactcctggaagaaacgcctgatccgcatcaagaatggcatcctcaggggcgtgtaccctggcagccccaccagctggctggtcgtcatcatggcaacagtgggttcctccttctgcaacgtggacatctccttggggctggtcagttgcatccagagatgcctccctcaggggtgtggcccctaccagaccccgcagacccgggcacttctcagcatggccatcttctccacgggcgtctgggtgacgggcatcttcttcttccgccaaaccctgaagctgcttctctgctaccatgggtggatgtttgagatgcatggcaagaccagcaacttgaccaggatctgggctatgtgtatccgccttctatccagccggcaccctatgctctacagcttccagacatctctgcccaagcttcctgtgcccagggtgtcagccacaattcagcggtacctagagtctgtgcgccccttgttggatgatgaggaatattaccgcatggagttgctggccaaagaattccaggacaagactgcccccaggctgcagaaatacctggtgctcaagtcatggtgggcaagtaactatgtgagtgactggtgggaagagtacatctaccttcgaggcaggagccctctcatggtgaacagcaactattatgtcatggaccttgtgctcatcaagaatacagacgtgcaggcagcccgcctgggaaacatcatccacgccatgatcatgtatcgccgtaaactggaccgtgaagaaaccaagcctgggatggcactggggcatagtgcctatgtgctcctaccaaatggagaggatgttcaacaccactcggatcccggacaaggacacagatgtgctacagcacctactcagacagccggcacgtggctgtctaccacaagggacgctacttcaagctgtggctctatgagggcgcccgtctgctcaagcctcaggatctggagatgcagtaccagaggatcctggacgacccctccccacctcagcctggggaggagaagctggcagccctcactgcaggaggaagggtggagtgggcgcaggcacgccaggccttctttagctctggaaagaataaggctgccttggaggccatcgagcgtgccgctttcttcgtggccctggatgaggaatcctactcctatgaccccgaagatgaggccagcctcagcctctatggcaaggccctgctacatggcaactgctacaacaggtggtttgacaaatccttcactctcatttccttcaagaatggccagttgggtctcaatgcagagcatgcgtgggcagatgctcccatcattgggcacctctgggagtttgtcctgggcacagacagcttccacctgggctacacggagaccgggcactgcctgggcaaaccgaaccctgcgctcgcacctcctacacggctgcagtgggacattccaaaacagtgccaggcggtcatcaagagttcctaccaggtggccaaggcgttggcagacgacgtggagttgtactgcttccagttcctgccctttggcaaaggcctcatcaaagaagtgccggaccagccctgatgcctttgtgcagatcgccgctgcagctggctcacttccggg

SEQ ID NO: 352142 - DNA, 111 bp, Homo Sapiens
attgaaggcctggaacacaatggagaataaaactgcaaagaatgtggcaaatatgtgttatgtgggtaaatattaaaaaacattgaccaggctgggcccagtggctcacac

SEQ ID NO: 352143 - DNA, 764 bp, Homo Sapiens
  misc_feature (21)..(21): n is a, c, g, or t
  misc_feature (30)..(30): n is a, c, g, or t
  misc_feature (48)..(48): n is a, c, g, or t
  misc_feature (51)..(51): n is a, c, g, or t
  misc_feature (71)..(71): n is a, c, g, or t
  misc_feature (130)..(130): n is a, c, g, or t
  misc_feature (638)..(658): n is a, c, g, or t
ccctttaaaaactatgagaanacttaaagnacataccccagtatgttntgnacggccatttcaatcttacnggctttgaacagcccaagccatacacatcaatatcaactttgtttatgttatgtgagtnccctgattgtgtttgcattttaacaacaataccccgtgtaattaattagtactagtttagtgtactaattaagaaaagggaaaagaagtggtaatgcgataaaacttcttttatcataagccaggtcatgtctgtaaaacaatgtcagtcttcatacataatatttgctggtgccttcaaatttggcattagagaaactaatgccttctaagtcatgtgtaaagaaaacactagtatatttataagagactatttttgaacaatataacttgtttatatataaatctataatatgaatttatcttggctctgaataaaataagtcctttatactccttcagaccagggaatggtaatgaatataatctaagaagatttgtagtgagtctaaacagttcatagcataaatgagttgaatgatagggcatgtccttgtagtctcttttcctcacagaagggcagctctttgctattgtagtccagggaaccccttggagctatgtctttnnnnnnnnnnnnnnnnnnnnnatcctgtgcttagacagtgttatcgcttggtacctggagtcctgggggaggcagtggtggtcttcttatacatggttgggattctgtaagtttgtttagccctctc

SEQ ID NO: 352144 - DNA, 1704 bp, Homo Sapiens
  misc_feature (52)..(52): n is a, c, g, or t
  misc_feature (58)..(58): n is a, c, g, or t
  misc_feature (116)..(116): n is a, c, g, or t
  misc_feature (145)..(145): n is a, c, g, or t
  misc_feature (173)..(173): n is a, c, g, or t
  misc_feature (322)..(322): n is a, c, g, or t
  misc_feature (1434)..(1434): n is a, c, g, or t
  misc_feature (1437)..(1438): n is a, c, g, or t
  misc_feature (1454)..(1454): n is a, c, g, or t
  misc_feature (1457)..(1457): n is a, c, g, or t
  misc_feature (1459)..(1459): n is a, c, g, or t
  misc_feature (1477)..(1477): n is a, c, g, or t
  misc_feature (1560)..(1560): n is a, c, g, or t
  misc_feature (1585)..(1585): n is a, c, g, or t
  misc_feature (1588)..(1602): n is a, c, g, or t
  misc_feature (1639)..(1640): n is a, c, g, or t
  misc_feature (1643)..(1643): n is a, c, g, or t
  misc_feature (1667)..(1667): n is a, c, g, or t
  misc_feature (1686)..(1686): n is a, c, g, or t
  misc_feature (1702)..(1702): n is a, c, g, or t
ggaaatcccctaggtcaggccaaacccctcctccccatgccaatcctttcancagttntaagcaaaaaaaccccacggatcaaccacgctttttgcccgcttggcagcaggtgtgngctgtaagcactggaacggccaagggaanactgaatgatgcccttggatcggctggnagaagttgaaagaaattgcccaactttggactttgatgtctgaaggaaaaagtatatgcgttggatgaatcacaaaaagtctcgagtgatggattcttcccggcgcattgatagggaccaggatgggaagataacacgtcaggagttantcgatggcattttagcatccaagttccccaccaccaagttagagatgactgctgtggctgacattttcgaccgagatggggatggttacattgattattatgaatttgtggctgctcttcatcccaacaaggatgcgtatcgaccaacaaccgatgcagataaaatcgaagatgaggttacaagacaagtggctcagtgcaaatgtgcaaaaaggtttcaggtggagcagatcggagagaataaataccggttcttcctcggcaatcagtttggggattctcagcagttgcggctggtccgtattctgcgcagcaccgtgatggttcgcgttggtggaggatggatggccttggatgaatttttagtgaaaaatgatccctgccgagcacgaggtagaactaacattgaacttagagagaaattcatcctaccagagggagcatcccagggaatgacccccttccgctcacggggtcgaaggtccaaaccatcttcccgggcagcttcccctactcgttccagctccagtgctagtcagagtaaccacagctgtacatccatgccatcttctccagccaccccagccagtggaaccaaggttatcccatcatcaggtagcaagttgaaacgaccaacaccaacttttcattctagtcggacatcccttgctggtgataccagcaatagttcttccccggcctccacaggtgccaaaactaatcgggcagaccctaaaaagtctgccagtcgccctgggagtcgggctgggagtcgagccgggagtcgagccagcagccggcgaggaagtgacgcttctgactttgacctcttagagacgcagtctgcttgttccgacacttcagaaagcagcgctgcagggggccaaggcaactccaggagagggctaaacaaaccttccaaaaccccaaccatgcctaagaagaccaccactgccccccccaggaccccaggtcccaagcgataacactgtctaagcacccccaagccactatccactttgaaccccgccccatacattgggtgtatatttattccgaacgggagaaagttatatttgttaaaagtgtaaaaagaataattgtgttatgangcnnccttattttttttctnttngnaagttactattttcatgngaatatttatgtagataaaatttgcctcctggtaaccctgtaatggatggggcccagaaatgaaatatttgagaaaaacaagngaaaaggccaagatacaaatcgggnacnnnnnnnnnnnnnnnccgattaatagggtttctgcgcggggcagggtcgtannccngcgggatcttttaggattatgccnaaaggcatcttctttatanactggacgcgagctcngc

SEQ ID NO: 352145 - DNA, 1573 bp, Homo Sapiens
  misc_feature (129)..(129): n is a, c, g, or t
  misc_feature (656)..(667): n is a, c, g, or t
cccatcatcaggtagcaagttgaaacgaccaaacaccatcttttcatctagtcggacatccttgctggtataccagcaatagtcttccccggcctccacaggtgccaaaactaatcgggcagaccctanaaagtctgccagtcgccctgggagtcgggctgggagtcgagccgggagtcgagccagcagccggcgaggaagtgacgcttctgactttgacctcttagagacgcagtctgcttgttccgacacttcagaaagcagcgctgcagggggccaaggcaactccaggagagggctaaacaaaccttccaaaatcccaaccatgtctaagaagaccaccactgcctcccccaggactccaggtcccaagcgataacactgtctaagcacccccaagccactatccactttgaatcctgctccatacattgggtgtatatttattctgaacgggagaagttatattgttaaaagtgtaaaagaataattgtgttatgaagctgccttatttaatttctttttgtaagttactattttcatgtgaatatttatgtagataaaatttgcctcctggtaaccctgtaatggatggggcccagaaatgaaatatttgagaaaaacaagtgaaaaggtcaagatacaaatgtgtattnnnnnnnnnnnngcctattaatagggtttctgcgcggtgcagggttgtaaacctgctttatcttttaggattattcctaaatgcatcttctttataaacttgacttgctatctcagcaagataaattatattaaaaaaataagaatcctgcagtgtttaaggaactctttttttgtaaatcacggacacctcaattagcaagaactgaggggagggctttttccattgtttaatgttttgtgatttttagctaaagagagggaacctcatctaagtaacatttgcacatgatacagcaaaaggagttcattgcaatactgtctttggatattgtgttcagtacctgggtgtttcaaaggacaaatagctgctagaattcaggggtaaatgtaagtgttcagaaaacgtcagaacatttgggggttttaaactgatttgttgctccctatccagcctagacaccagtaactcttgtgttcaccaggacccagacccttggcaagggataggctcgttggtgacattgtgaatttcagatttgttttatccactttttttgctatttatttaaatggtcgatcaacttcccacaaactgaggaatgaattccacgagcctgttctgaaaatgtggacgtaagacaaacacgtgctcgtcctttaatggagttcaccagcacacttgttaaccagtcctgtttgctttcgtctttttttgtgcgtaataaagtcaactgaccaagtgaccatgaaaaggggctgtctggggctcctgttttttagctgctgttcttcagctccgaccatgttgctgtgtgattatctcaattggttttaattgaggcagaaactgaagctctaccaatgaactgtttagaaacaagacacacttttgtattaaaattgccttggcagtaac

SEQ ID NO: 352146 - DNA, 3013 bp, Homo Sapiens
  misc_feature (89)..(89): n is a, c, g, or t
  misc_feature (146)..(146): n is a, c, g, or t
cagaggagagggagcagcagcttcagtcaactctgcagcaggcccagggcttccacagtgaaattgaagatttcctcttggaacttacnagaatggagagccagctttctgcatctaagcccacaggaggacttcctgaaactgcnagggaacagcttgatacacatatggaactctattcccagctgaaagccaaggaagagacttataatcaactacttgacaagggcagactcatgcttctaagccgtgacgactctgggtctggctccaagacagaacagagtgtagcacttttggagcagaagtggcatgtggtcagcagtaagatggaagaaagaaagtcaaagctggaagaggccctcaacttggcaacagaattccagaattccctacaagaatttatcaactggctcactctagcagagcagagtttaaacatcgcttctccaccaagcctgattctaaatactgtcctttcccagatagaagagcacaaggtttttgctaatgaagtaaatgctcatcgagaccagatcattgagctggatcaaactgggaatcaattaaagttccttagccaaaagcaggatgttgttctgatcaagaatttgttggtgagcgtgcagtctcgatgggagaaggttgtccagcgatctattgaaagagggcgatcactagatgatgccaggaagcgggcaaaacaattccatgaagcttggaaaaaactgattgactggctagaagatgcagagagtcacctggactcagaactagagatatccaatgacccagacaaaattaaacttcagctttctaagcataaggagtttcagaagactcttggtggcaagcagcctgtgtatgataccacaattagaactggcagagcactgaaagaaaagactttgcttcccgaagatactcagaaacttgacaatttcctaggagaagtcagagacaaatgggatactgtttgtggcaagtctgtggagcggcagcacaagttggaggaagccctgctcttttcgggtcagttcatggatgctttgcaggcattggttgactggttatacaaggtggagccacagctggctgaggaccagcccgtgcacggggaccttgacctcgtcatgaacctcatggatgcacacaaggttttccagaaggaactgggaaagcgaacaggaaccgttcaggtcctgaagcggtcaggccgagagctgattgagaatagtcgagatgacaccacttgggtaaaaggacagctccaggaactgagcactcgctgggacactgtctgtaaactctctgtttccaaacaaagccggcttgagcaggccttaaaacaagcggaagtgtttcgagacacagtccacatgctgttggagtggctttctgaagcagagcaaacgcttcgctttcggggagcacttcctgatgacacagaggccctgcagtctctcattgacacccataaggaattcatgaagaaagtagaagaaaagcgagtggacgttaactcagcagtagccatgggagaagtcatcctggctgtctgccaccccgattgcatcacaaccatcaaacactggatcaccatcatccgagctcgcttcgaggaggtcctgacatgggctaaagcagcaccagcagcgtcttgaaacggccttgtcagaactggtggctaatgctgagctcctggaagaacttctggcatggatccagtgggctgagaccaccctcattcagcgggatcaggagccaatcccgcagaacatgaccgagttaaagcccttatcgctgagcatcagacatttatggaggagatgactcgcaaacagcctgacgtggaccgggtcaccaagacatacaaaaggaaaaacatagagcctactcacgcgcctttcatagagaaatcccgcagcggaggcaggaaatccctaagtcagccaacccctcctcccatgccaatcctttcacagtctgaagcaaaaaacccacggatcaaccagctttctgcccgctggcagcaggtgtggctgttagcactggagcggcaaaggaaactgaatgatgccttggatcggctggaggagttgaaagaatttgccaactttgactttgatgtctggaggaaaaagtatatgcgttggatgaatcacaaaaagtctcgagtgatggatttcttccggcgcattgataaggaccaggatgggaagataacacgtcaggagtttatcgatggcattttagcatccaagttccccaccaccaagttagagatgactgctgtggctgacattttcgaccgagatggggatggttacattgattattatgaatttgtggctgctcttcatcccaacaaggatgcgtatcgaccaacaaccgatgcagataaaatcgaagatgaggttacaagacaagtggctcagtgcaaatgtgcaaaaaggtttcaggtggagcagatcggagagaataaataccggtttggggattctcagcagttgcggctggtccgtattctgcgcagcaccgtgatggttcgcgttggtggaggatggatggccttggatgaatttttagtgaaaaatgatccctgccgagcacgaggtagaactaacattgaacttagagagaaattcatcctaccagagggagcatcccagggaatgacccccttccgctcacggggtcgaaggtccaaaccatcttcccgggcagcttcccctactcgttccagctccagtgctagtcagagtaaccacagctgtacatccatgccatcttctccagccaccccagccagtggaaccaaggtatgtactgatctccatttatgccttcttccccaatcccaccctcaaagaagttcattgttcacgggtagccctccgaaagactcccagtgaaggagaaagaaaataaatatggggccctcttgaaaagaaccccacgtggagggggaaggaaatttcgaattggaaaacaaggtttttcttatttttag

SEQ ID NO: 352147 - DNA, 736 bp, Homo Sapiens
  misc_feature (98)..(98): n is a, c, g, or t
  misc_feature (105)..(105): n is a, c, g, or t
  misc_feature (663)..(682): n is a, c, g, or t
ggaccagaagccaaatctacataatacacatgaaatagtaattccaaaagaaaaaaataagggcagcttcataacccattattctacacttttaacanatatacnttctcccgttcagactcgtgccgaattcggcaccagatcatggcgatggtttcccccttactgttctcatggtagtgaataagcctcatgagatctgatggttttataaggggtttccctttgcacttggttctcattctctcttcccaccatgtaagacatgccttttgccttctgccatgattgtgaggtctccccagccacgtgaaactgagtccattaaacctctttttctttattagttacccagtcttgagtatgtctttatcagcagtgtcagaacagactaatacacaagggtatacatttcattaaattgaactattagaagatataatgtatatgtatatactgtgttttatttgcaagagcgacaattgttggtgacaagtttgcttgtttggaagaaaagtctgatacactaattaagataaagtgggagaagggaatagcctattttattatttttcttaacttttatcttgtaaagtcattgttttcaaagccaaagcaccatggaaacttcttcactgattctaagagcattaaatattttcnnnnnnnnnnnnnnnnnnnnggaaactgaagactagctcgtgccgaattcctgcagcccaagggatccactagt

SEQ ID NO: 352148 - DNA, 727 bp, Homo Sapiens
  misc_feature (318)..(342): n is a, c, g, or t
  misc_feature (536)..(603): n is a, c, g, or t
gacttttcaacattttattcttatatttgtacagctatattttacaacgcggtaatgcagtttagacacagccaaaccctgtctccggagtagttataacacaagcatgacgcagaatgggatgagacaaacattcccaaagagagtttagttagtaacaacttcaagtccctgtgtctgcctacacttcaaaaagggatggtgcacgctcgcccatcattgaaaacttccgtgaaaaaaggcaccgtgaggacacgttgtacgggtatatacaaactgaaaactagaacaaaattacacatttttccttctgcagannnnnnnnnnnnnnnnnnnnnnnnnaatacacactttgtaaattgtaaaccttcacttgcaaaaaaatacaaatacactgaggcattttagacaaaatattttcttacttatacagatgcaatactttaaaatattctcttaagtgctctttctcaataaagattctcagatccgtgtctgcctgcagatacaaaatcgagcctttaacgcagttttannnnnnnnnnnnnnnnnnnnnnnnnnnnnnnnnnnnnnnnnnnnnnnnnnnnnnnnnnnnnnnnnnnnacaactctgccatatattccttcacctttggttaaaaaaattaaagccctctctttgacaacatactgaagtcttgtcttttaaaagaatgcacatttacatacaaaagaaacatctgttcccc

SEQ ID NO: 352149 - DNA, 1630 bp, Homo Sapiens
  misc_feature (665)..(665): n is a, c, g, or t
  misc_feature (667)..(667): n is a, c, g, or t
  misc_feature (672)..(672): n is a, c, g, or t
  misc_feature (675)..(675): n is a, c, g, or t
  misc_feature (681)..(682): n is a, c, g, or t
  misc_feature (688)..(688): n is a, c, g, or t
  misc_feature (701)..(701): n is a, c, g, or t
  misc_feature (704)..(704): n is a, c, g, or t
  misc_feature (769)..(769): n is a, c, g, or t
  misc_feature (985)..(986): n is a, c, g, or t
  misc_feature (988)..(988): n is a, c, g, or t
  misc_feature (1006)..(1006): n is a, c, g, or t
  misc_feature (1021)..(1033): n is a, c, g, or t
  misc_feature (1035)..(1094): n is a, c, g, or t
  misc_feature (1282)..(1306): n is a, c, g, or t
ctggtaccggtccggattttccgaatcggcggctctcagtcccctcttcatgctgagatgtgcctccacaccgctggccccacgttccctgaggagatgggagagacccagtctgagtactcatattctagctgtggtgagaaaccctatcgttgcaacatctgtggggcccagttcaaccggccagccaacctgaaaacccacactcgaattcactctggagagaagccctacaaatgcgaaacctgcggagccagatttgtacaggtggcccacctccgtgcccatgtgcttatccacactggtgagaagccctatccctgtgaaatctgtggcacccgtttccggcaccttcagactctgaagagccacctgcgaatccacacaggagagaaaccttaccattgtgagaagtgtaacctgcatttccgtcacaaaagccagctgcgacttcacttgcgccagaagcatggcgccatcaccaacaccaaggtgcaataccgcgtgtcagccactgacctgcctccggagctccccaaagcctgctgaagcatggagtgttgatgctttcgtctccagccccttctcagaatctacccaaaggatactgtaacactttacaatgttcatcccatgatgtagtgcctctttcatccactagtgcnantcatngcngggggnngggggnggtgggggtcggnccnggggccctgggcgccgcagcagctccccctcccccactgccataaaacattaagaaaatcatatngcttcttctcctatgtgtaaggtgaaccatgtcagcaaaaagcaaaatcattttatatgtcaaagcaggagagtatgcaaaagttctgacttgactttagctctgcaaaatgaggaatgtatatgttttgtgggaacagatgtttcttttgtatgtaaatgtgcattcttttaaaagacaagacttcagtatgttgtcaaagagagggctttaatnntnttaaccaaaggtgaaggnatatatggccgcgcnnnnnnnnnnnnncnnnnnnnnnnnnnnnnnnnnnnnnnnnnnnnnnnnnnnnnnnnnnnnnnnnnnnnnnnnnctgcgttaaaggctcgattttgtatctgcaggcagacacggatctgagaatctttattgagaaagagcacttaagagaatattttaagtattgcatctgtataagtaagaaaatattttgtctaaaatgcctcagtgtatttgtatttttttgcaagtgaaggtttacaatttacaaagtgtgtattnnnnnnnnnnnnnnnnnnnnnnnnntctgcagaaggaaaaatgtgtaattttgttctagttttcagtttgtatatacccgtacaacgtgtcctcacggtgccttttttcacggaagttttcaatgatgggcgagcgtgcaccatccctttttgaagtgtaggcagacacagggacttgaagttgttactaactaaactctctttgggaatgtttgtctcatcccattctgcgtcatgcttgtgttataactactccggagacagggtttggctgtgtctaaactgcattaccgcgttgtaaaatatagctgtacaaatataagaataaaatgttgaaaagtcaaaaaaa

SEQ ID NO: 352150 - DNA, 2368 bp, Homo Sapiens
  misc_feature (1947)..(1947): n is a, c, g, or t
  misc_feature (2170)..(2170): n is a, c, g, or t
  misc_feature (2315)..(2315): n is a, c, g, or t
ttatgcacagggagactggggttcttagaagtggtgatgcaagaagtttctaggaaaggccggacaccaggttttgagcaaaattttggactgtgaagcaaggcattggtgaagacaaaatggcctcgccggctgacagctgtatccagttcacccgccatgccagtgatgttcttctcaaccttaatcgtctccggagtagagacatcttgactgatgttgtcattgttgtgagccgtgagcagtttagagcccataaaacggtcctcatggcctgcagtggcctgttctatagcatctttacagaccagttgaaatgcaaccttagtgtgatcaatctagatcctgagatcaaccctgagggattctgcatcctcctggacttcatgtacacatctcggctcaatttgcgggagggcaacatcatggctgtgatggccacggctatgtacctgcagatggagcatgttgtggacacttgccggaagtttattaaggccagtgaagcagagatggtttctgccatcaagcctcctcgtgaagagttcctcaacagccggatgctgatgccccaagacatcatggcctatcggggtcgtgaggtggtggagaacaacctgccactgaggagcgcccctgggtgtgagagcagagcctttgcccccagcctgtacagtggcctgtccacaccgccagcctcttattccatgtacagccacctccctgtcagcagcctcctcttctccgatgaggagtttcgggatgtccggatgcctgtggccaaccccttccccaaggagcgggcactcccatgtgatagtgccaggccagtccctggtgagtacagccggccgactttggaggtgtcccccaatgtgtgccacagcaatatctattcacccaaggaaacaatcccagaagaggcacgaagtgatatgcactacagtgtggctgagggcctcaaacctgctgccccctcagcccgaaatgccccctacttcccttgtgacaaggccagcaaagaagaagagagaccctcctcggaagatgagattgccctgcatttcgagccccccaatgcacccctgaaccggaagggtctggttagtccacagagcccccagaaatctgactgccagcccaactcgcccacagagtcctgcagcagtaagaatgcctgcatcctccaggcttctggctcccctccagccaagagccccactgaccccaaagcctgcaactggaagaaatacaagttcatcgtgctcaacagcctcaaccagaatgccaaaccagaggggcctgagcaggctgagctgggccgcctttccccacgagcctacacggccccacctgcctgccagccacccatggagcctgagaaccttgacctccagtccccaaccaagctgagtgccagcggggaggactccaccatcccacaagccagccggctcaataacatcgttaacaggtccatgacgggctctccccgcagcagcagcgagagccactcaccactctacatgcaccccccgaagtgcacgtcctgcggctctcagtccccacagcatgcagagatgtgcctccacaccactggccccacgttccctgaggagatgggagagacccagtctgagtactcagattctagctgtgagaacggggccttcttctgcaatgagtgtgactgccgcttctctgaggaggcctcactcaagaggcacacgctgcagacccacagtgacaaaccctacaagtgtgaccgctgccaggcctccttccgctacaagggcaacctcgccagccacaagaccgtccataccggtgagaaaccctatcgttgcaacatctgtggggcccagttcaaccggccagccaacctgaaaacccacactcgaattcactctggagagaagccctacaaatgcgaaacctgcggccagnatttgtacaggtggcccacctccgtgcccatgtgcttatccacactggtgagaagccctatccctgtgaaatctgtggcacccgtttccggcaccttcagactctgaagagccacctgcgaatccacacaggagagaaaccttaccattgtgagaagtgtaacctgcatttccgtcacaaaagccagctgcgactttacttgcgccagaagcatggccacatncaccaacaccaaggtgcaataccgcgtgtcagccactgacctgcctccggagctccccaaagcctgctgaagcatgggagtgttgatgctttcgtctccagccccttcttcagaatctacccaaaggattactgtgaacactttnacaatgtttcattcccatggatgtagtggcctcttttcattccattagtggca

SEQ ID NO: 352151 - DNA, 175 bp, Homo Sapiens
cctaacaggctttggagccagtggggctcttggctggaggggagccagaagcactggaggatgcaggcattcttactgctgcaggactctgtgggcgagttgggctgacagtcagatttctgggggctctgtggactaacagaaatctgactgcacaggggatcctcaagagtca

SEQ ID NO: 352152 - DNA, 1738 bp, Homo Sapiens
aagtagcgaggcctgggtggcgaattcggcacgaggatcaggaagtcggcgtgtcgagtggctcttcctggctgctgaggcgggttaaggtctgagggtcttgtggggccacggcgctgatcaccaggtgtttggcttggtcggttcttatttctcgcctggcaatggcgacgtacacctgcataacttgccgggtggcgttccgcgacgcggacatgcagcgggcccactataagacggactggcaccgctacaacctgcggcggaaggtggccagcatggccccagtgaccgccgagggcttccaggagcgagtgcgggcgcagcgggccgtcgcggaggaggagagcaagggctcggccacctactgcaccgtttgcagtaagaagtttgcctctttcaacgcctacgagaaccacctcaagtcccggcgtcacgttgagctggagaagaaggccgtgcaggcagtgaatcggaaagtggagatgatgaatgaaaagaacttggagaaaggactgggcgtggacagtgtggacaaggatgccatgaacgcggccatccagcaggccatcaaggcccagccgtccatgtctcccaagaaggcgcccccagcgcctgcaaaggaggccaggaatgtcgtggccgtgggtactggtggccgtgggacccacgaccgagacccgagtgagaaaccaccccggctccagtggtttgaacagcaggcgaagaagttggcaaagcagcaggaggaggacagcgaggaggaggaagaggacctggatggagacgattgggaagatattgattctgatgaagaattggaatgtgaggatactgaagcaatggacgatgtggtggagcaggatgcagaggaggaagaggctgaggaaggcccaccccttggtgccatccctatcacggactgcttattttgttcccatcattccagctcgctgatgaagaatgtggctcacatgaccaaagaccacagtttctttattcctgatatagaatatctttcagatattaagggactgattaaatacttgggagagaaagttggtgttggcaagatttgcttgtggtgcaacgagaaagggaagtccttctactccacagaagctgtacaggcacatatgaatgacaaaagccactgtaagctcttcacagatggcgatgctgctttggaatttgcagacttctatgattttaggagtagctatccagatcacaaggaaggggaggaccccaataaggctgaggagttgccctcagaaaagaacttggaatatgatgatgaaaccatggaattgattctgccttctggtgccagagtgggtcatcgctccttgatgagatactacaaacagcgatttggcttgtcaagagctgtggcagttgccaaaaatcggaaggccgtgggccgagtacttcagcagtacagagccctgggatggactggcagcacaggagcggctcttatgcgagagcgagacatgcagtatgtccaaaggatgaaatcaaaatggatgctgaagacaggaatgaagaacaatgccaccaagcagatgcactttcgggtccaagtgagattctgagagtctgctgggattgagcaatcatctcctgcccaagtttcctccttgccctgaggaccagtgaaagacagatcataggagagacccttttgctgccacttcattcgttctgacctaataataaaagttagaaccataaa

SEQ ID NO: 352153 - DNA, 1004 bp, Homo Sapiens
  misc_feature (62)..(62): n is a, c, g, or t
  misc_feature (752)..(752): n is a, c, g, or t
  misc_feature (917)..(953): n is a, c, g, or t
cattactgccagatagggaacccttgaactcacatttttctccaaatacttcccaaagcttnaacctgcggtccatgcctccagtggccagtaaccgggaacctggactgaactgcacagcgttgacttccccatcatgtgcatcgaagacacacaaggcagtagctggtaccctcacttctttaccagaaccaggatgagcatccacattgtcctgggggactgggaaggaagagacagagcgtctcctggcagcatcagaagaagaatgatgtcccaaaaggggagactcggacagaccgaagatattagtgatagaatccagaaggcctccagcaggctgcgagagtcgcttagtggctgctctgctgatggctcgcacaggagaggtctcttctgtgtgatcagaagtttcatccacaatgacctcaatgtcatcatcctgttcgactggtagaggttcctttgctgcttctgcaagctctttctgcagccgggcttgccgcctccttatctcgtgcctgtttggtatgtcatgcttttcagcctgtagtttctgggccaacactgaatgaagatctgacttttccagcaatttgttatactgcaggatgatctcctcgaacgcctgtctctgcagccggtcccggcgcctcagttgctccgagatgtggcgcttccagcgggggaagtcagcggcgcggaggcccgacgacatgtcacttgctgccccggcacctcagcgccaccantgcgagcgagggctgacggccgcagcctgcagcatgaagcaaccagcagaagcgggaatgccggcaatcccggagctcacctccacacactggcagtccccgaggccatccgggacggtctcccccgctctcgacgaattcgagctcggccgatttggcctgatnnnnnnnnnnnnnnnnnnnnnnnnnnnnnnnnnnnnncgccgccaccgcgtagagctccagttcgccctatagtgagtctatacatcg

SEQ ID NO: 352154 - DNA, 989 bp, Homo Sapiens
gggcgggtcttccggccctctcgaaaatcatttccggcatgagccggaagaccgtcccggatggcctcggggacggccagtgtgtggaggtgagctccgggattgccggcattcccgcttctgctggttgcttcatgctgcaggctgcggccgtcagccctcgctcgcattggtggcgctgaggtgccggggcagcaagtgacatgtcgtcgggcctccgcgccgctgacttcccccgctggaagcgccacatctcggagcaactgaggcgccgggaccggctgcagagacaggcgttcgaggagatcatcctgcagtataacaaattgctggaaaagtcagatcttcattcagtgttggcccagaaactacaggctgaaaagcatgacgtaccaaacaggcacgagataagtcccggacatgatggcacatggaatgacaatcagctacaagaaatggcccaactgaggattaagcaccaagaggaactgactgaattacacaagaaacgtggggagttagctcaactggtgattgacctgaataaccaaatgcagcggaaggacagggagatgcagatgaatgaagcaaaaattgcagaatgtttgcagactatctctgacctggagacggagtgcctagacctgcgcactaagctttgtgaccttgaaagagccaaccagaccctgaaggatgaatatgatgccctgcagatcacttttactgccttggagggaaaactgaggaaaactacggaagagaaccaggagctggtcaccagatggatggctgagaaagcccaggaagccaaccggcttaatgccagagaatgaaaaagactccaggaggcgggaatgcctggttgcagaaagagctcgcaagagccaccaaaggaccctctaccagtcgaacaggatgatgccattgggggcattgtggaggaaccttttgacacaacaaactgctggagcgcttctggaatctataat

SEQ ID NO: 352155 - DNA, 624 bp, Homo Sapiens
  misc_feature (90)..(90): n is a, c, g, or t
  misc_feature (286)..(286): n is a, c, g, or t
  misc_feature (583)..(583): n is a, c, g, or t
ctggacactaggaagctgagtcgggatggaactgggtccccttccaaaatcagccctccctccactcccagcagccctgatgacattttntttaaccttggagacccacagaacggcaggaagaagagaaagatacccaagctggtgttgcgaatcaacgccatttatgaggtccggagaggaaagaaacgggtgaagaggctgtcccagtcaatggagagcaactcaggaaaagtgacagatgagaacagtgagtctgacagtgacacagaggagaagctgaaantcacagccagcgcctggtcaacgtgaagtcccggctgaagcaggcgcctcggtacccatcacttgcccgggaactcatcgagtaccaggagaggcagctcttcgagtactttgtggttgtgtctttgcacaagaagcaggccggggctgcctacgtgccagaacttcacccaacagttccctcttgaagttgggaaaggtcttttcaagtttcattgaggagaagctgagggaccaactgaaggccatttccccagttctgtttttccccgattgccaagggtttgggtttcttttnccagcatttcaaccagttgaaacattctcgttttgtttttt

SEQ ID NO: 352156 - DNA, 1801 bp, Homo Sapiens
  misc_feature (1038)..(1084): n is a, c, g, or t
  misc_feature (1338)..(1338): n is a, c, g, or t
gcgcccagcccaggcgtcgcggggtggggcggctctggcggctgcggggcgcagggcgcacggccaagcggggtccccggaagcacagctggggtgtctccacctacgactggccgcgcgccttttctctcccgcgccagggaaggagcggctgcggcccccgccgggcggaggcacggggggcgtacgaggggcggaggggaccgcgtcgcggaggagatggcgcggcacgtgcggtgacggcacccgagccctgagggtcccagccccgcgctccgcgtccccgggacagcatggagcgcccggagcccgagctgatccggcagagctggcgggcagtgagccgcagcccgctggagcacggcaccgtcctgtttgccaggctgtttgccctggagcctgacctgctgcccctcttccagtacaactgccgccagttctccagcccagaggactgtctctcctcgcctgagttcctggaccacatcaggaaggtgatgctcgtgattgatgctgcagtgaccaatgtggaagacctgtcctcactggaggagtaccttgccagcctgggcaggaagcaccgggcagtgggtgtgaagctcagctccttctcgacagtgggtgagtctctgctctacatgctggagaagtgtctgggccctgccttcacaccagccacacgggctgcctggagccaactctacggggccgtagtgcaggccatgagtcgaggctgggatggcgagtaagaggcgaccccgcccggcagcccccatccatctgtgtctgtctgttggcctgtatctgttgtagcccaggctccccaagcttccctgcatcttggtccttgtccccttggccacactggagaggtgatggggcagggctgggtctcagtatcctagagtccagctgcagaaggagtggcttttcctccaggaaggggcttctgggtgtcccctcatccccagtagcctctttcttgcgtttctttttaccttttttggcactccctctgaccccgcgatgagtgttttnnnnnnnnnnnnnnnnnnnnnnnnnnnnnnnnnnnnnnnnnnnnnnntggggctcttctgtctgtcctgcttcttcaggtgagtgcaggccaaggcgggggtgagatggctgagcttccagcgccttctgtcctgcctgcccagtcccttcactgctttcctgccccaagatggcttgcttttcacaaataaagagaaagagcagctttagccttcttggtggaatcccaggcagtgggagcagaatcagaactgccagggaagggaagggggacctgggtctcaatgggtctcatttgantctcgcgggctgtgcagatgccctgacagagtcggtttcctttggcggcattccctttccctcattcagcacttctgctgggaactccctgactattccgctgctgcaggaacccagctagctggccaggtggggaggggctggggaccggccaggaaggaggggtgacttcatcccagagagacccgagttcccccagcccttcatcaccaacccgctcctgcaggagtgagtcttacctcccctggccctcctttctggctcagcctgcagcgactgtgaggccacagctcctcagattcactgcccgctgtgtgccagtactcaggcagctggagagaagagaaggcagcagcagaggcccccgccctcaccccagccatctgcacttgtaccatttgctctgtgctgactgtggtcctataaattcatgagaaataaactggttctgtgtgcctctctg

SEQ ID NO: 352157 - DNA, 880 bp, Homo Sapiens
  misc_feature (235)..(272): n is a, c, g, or t
ttataagggaagacgtggatgaggatgagaatttggggtagaagagcaggaatgggaggataccggagggagggtaagcaagggtagggaatggggagggagagctggatagtagggattgagtcggtgtagtgtggaataaagaattagtgatgggagtaatggtgaaagggggttcgagcgaattagaaagtagtggggagaaaataaatatggaggagaaagtacgagtgannnnnnnnnnnnnnnnnnnnnnnnnnnnnnnnnnnnnnatgattagtggaaagggttgtagcgggaaggaggatgcagtgcgacatggtgtggagagagtaaggcaaaaaggagaagcggggaaccggtgagaacaggacgacagttcagtcacctcacctttgccagcctgggggtcagcccctccttctacccgggaggggtgggagaagatggcacagactttgagggaacacacgtccccacagcagcttgtggaaggaaatgcccagctctggggaggaggggcagagggtacagtgtggagggaggcggagccttgtgccggccctccagcctcagcagccccggagcagcccccagccccacccactgcagggctgcgcagcacccccgccccctgccccaccgcccaggcctccagcccaggggcctgaggtcaggggaaggccacctctggtggtttgcttggaggggaaggagggaggagaggggagaagcccacagtgggcctggcggagggcctgacgggagctccaccactcttgcctgagagtgttccagccctgagccaccctcccgggaaaccccacagatccagtctcgactgtcccaatggggcagggaggaaaggtggccgctggga

SEQ ID NO: 352158 - DNA, 1923 bp, Homo Sapiens
tcgggatatcgtcgaccacgcgtctgctctgatctaggaccgctgttcctgtcctggctggtcaaggatcccctccgagcagtgagcagctgctgtggcactgccagatcacggcacagcagatcaacaagctggatggagctgtggaaggaaaacccttctgccacgctggaggacctggagaagccgggggtggacgcaggagccgacagcatgtccctcctgcgtgtacgaaggacgcctaccagtaccagaacatattcgggcccctggtcaagctggatggccgactactgacaatgaagctgaaggagtcccagactcaagataacatcactgtcaggtggggacctgggccttaacaagaagagaatcgcctacttcactttgcccaagactgactctgacatgcggctcatgcagggggatgagatatgcctgcggtacaaaaggggaccttgcgcccctgtggaaagggatcggccacgtcatcaacggtccctgataattatggcgatgagatcgccattgagctgcggagcaccgtgcgtgcacctgtgggaggtgactcacaacttccaggtggattctgtgtgcgaagtcgacctcctttgacaggatgcagagcgcattgaaacacgtctgccgtggatgagacctcgagtgctctggcgaacatctaacacaagctgttgggccacgaggtggaggacgtaatcatcaagtgccagctgcccaagcgcttcacggcgcagggcctccccgacctcaaccactcccaggtttatgccgtgaagactgtgctgcaaagaccactgagcctgatccagggcccgccaggcacggggaagacggtgacgtcggccaccatcgtctaccacctggcccggcaaggcaacgggccggtgcatggtgtgtgctccgagcaacatcgccgtggaccagctaacggagaagatccaccagacggggctaaaggtcgtgcgcctctgcgccaagagccgtgaggacatcgactccccggtgtcttttctggccctgcacaaccagatcaggaacatggacagcaatgcctgagctgcagaagctgcagcagctgaaagacgagactggggagctgtcgtctgccgacgagaagcggtaccgggccttgaagcgcaccgcagagagagagctgctgatgaacgcagatgtcatctgctgcacatgtgtgggcgccggtgacccgaggctggccaagatgcagttccgctccattttaatcgacgaaagcacccaggccaccgagccggagtgcatggttcccgtggtcctcggggccaagcagctgatccttgtaggcgaccactgccagctgggcccagtggtgatgtgcaagaaggcggccaaggccgggctgtcacagtcgctcttcgagcgcctggtggtgctgggcatccggcccatccgcctgcaggtccagtaccggatgcaccctgcactcagcgccttcccatccaacatcttctacgagggctccctccagaatggtgtcactgcagcggatcgtgtgaagaagggatttgacttccagtggccccaacccgataaaccgatgttcttctacgtgacccagggccaaagaggagattgccagcttcgggcacctcctacctgaaacaggaccgaggctgcgaacgtgggagaagatcaccaccaaagtttgctgtaggggcaggcgcccaagcccggaccaagattgggcatccatcacgccccctaacgaaagggccaagcgccttccttacccttggtggcaagatacattgtccaattttcaaggggggtttccccctggcacaccccaaggttttctttacaccaagaggaggtgggggggaaaattccccccacaaggggtgtggaaaacccccctttttttta

SEQ ID NO: 352159 - DNA, 407 bp, Homo Sapiens
  misc_feature (172)..(172): n is a, c, g, or t
gaacagtaatctcagtcaatagtggcttaaaccattagaaccaaaaccaggcagagatcagagaaggttcaacgctcaacaatgttatcaagaacccagcttctttttgccttttcttttcaccatcctctgcatgttggccatctgaccctgtgcttggaaacctcatggntcacaaaatggcttgcccctgtgctggacatcatattttttttcaaagaaggtagaattgggaaaggagcagtcataaaaggttttttttcagaagagtctgttggttttggttagaaaaggaagtcccctggcagatttaccattgcttctcattgatcagacctgggtgtcatgcccatcccagcatgagtcctgctgtagggctggaaggaagggcctacgagcaccaaggg

SEQ ID NO: 352160 - DNA, 2034 bp, Homo Sapiens
  misc_feature (48)..(84): n is a, c, g, or t
ggaacgtgggttatctataggggactggagttcaccgcggggcggcgnnnnnnnnnnnnnnnnnnnnnnnnnnnnnnnnnnnnnatcaggccaaatcggccgagctcgaattcgtcgagagcggggctgtgccgcctgtgcggccgccgggagccaagtttgcgcggaccccgtcccgagcccgccgcggccatggacgcgcccgcccggctgctggccccgctcctgctcctctgcgcgcagcagctccgcggcaccagagcgatgaatgacatcggcgactacgtgggctccaacctggagatctcctggctccccaacctggacgggctgatagccggctacgcccgcaacttccggcctggcatcggaggcccccccgtgaatgtggcccttgccctggaggtggccagcatcgaccacatctcagaggccaacatggagtacaccatgacggtgttcctgcaccagagctggcgggacagcaggctctcctacaaccacaccaacgagaccctgggctctggacagccgcttcgtggacaagctgtggctgcccgacaccttcatcgtgaacgccaagtcggcctggttccacgacgtgacggtggagaacaagctcatccggctgcagcccgacggcgtgatcctgtacagcatccgaatcacctccactgtggcctgcgacatggacctggccaaataccccatggacgagcaggagtgcatgctggacctggagagctacggttactcatcggaggacatcgtctactactggtcggagagccaggagcacatccacgggctggacaagctgcagctggcgcagttcaccatcaccagctaccgcttcaccacggagctgatgaacttcaagtccgctggccagttcccacggctcagcctgcacttccacctgcggaggaaccgcggcgtgtacatcatccaatcctacatgccctccgtcctgctggtcgccatgtcctgggtctccttctggatcagccaggcggcggtgcccgccagggtgtctctaggcatcaccacggtgctgacgatgaccacgctcatggtcagtgcccgctcctccctgccacgggcatcagccatcaaggcactggacgtctacttctggatctgctatgtcttcgtgtttgccgccctggtggagtacgcctttgctcatttcaacgccgatctacaggaagaagctagaaggccaaggtcaaggtctccaggccgagggcagagatggacgtgaggaacgccatttgtcctcttgctccctctctgcgtgccggcgtgcacgcaggagcgtggccatctcccgccggcagcgccgcgatcccggggaacctgatgggctcctacaggtcggtgggggtggagacaggggagacgaagaaggagggggcagcccgctcaggaggccaggggggcatccgtgcccggctcaggcccatcgacgcagacaccattgacatttacgcccgcgctgtgttccctgcggcgtttgcggccgtcaatgtcatctactgggcggcatacgccatgtgagcacaggactcaggccaccctcgcttgtcctggcgcccggcggcagctgcccagaaacttcctgggagaaagagccctcgggctgccttcccctctgcgtgtttcgaagtgggatgacagtcggccacggaaaacaagaggaagcctcggcctccctgagctctgaccccagcctcacccgaaaggccagcctggggctctccggcaggcagcccgagacctgcacagatgaaggagcagaggttctgaccgagaggctgagccaggccggggtctgggcccttcagggagccgcggatttttatgttcagaaagtgatcctggtttctaggtctttgctctgcaggatcgggatcagagcgtgggaggaggtgggggtggacgtccatccggtgaacagtgaaggcgtttgtgaggtctttctggtcccagcatgaaataaagccttggcctgggggccgcttcattctcaaa

SEQ ID NO: 352161 - DNA, 828 bp, Homo Sapiens
ggcagctaccaataccacccttccacacatgttgatgtctcaacgtgttattgcaccaaacccagcccagctacagggtcaagcggggcccgcctaagcctggccttgtacgcaccacaacacccaacatgaatcccgccatcaattatcaaccgcagtcaagttcttctgttccatgtcagcgtacaacatcctctgccatctatatgaaccttgcttctcatatccagccagggacggtgaacagagtgtcctcgccacttcctagccccagcgccatgactgatgctgccaactcacaggctgcagccaaattggctcttcgcaaacagctggaaaagacactcctggagatcccaccccctaaacctcctgctcccttacttcatttcttgcctagtgcagccaatagcgagttcatctacatggtaggcttggaagaagtcgtacagagtgtcattgacagccaaggcaaaagctgtgcctcacttctgcgggttgaaccctttgtatgtgcccagtgccgcacagatttcacccctcactggaagcaagaaaagaatggtaagattctatgtgagcagtgtatgaccctccaaccagaaaaaagctctaaaagctgaacacaccaacccggctgaaaaatgcatttgtggaaagcccctacgcaggaaacaggaaatttaaacaccaattacagccagcaggcaacccctcctcccccactaacggcttccagctggtgtcccggggtctcttaaaaccaagaaaaccccttcgttaagaacattcataccgccttccggacaggggttcccaaaggccccc

SEQ ID NO: 352162 - DNA, 2249 bp, Homo Sapiens
  misc_feature (30)..(33): n is a, c, g, or t
  misc_feature (58)..(59): n is a, c, g, or t
  misc_feature (63)..(63): n is a, c, g, or t
  misc_feature (65)..(66): n is a, c, g, or t
  misc_feature (68)..(69): n is a, c, g, or t
  misc_feature (71)..(74): n is a, c, g, or t
  misc_feature (76)..(77): n is a, c, g, or t
  misc_feature (82)..(82): n is a, c, g, or t
  misc_feature (85)..(85): n is a, c, g, or t
  misc_feature (89)..(89): n is a, c, g, or t
  misc_feature (94)..(95): n is a, c, g, or t
  misc_feature (98)..(98): n is a, c, g, or t
  misc_feature (104)..(105): n is a, c, g, or t
  misc_feature (110)..(111): n is a, c, g, or t
  misc_feature (117)..(117): n is a, c, g, or t
  misc_feature (124)..(124): n is a, c, g, or t
  misc_feature (131)..(131): n is a, c, g, or t
  misc_feature (133)..(189): n is a, c, g, or t
gaccgaggtacagaacgagagacaacctcnnnncccccagcagctggccagctttgcnncccnanncnnannnncnnaacanacnacgncccanncanccccannccctnnccaatnaaaggancggaaanannnnnnnnnnnnnnnnnnnnnnnnnnnnnnnnnnnnnnnnnnnnnnnnnnnnnnnnncggagatctctggagcagacctcaaggtgacttctatttctatctggttctcgtctgggggggccctggccgggcagccccccaacacttctcctgccctgaaacacggctctagccaacctgctccgctgcttcacctgcgaccgtctctgcgggggctgcacggcgccagcccctccagcccaccagggcattgtcctccagcccgtcatgcccagctgtgaccccggtccgggccctgcctgcctccccaccaagactttccgcagctatctgccccgctgtcaccgcacttacagctgtgtccactgccgtgcacacctggccaaacacgatgagcttatttccaagtccttccaagggagccatggccgagcctacctgtttaactccgtgtgagtctacctctttccttgtgcgtgtgcttgtgcttgtgtgtgagtgagtaattttcctctgtggagaaaggggggaatccatcaggtgatcttgtgccttcagtctttgcctccccttttgcaaagagggtctcaatctgaagttctcacatggggagccgggggagaattgaaatcataacggtggaaaaagaaggcccaggctctagtcttaaaggggtggattatcaaaggcaggggctgtccagttctctccagatggaagttcccttgggctctctggggactggactgacagtgcaaccccactgggtgctgggtccttcctgtttcctgagacagggtcaacgtgggttgcgggccagctgaacagcgcctcttgctcacggggctccactcggtagctgacattttctgtgagagctgcaaaaccacactgggctggaaatatgtaagtacctgaggaagagggtcaccctctaaagtggcagtccccatggcccttcaagcaccagtgaccatgtcaggtccttccttgcatggtccaaagaggaaagaaagaactagtcactgggttgggctaggtggatgacccttggggtgggggccatacaggtgacagtggggcctggaaggaaactgctttgtcctacaatcactgctttctccttcaccaggagcaagcttttgagacgagccagaagtacaaggaagggaaatacatcattgaaatgtcacacatggtgaaggacaacggctgggactgaggggatcaggcagggtgtgcccttcctccgcatgcccctccctcccccacggccctgccaagcagtctataccagcatgagtactgccccacccctgggggaaacctggctccaaccaacccctcccgtgcctccaccatatccactaccaggcaccctttagaacaggggtctgggggtaccccaggggtgttaaggctcaggagtgggcagcagtcagggagagacagaactgggggaaagggatggttgtgggtctttctgttcccaagatcctgaacatggaagcgatggcagggcatagactcaggcagagaggattgtgggaggaatccgtttttgctccacctctttttgagtgaacagaggacaaaccttgggtcacagggcaagtagatcatggaccacagaacagcagatgagaaaagacttgggtttggagtgaaattctggtctcagacaccaggagaccagagtctctgaggatgaagtttcctacccctatttgtagggaaaaggacttgagtgcagggaaaactcaaatcccaggccctgggaaatagtaaaataatcaaagggttttccatttcactccacttgttagtttatcttggcactgaagaggcactttcgagtatctaacttttgccattgggtggggtggggacagctgctcgcggaacagcccctagtcggctgcttccagagtaagcagtctttatgggctttctctgaggcccagtcactgctcctgggacccagtcccctggaggggaggtggaaaatcagtgctacggggccagtctttcccgtggctgccaccagcgaatgaaacttttgtatgatacataaagtgcttgagtctatttttaataaaaagggaaaaagcaacttg

SEQ ID NO: 352163 - DNA, 963 bp, Homo Sapiens
tagacggagatctctggagcagacctcaaggtgacttctatttctatctggttctcgtctgggggggccctggccgggcagccccccaacacttctcctgccctgaaacacggctctagccaacctgctccgctgcttcacctgcgaccgtctctgcgggggctgcacggcgccagcccctccagcccaccagggcattgtcctccagcccgtcatgcccagctgtgaccccggtccgggccctgcctgcctccccaccaagactttccgcagctatctgccccgctgtcaccgcacttacagctgtgtccactgccgtgcacacctggccaaacacgatgagcttatttccaagtccttccaagggagccatggccgagcctacctgtttaactccgtggtcaacgtgggttgcgggccagctgaacagcgcctcttgctcacggggctccactcggtagctgacattttctgtgagagctgcaaaaccacactgggctggaaatatgagcaagcttttgagacgagccagaagtacaaggaagggaaatacatcattgaaatgtcacacatggtgaaggacaacggctgggactgaggggctcaggcagggtgtgcccttcctccggatgcccctcacctccccaaggccctgccaagcagtctataccagcatgagtactgccccacccctgggggaaacctggctccaagcaaaccctacccctgcctccaccatatccactaccaggcaccctttagaacagggtctgggggtacccaggggtgttaaggctcaggagtgggcagcagtcagggagaagacagaactgggggacagggatggtagtgaggtctttctgttcccaagatcctgaacatggaagcgatggcagggcatagacctcaggcagagaggattgtgggaggaatccgttattgctccacctctttttgagtgaa

SEQ ID NO: 352164 - DNA, 1096 bp, Homo Sapiens; identical to SEQ ID NO: 98726
  misc_feature (90)..(131): n is a, c, g, or t
  misc_feature (146)..(202): n is a, c, g, or t
  misc_feature (892)..(892): n is a, c, g, or t

SEQ ID NO: 352165 - DNA, 700 bp, Homo Sapiens
ctggtaccggtccggaattcccgggatcccgtgggcttctctctgtggaaaatggtggaggctgcttctgccccaggagggagaaacaccgactccctggctttggcgccagaagcctggatcggctgccaggtgacttctatttctatctggttctcgtctgggggggccctggcgggcagccccccaacacttctcctgccctgaaacacggctctagccaacctgctccgctgcttcacctgcgaccgtctctgcgggggctgcacggcgccaccctcccagcccaccagggatttgtcctccagcccgtcatgcccagctgtgaccccggtccgggccctgcctgcctccccaccaagactttccgcagctatctgccccgctgtcaccgcactttacagctgtgtccactggccgtgcacacctggccaaacacgatggagcttatttccaagtccttccaagggagccatggccgagcctacctgtttaactccgtgtgagtctacctctttccttgtgcgtgtgcttgtgcttgtgtgtgagtgagtaattttcctctgtggagaaaggggggaatccctcaagtgatcttgtgccttcagtctttgcctccccttttgcaaagaagggctcaatcctgaagttccccccactggggaaccccgggggaaaaattgaaaaccctaacgggggg

SEQ ID NO: 352166 - DNA, 990 bp, Homo Sapiens
  misc_feature (15)..(15): n is a, c, g, or t
  misc_feature (757)..(758): n is a, c, g, or t
  misc_feature (760)..(761): n is a, c, g, or t
  misc_feature (764)..(764): n is a, c, g, or t
  misc_feature (918)..(918): n is a, c, g, or t
  misc_feature (966)..(966): n is a, c, g, or t
  misc_feature (974)..(974): n is a, c, g, or t
  misc_feature (983)..(983): n is a, c, g, or t
  misc_feature (985)..(985): n is a, c, g, or t
cctggcctggctgangggaggcggcgggcgggcgcgatggcggaggccgggccacaggcgccgccgcccccgggcactccaagccggcacgaaaagagcctgggactgctcaccaccaagttcgtgtcccttctgcaggaggccaaggacggcgtgcttgacctcaagctggtgcggcctgggctaaggggagacaagggaggctggtggaccaggcctgggccggtagcgggaaccccgggggcggcccagctgggtcctccgagagccggccgccatcgtgtgctttctcacaggagagaagccgggggatgtttcattcattcggccgaggccatcgagctacagctatgggccaggctcgggctgcaggtgttcgtcatcgtggcccttcctggctggcgaggagaagagctgcctatgggacagagctgcggtcctgagctgcagtagcgcctgggaggcactacagggttggaatccagattactcccttcccagaccacgtctcagggtggctgggggtacaccccagagtggggctgagcattctccattctctctgccaggcagctgacaccctagctgtacgccagaagcggcggatttacgacattaccaatgttttggaacggtatcgggctaatcgagaacaacagtccaagaacagcatccagtgcgaagttgaagtggggcatagtgggaagggtagtagagtctcccacccgagaaggtgtcggggcgtggggtggagggnnannaanaaggcaggggccatgggacccagagttctcagcagtccctctcagccccactccctgggctcaggggtgtgggggcctggctgcaatacccgggagattgctgacaaactgattgagctcaaggcagagatcgaggagctgcagcagcgggagnaagaaactagaccagcacaaggtgtgggtgcacagagcatccggaacntcacagangacgtgcananagctg

SEQ ID NO: 352167 - DNA, 1200 bp, Homo Sapiens
  misc_feature (976)..(1032): n is a, c, g, or t
  misc_feature (1104)..(1104): n is a, c, g, or t
  misc_feature (1126)..(1126): n is a, c, g, or t
tggtaccggtccggaattcccgggatcctggctgaggggaggcggcgggcgggcgcgatggcggaggccgggccacaggcgccgccgcccccgggcactccaagccggcacgaaaagagcctgggactgctcaccaccaagttcgtgtcccttctgcaggaggccaaggacggcgtgcttgacctcaagctggcagctgacaccctagctgtacgccagaagcggcggatttacgacattaccaatgttttggaaggtatcgggctaatcgagaaaaagtccaagaacagcatccagtggaagggtgtggggcctggctgcaatacccgggagattgctgacaaactgattgagctcaaggcagagatcgaggagctgcagcagcgggagcaagaactagaccagcacaaggtgtgggtgcagcagagcatccggaacgtcacagaggacgtgcagaacagctgtttggcctacgtcactcatgaggacatctgcagatgctttgctggagataccctcttggccatccgggccccatcaggcaccagcctggaggtgcccatcccagagggtctcaatgggcagaagaagtaccagattcacctgaagagtgtgagtggtcccattgaggttctgctggtgaacaaggaggcatggagctcaccccctgtggctgtgcctgtgccaccacctgaagatttgctccagagcccatctgctgtttctacacctccacctctgcccaagcctgccctagcccagtcccaggaagcctcacgtccaaatagtcctcagctcactcccactgctgtccctggcagtgcagaagtccagggaaatggctggcccagcagctgagatcacagtgagtggcggccctgggactgatagcaaggacagtggtgagctcagttcactcccactgggcccaacaacactggacacccggccactgcagtcttctgccctgctggannnnnnnnnnnnnnnnnnnnnnnnnnnnnnnnnnnnnnnnnnnnnnnnnnnnnnnnnttcgtccggacccaacccttcttacctcctttggagcccattcaaggcagaccccacaggtgttttgggaantccccaaagagctgttcagaantcttttggatcccacacgaggagtgcatggaggttcgggagcttgttgggagggagtttgatgttccttcagaa

SEQ ID NO: 352168 - DNA, 3203 bp, Homo Sapiens
  misc_feature (1011)..(1011): n is a, c, g, or t
  misc_feature (1047)..(1047): n is a, c, g, or t
  misc_feature (1499)..(1499): n is a, c, g, or t
  misc_feature (1697)..(1697): n is a, c, g, or t
  misc_feature (1706)..(1706): n is a, c, g, or t
  misc_feature (1737)..(1737): n is a, c, g, or t
  misc_feature (3036)..(3036): n is a, c, g, or t
  misc_feature (3135)..(3135): n is a, c, g, or t
ctccacaggaagaaaaaaaacccaaaccttggtgatgtctgtgatccccccactggcctccgtgctggttttaaacccaaatgcgtgtgcttggattaacctgaccatcaggattttatttgggtacaagctcagaaactgactctcctctagccatttttggaaatttcaaagctgtttggcccccttcttttcttttggcaataggaaaatcatacagtctaccccatttcacttacagagaacttacgacatcagaattgagttctctggcctgtggttaaacatgcgcatgcacagggcagatgcaatctattaccacggcccctcttagacatcaatgttgctaaaactgtaacaaaggctaaaaacataccatgctgcctgtcaacatgtcctgttttcaaagcagggagcttttcactctgtgtgagttgtttgcattttggttcactaggattggcacagccctcaaggtcgggcggcagagtgcctgcaatggccccatggatgacaggccttcgtgctcctggttttgggcattctgcctgctgggactgggaacctctccctaggaaatcacctgacacttcctgagtttacggaggggccaccagagctctcctacacccaggtggccctgggtgtgcccctggtgtgacacctccccacgcagggacctttgagcagtgtggctgggtctgcttgctctgcaccacagcccagctcatgcctgctctgcccaggtcctgggggaagagaggaaaccttggtggcaggtggtaagccctgtcccaggcacactgagccttctccaagcaaccctggccagagccactgtcagccacagccggaaggagaccacaggcagcctccagagccactgcctgctctgctcacagcacaaggggctgtctctccggcatcctgtgtggatggagcacagaggagaccttctctgtcagccttcctccaactctgaggagctagatctacaagaacaggtagtanggggggaaacaaacaaacaaacaaagaaaaccccanccctttcctcccctgaaatggctatttcaagagtctatgtggagaaaaaagtgtcaagaccatttctgaagttaaagtgcttggaaaaaagcccaacgaagtcagcgctgcctttccttccagaggctgtgcacaagctctccagcgttcccaagagagtctcagaatcaaacaaaactttcatacaaaaatcctgtacatacaggggtaagtcctgtgggcaccgcagaacaaagtctgaatgcatttcagctaacacgaataatgcatgactaagaacgctgacgacgaggcggctgaagggagcgcctggacagtcagcccttgagtgtggcctgagtttcaccggtgcaaggaggagagcagtgccctggagccgtggctggacgctgcaggaggtgtgtattatctgcagttggcatcagagcgaggggtgtccacacacccctcgntctgacatttctctaaatggattcggtggagacatgcccgttggggcccaatgatgggggaagggtcaccccagcctgcacaactccccagccctgacccagctcatggcgagcacactggcagcatggtcacggtctggccagcggcatcgctaggctgagatcactcatgcaccatgcagtcaggggccctgagcnccggctccnccgttctgcagtctggcagcatatggtccanatgcatcagatgacaccacgtttcagataatgccccagacacacattctgtgatccaaccaatctgcagcacagactgttgtctctagagaatgttccgtctctggaacattccagggaggcattccccggagggaaaccttccaagcagtggccgggtaagtgactctcaggcgtttctgtggtactcacaaacaagacgggacttatctgaccgcatgtcagaggaggtagccaggaagggcgggaggggaggatggcaggaggagggagagccccgcgggcctatttcgcagtcagggaccacggcagcgacaggcaggaggcaggggaccccaggcggcctagcagtgtccacgcacggtgaaacagaaggctctggacccagcatgcaggtgttggggtcaggccccgggcccatgggctggcctggagtacctggtacagacccacagaagagaagggccgtggttcccaggcagtaagtgcgaggtgaagggagtctctgcagaggctggaggagctacaaaggtctggtggggaaggggcccaatgctcagcgcttagaggcagaggccacgccactggcttgccctgcacgttgcacagatctgcttctctccagccactgtcactcccaactcagactttcctgccttgtctggaataaagagcagcactgtttgctttcagaaagggtggttgtctagtggctactaaagaaacttctctttcctgtgcttcttgcgagggacacacagcacaacgctgcttcgtgaccatggaggcttctctgcttcagaagggagctgtccgccaggcgggcgcatttcagacggtctgtgtggtctgccgcggacacctcggcactgctgtgactctggcggagacacacagctcccggcccgtctgcaggcacacacacgtccctctggtgggagccaggtctagctccagccgaccaagagcatcctctacaccgcacccactctctccctaaaacaggcgtttcctcctcaaggttcccgtcacttcctgttcctgccccacagcgggagactggggaatagtgaggaccagccacagccccacgctgagagggctggatgggagccgcgtgtgcacccattgcagggaagtggcccacggccacccaccgtgagtggcagcgccggccctccaccactgggtgtgccggctgcagccccacctcatggctgtcctgcctgcatcccttgcccgcccccaccctcgccagcccttggcccacgatggcccatggagtccttcccctcctccntcttggtctcatctcacaagcctggcactcggggtacaactggtcacctcggctttagctgtgtgacccaagggacactttggcacatggatgggggtngcagacacaggcagaggagatgagggaggaacagcggattcttctaaccgctagttctagggcagcag

SEQ ID NO: 352169 - DNA, 1122 bp, Homo Sapiens
  misc_feature (13)..(13): n is a, c, g, or t
  misc_feature (23)..(24): n is a, c, g, or t
  misc_feature (26)..(26): n is a, c, g, or t
  misc_feature (33)..(33): n is a, c, g, or t
  misc_feature (43)..(43): n is a, c, g, or t
  misc_feature (45)..(45): n is a, c, g, or t
  misc_feature (48)..(48): n is a, c, g, or t
  misc_feature (56)..(56): n is a, c, g, or t
  misc_feature (62)..(63): n is a, c, g, or t
  misc_feature (73)..(73): n is a, c, g, or t
  misc_feature (77)..(78): n is a, c, g, or t
  misc_feature (82)..(82): n is a, c, g, or t
  misc_feature (86)..(86): n is a, c, g, or t
  misc_feature (90)..(90): n is a, c, g, or t
  misc_feature (98)..(98): n is a, c, g, or t
  misc_feature (109)..(109): n is a, c, g, or t
  misc_feature (167)..(167): n is a, c, g, or t
  misc_feature (194)..(194): n is a, c, g, or t
  misc_feature (205)..(205): n is a, c, g, or t
  misc_feature (275)..(326): n is a, c, g, or t
ttttaaacgattntcaacccaannanacaagtntggtggttancnagnacaggtangaaaannggggtcacgnttannccancccnaccnacaccccnatccaacccancaacagcccccacttgctaagggcaaatgaacgaagcgcccaaccttcctttcggagnaatcctgcctgggaaggagagattttnagtgacatgtncagtgggtggcttgctagaatttttttaaaaaaacaacaatttaaaatcttatttaagtcccaccagtgnnnnnnnnnnnnnnnnnnnnnnnnnnnnnnnnnnnnnnnnnnnnnnnnnnnnaaatccattttaaagagaagcagactgactttggaaagggaggcgctggggtttgaacctccccgctgctaatctcccctgggcccctccccggggaatcctctctgccaatcctgcgagggtctaggcccctttaggaagcctccgctctctttttccccaacagacctgtcttcacccttgggctttgaaagccagacaaagcagctgcccctctccctgccaaagaggagtcatcccccaaaaagacagagggggagccccaagcccaagtctttcctcccagcagcgtttccccccaactccttaattttattctccgctagattttaacgtccagccttccctcagctgagtggggagggcatccctgcaaaagggaacagaagaggccaagtccccccaagccacggcccggggttcaaggctagagctgctggggaggggctgcctgttttactcacccaccagcttccgcctcccccatcctgggcgcccctcctccagcttagctgtcagctgtccatcacctctcccccactttctcatttgtgcttttttctctcgtaatagaaaagtggggagccgctggggagccaccccattcatccccgtatttccccctctcataacttctccccatcccaggaggagttctcaggcctggggtggggccccgggtgggtgcgggggcgattcaacctgtgtgctgcgaaggacgagacttcctcttgaacagtgtgctgttgtaaacatatttgaaaactattaccaataaagttttgtttaaaaaaaa

SEQ ID NO: 352170 - DNA, 2579 bp, Homo Sapiens
  misc_feature (5)..(5): n is a, c, g, or t
  misc_feature (11)..(11): n is a, c, g, or t
  misc_feature (33)..(33): n is a, c, g, or t
  misc_feature (48)..(49): n is a, c, g, or t
  misc_feature (51)..(51): n is a, c, g, or t
  misc_feature (59)..(59): n is a, c, g, or t
  misc_feature (70)..(70): n is a, c, g, or t
  misc_feature (74)..(74): n is a, c, g, or t
  misc_feature (86)..(86): n is a, c, g, or t
  misc_feature (99)..(99): n is a, c, g, or t
  misc_feature (101)..(101): n is a, c, g, or t
  misc_feature (215)..(215): n is a, c, g, or t
  misc_feature (323)..(323): n is a, c, g, or t
  misc_feature (1337)..(1363): n is a, c, g, or t
  misc_feature (2501)..(2537): n is a, c, g, or t
tttanaactanctacactgttcaagaggaagtntcgtccttcgcagcnnanaggttgantcgcccccgcncccncccgggcgcccnaccccaggcctgngngctcctgcctgggatggggagaagttatgagagggggaaatacggggatgaatggggtggctccccagcggctccccacttttctattacgagagaaaaaagcacaaatgaganagtgggggagaggtgatggacagctgacagctaagctggaggaggggcgcccaggatgggggaggcggaagctggtgggtgagttaaacaggcagcccctccccagcngctcttgccttgaaccccgggccgtggcttggggggacttggcctcttctgttcccttttgcagggatgccctccccactcagctgagggaaggctggacgttaaaatctagcggagaataaaattaaggagtgggggggaaacgctgctgggagggaagacttgggcttggggctccccctctgtctttttgggggatgactcctctttggcagggagaggggcagctgctttgtctggctttcaaagcccaagggtgaagacaggtctgttggggaaaaagagagcggaggcttcctaaaggggcctagaccctcgcaggattggcagagaggattccccggggaggggcccaggggagattagcagcggggaggttcaaaccccagcgcctccctttccaaagtcagtctgcttctctttaaaatggatttgaggaatggggggacatgggaggggtgggagtagaggaaggagggagggaggcactggtggaacttaaataagattttaaattgttgtttttttaaaaaaattctagcaagcaacccactgaacatgtcactaaaaatctctccttcccaggcaggattactccgaaaggaaggttggcgcttcgttcatttgcccttagcaagtggggcctgtggttgggtgggatgggggtgtgggtgggggctggagttaagcgtgagcccctctttccataccctgtccctggatacaccagcaagacctggtctgactggagttgagaaactcgtttaaaacaggcagaagtgggctgggagggctgagcgggactggcccactttggggtaagagcaaagcgaaaagtgggagagggcgcaggagggtgaaggggatgagggggagcagctggtgtttctgtccctctgattatctgggcttcctgctccccctaacctggaggctggggtgggggtgaaattagatgcaaggaactctggggccctctggctgttcaatccagccctcccacccccccgaccnnnnnnnnnnnnnnnnnnnnnnnnnnncccatgggggcacaggcatgcccctaaaactcagaaaactccttgccacacttctcattgatggagacccggatttcttcttcctcatagtcgtcaaagttactcgtatccccagggcctttaaactttggtatgaagggagcttccaccttcctctggtagatggcaatccagtcagttgtggcaaaccacttgtggttcttgatatcgttgaccccattcttgaggttcccaaagcgcttggtgagatctacctgcaggaggttccgcagcaggtccttcaagtcagagctgaagtgggaagggaagcgcaccttcccagagacgatcttctcatagatctggatgggctggtcggcgaagaagggcgggaagccaacggccatctcatagataagcacccctagggcccaccagtccacggccttgttgtagcctttgctcaggatgatctcgggggccaggtactctggggtcccgcacaaggtccaagtgcggcccttcacgcgcttggcgaaaccgaagtccgtcacctgcaggtagccctgctggtcgatgaggagattctcgggcttcaggtcgcggtggatgaggtcgagcgagtgtaggtactggacggccaggacgacctgggcggcatagaaacaggcatggggctcgctaaaccttccgacgcgctgtaggcgggagaacatctccccacccggcacgtactccatcaccaggtacaggtaggagttgtccttaaaggagaactggagcttgacgaggaacggaaagtcgatcgcctgcaggatgcgcttctcgttcagtatgtgctcgacctgcttcatcttcaccaccttctgcttgttgaggatcttcatggcgtagtggccgccggtctcctggtgcctcaccagcatcacccgcccgaaggagcccatgcccagcgtcctgagccgttcgaactgatccgagctggcggtgttttgagcggggtttccccatctgtagaggaaatctcctctggctttggctaggaactcgttcacgctctcctcctgctcggtgtccttcttggcgggggcgttgcccatggcggtggcggcggcaggccgctctcgacgaattcgagctcggccgatttggcctgatnnnnnnnnnnnnnnnnnnnnnnnnnnnnnnnnnnnnncgccgccaccgcgataagccagtcgcccatagtgagttatca

SEQ ID NO: 352171 - DNA, 713 bp, Homo Sapiens
gccaaaagaaaagaaaaagaaaccctgggcacagcagcccctaaactcagaaactcttgccacacttctcattgatggagacccggatttcttcttcctcatagtcgtcaaagttactcgtatccccagggcctttaaactttggtatgaagggagcttccaccttcctctggtagatggcaatccagtcagttgtggcaaaccacttgtggttcttgatatcgttgaccccattcttgaggttcccaaagcgcttggtgagatctacctgcaggaggttccgcagcaggtccttcaagtcagagctgaagtgggaagggaagcgcaccttcccagagacgatcttctcatagatctggatgggctggtctgcgaagaagggcgggtagccagcggccatttcatagataagaacccccagggcccaccagtccacggccttgttgtagcctttgctcaggataatctcaggggccaggtactcaggggtgccgcacaaggtccaagtgcggcccttcacgcgcttggcgaaaccgaagtctgtttgtcgaggatcttcatggcatagtggttcccggtctcctcgtctttcaccagcatcacccgcccgaaggagcccgtgccgagggtcttgattcgttcaaactgatccaagtgggctgtgttccctcgtgccgaattcaacacccaggcctcgtacctagccgtagctt

SEQ ID NO: 352172 - DNA, 1108 bp, Homo Sapiens
  misc_feature (967)..(967): n is a, c, g, or t
  misc_feature (983)..(983): n is a, c, g, or t
  misc_feature (990)..(990): n is a, c, g, or t
  misc_feature (992)..(992): n is a, c, g, or t
  misc_feature (996)..(996): n is a, c, g, or t
  misc_feature (999)..(999): n is a, c, g, or t
  misc_feature (1006)..(1007): n is a, c, g, or t
  misc_feature (1009)..(1009): n is a, c, g, or t
  misc_feature (1014)..(1015): n is a, c, g, or t
  misc_feature (1017)..(1017): n is a, c, g, or t
  misc_feature (1029)..(1029): n is a, c, g, or t
  misc_feature (1032)..(1032): n is a, c, g, or t
  misc_feature (1035)..(1035): n is a, c, g, or t
  misc_feature (1037)..(1037): n is a, c, g, or t
  misc_feature (1039)..(1040): n is a, c, g, or t
  misc_feature (1042)..(1042): n is a, c, g, or t
  misc_feature (1052)..(1053): n is a, c, g, or t
  misc_feature (1072)..(1073): n is a, c, g, or t
  misc_feature (1077)..(1077): n is a, c, g, or t
  misc_feature (1081)..(1081): n is a, c, g, or t
  misc_feature (1099)..(1099): n is a, c, g, or t
  misc_feature (1106)..(1107): n is a, c, g, or t
ggcggcggcggcggcggttgaactgactcggagcgaggagacccgagcgagcagacgcggccctggcgcccgccctgcgcactcaccatggcgatgcatttcatcttctcagatacagcggtgcttctgtttgatttctggagtgtccacagtcctgctggcatggccctttcggtgttggtgctcctgcttctggctgtactgtatgaaggcatcaaggttggcaaagccaagctgctcaaccaggtactggtgaacctgccaacctccatcagccagcagaccatcgcagagacagacggggactctgcaggctcagattcattccctgttggcagaacccaccacaggtggtatttgtgtcactttggccagtctctaatccatgtcatccaggtggtcatcggctacttcatcatgctggctgtaatgtcctacaacacctggattttccttggtgtggtcttgggctctgctgtgggctactacctagcttacccacttctcagcacagcttagctggtgaggaacgtgcaggcactgaggctggagggacatggagccccctcttccagacactatacttccaactgccctttcttctgatggctattcctccaccttattcccagcccctggaaactttgagctgaagccagcacttgctccctggagttcggaagccattgcagcaaccttccttctcagccagcctacatagggcccaggcatggtcttgtgtcttaagacagctgctgtgaccaaagggagaatggagataacaggggtggcagggttactgagcccatgacaatgcttctctgtgactcaaaccaggaatttccaaagatttcaagccagggagaagggttcttggtgatgcagggcatggaactgggacaccctcaactctcctggctttgtgcccttatctacaggagcatcgcccattggacttcctgactcntctgtctttgaggganaagaacnanctanatnctttttnnanctttnngnctttggaaaaanaanaanancnngncaaggataanntgaaaaataaattttttgnntttncccntgaaacccaattgggaanttgcaannc

SEQ ID NO: 352173 - DNA, 1829 bp, Homo Sapiens
  misc_feature (1033)..(1033): n is a, c, g, or t
  misc_feature (1734)..(1772): n is a, c, g, or t
ggaattcctgcgatctggcgcccgccctgcgcactctccatggcgatgcatttcatcttctcagatacagcggtgcttctgtttgatttctggagtgtccacagtcctgctggcatggccctttcggtgttggtgctcctgcttctggctgtactgtatgaaggcatcaaggttggcaaagccaagctgctcaaccaggtactggtgaacctgccaacctccatcagccagcagaccatcgcagagacagacggggactctgcaggctcagattcattccctgttggcagaacccaccacaggtggtatttgtgtcactttggccagtctctaatccatgtcatccaggtggtcatcggctacttcatcatgctggctgtaatgtcctacaacacctggattttccttggtgtggtcttgggctctgctgtgggctactacctagcttacccacttctcagcacagcttagctggtgaggaacgtgcaggcactgaggctggagggacatggagccccctcttccagacactatacttccaactgccctttcttctgatggctattcctccaccttattcccagcccctggaaactttgagctgaagccagcacttgctccctggagttcggaagccattgcagcaaccttccttctcagccagcctacatagggcccaggcatggtcttgtgtcttaagacagctgctgtgaccaaagggagaatggagataacaggggtggcagggttactgagcccatgacaatgcttctctgtgactcaaaccaggaatttccaaagatttcaagccagggagaagggttcttggtgatgcagggcatggaacctggacaccctcagctctcctgctttgtgccttatctacaggagcatcgcccattggacttcctgacctcttctgtctttgagggacagagaccaagctagatcctttttctcacctttctgcctttggaacacatgaagatcatctcgtctatggatcatgttgacaaactaagttttttttatntctcccattgaactcctagttggcaattttgcacattcatacaaaaaaatttttaatgaaatgatttcattgattcatgatggatggcagaaactgctgagacctatttccctttcttggggagagaataagtgacagctgattaaaggcagagacacaggactgctttcaggctcctggtttattctctgatagactgagctccttccaccagaaggcactgcctgcaggaagaagaagatctgatggccgtgggtgtctgggaagctcttcgtggcctcaatgccctcctttatcctcatctttcttctatgcagaacaaaaagctgcatctaataatgttcaatacttaatattctctatttattacttactgcttactcgtaatgatctagtggggaaacatgattcattcacttaaaatactgattaagccatggcaggtactgactgaagatgcaatccaaccaaagccattacattttttgagttagatgggactctctggatagttgaacctcttcactttataaaaaaggaaagagagaaaatcactgctgtatactaaatacctcacagattagatgaaaagatggttgtaagctttgggaattaaaaacaaacaagatacattttagtaaatatatatttttaacatagtcaaaaaaacagaaccacacaaatcgtaacccgaaacaacnnnnnnnnnnnnnnnnnnnnnnnnnnnnnnnnnnnnnnnccccatttggccgcacccttttttgtgtaaagagggggcccaaaaggggggcgttaa

SEQ ID NO: 352174 - DNA, 1373 bp, Homo Sapiens
  misc_feature (44)..(44): n is a, c, g, or t
  misc_feature (118)..(118): n is a, c, g, or t
  misc_feature (124)..(124): n is a, c, g, or t
  misc_feature (150)..(150): n is a, c, g, or t
  misc_feature (873)..(873): n is a, c, g, or t
  misc_feature (1152)..(1201): n is a, c, g, or t
cttggttctccattctcaattgtcaaagctctttgttgcctttntgaatagcagtccattaagaggttcgtccctgtgaaagcagactgctgtcctgggacaggaccaaatggaagtntctttntaggagaacgggttttaaaacatgtnttttctttcttgtaatttagggatcatagacggtatttctatgtaaacgaacagtcgggcgagtctcagtgggagtttccagatggtgaagaggaagaagaagaaagccaagcacaagaaaatagagatgagactcttgccaaacagaccttgaaagacaaaactggcactgattcaaattcaacagaatcctctgaaacttccacagtcggaattgagatgggcgattggcaggaagtctgggatgagaacacgggatgttattattattggaatacacaaacaaatgaagtgacttgggagttaccccaatatcttgccacacaggtacagggattacagcattaccagcccagttctgtgccaggtgctgaaactagttttgtggtaaatacagacatatattctaaggagaaaacgatttctgtttccagtagtaaaagtggaccagtcatagccaagcgagaagttaaaaaggaagtaaatgaaggaattcaggctctctcaaatagtgaggaggagaagaaaggggtggcagcatcgctgcttgctcctttattgcctgagggaataaaagaagaagaagagagatggagaagaaaagtaatttgtaaagaggagccagtttcagaagtaaaagaaacaagtacaacagtagaagaagcaacaacaatagtaaagccacaggaaattatgttggacaatatagaagacccttctcangaggatctttgcagtgttgtccaatctggagaaagtgaggaggaagaggaacaagatacccttgaactggagctagttttggaaaggaaaaaagcagattgcgagcccttggaggaaggagaatggtatgtgtcagggtctaatccaacgttctgatatcaaccagccagcatctcaagatgggatgccttaggcttatgtcttaaaaaaggaaaatgggaaaatgttttgtttccagctacccattcccagatcctacccgttagggagttcctagtnnnnnnnnnnnnnnnnnnnnnnnnnnnnnnnnnnnnnnnnnnnnnnnnnnggatgttgggccctggcttcacccccttattatcccaagcccttttggggaaaaaccaaaaaagggaccggattccccccaaaatttggaaaaatttcgaagaaaccacccctggaaccaaacgggggaaaaaaacccttgtctccttctcttttacccaacccaaaccaaa

SEQ ID NO: 352175 - DNA, 677 bp, Homo Sapiens
tagaatcgagcgcggacccgatgagtaatctggcgtatgactgggtccactttttactacgggaaacagaaatcgtgtttctccttagaatatatgtctgtatttaccacaaaactagtttcagcacctggcacagaactgggctggtaatgctgtaatccctgtacctgtgtggcatgatattggggtaactcccaagtcacttcatttgtttgtgtattccaataataataacatcccgtgttctcatcccagacttcctgccaatcgcccatctcaattccgactcctgccagtgaacactgagtatcatattgccaaccagatgtttgggtggagtctgttccatttgaagtagaagaagaaagggtagatgttgctgcttcctttggctctggtcgaggtggagttggaggtggagcagaagctcctacaggagctgcaggcttgaggagctgttatggcatcgatctccgctaggaagttggccaatgtactatcaatatcagttaactggtttccatttgtctctttggattgtgctaagtttttcggaaacatcattgtcatcgtcatcactgtcagcataagcaccaagcaagcatagaccagctgttgctttaacagctgtgggtctagtgtcctgactggttcggaggatctgacaatctaggaac

SEQ ID NO: 352176 - DNA, 975 bp, Homo Sapiens
  misc_feature (64)..(64): n is a, c, g, or t
  misc_feature (547)..(547): n is a, c, g, or t
tgccaatcttgtaaatagtggttttttgtttcgtttttgccctcttgatctaaaattgcttttnttttcagatggtggccagcagagatctgcaaccccaggtctgtgccactgaacatccagggccttaaacatgacttgggggacttccctgtattcttctttggttctcatgactactactgggtacaccagggcagagtgttcccttatgttgaaggagacaaaagctttgctgaagggcagactagtattaacaagaccttcaaaaaggcactggaagaagctgcaaaacgtttccaggaattgaaagcacaaagagaaagtaaagaagccctagagattgaaaaaaactcaagaaaaccccctccctacaaacacatcaaagctaacaaagtaataggaaaggtgcagatccaggttgctgacctgtcagagattccccgctgtaactgcaagccagctgatgaaaacccttgtggcttggaatcggagtgcctgaacagaatgttgcagtatgaatgccacccgcaggtgtgcccagctnggagatcgttgtcagaaccagtgctttacaaagagactataccctgatgcagagatcatcaaaacgggagcggagaggctggggcctcaggaccaaaaggagcattaagaagggtgaatttgtaaatgaatacgtcggtgaattaattgatgaagaagaatgcagattgcgaatcaagcgagcccacgagaacagtgtaactaatttttatatgttaactgttacccaggaccgtataattgatgccggcccaaaaggaaattattctcgcttcatgaaccacagttgtaatcccaactgtgaaacacaaaagtggacagtgaaatgaagatgtttcgaagtgggactatttgcctctctggtgatattccctgcaggggatgggaattaacattttaattataaccctagattgtctggggcaacgg

SEQ ID NO: 352177 - DNA, 1903 bp, Homo Sapiens
  misc_feature (76)..(95): n is a, c, g, or t
  misc_feature (220)..(232): n is a, c, g, or t
tcccccgggctgcaggttttccacatgcatgaaaatatgtattaatcagaggtggcttaattacattgaaattgcnnnnnnnnnnnnnnnnnnnnactgaaataactcatgtttgtgtagaagaatgcctgtttactcagagtttatattttccttcagttatattttaaatcaaaaggtctgggtaatgtatacttttgattaatatatactttttttnnnnnnnnnnnnncaatgtaatggttaatagtagaaatgtgccacacttttcaagttttatataacatatgaaattcagttaaaagaatgtgtgtttcataatgacttttaactggtaaaaatattacttgcacgaagtacttgatgtatggttatcctgaaatttcggagtatttggtgtgttctttgtctaaaaatagtctgttttgtcagtccttcagaatattatttattctgaagattgtccctcttgcacttggcagtttattttcggggatacattgttgggggagaggggtttctgccactctttccagattgagtctgtgctgtttaaggaggactaccatcctgcaactctttttctaattggggcacagaggatgtcgctaaagaaaagttgaagagccctttcagcactttctcatctgtggagaagatggaatcttaaaatacatttggagttttatctgttttacaagtccattgatggcctaagttcctcctgttttctgctgtttgatctctaaggaactcctgttgctaaatatgaagagtatggaacattcatatagtctctgtgaagcatggggggagggaagacatttctttttcttataggctttatgctcaaatgtcatagtctcctttcaaagaattgtgttgcattttaaatgcacccagcttaagtagaagacattgaaggatgcattaattttcaggaactattttgaattatgaaaagattcccaattgaaaaaattattcaacaagtaaaagctaagaaatttcattgaaatcataaggcagtttaagcataaattgataaaaatagctgtgtactactaattaatagaaaatcattcaaccaagagaagagtcaagtgaatatcgtttgtttatttgctagtgagtttctttgtaacgttgattttattaaatgataatatttggttagtatgtcctatgttaataaaaatgaacaaaattaattttgctatgttcaggtgtcttgataaaataacaatgctccagtgttgttgcttacatttagcactaaattttaacacagggtcagtgagtccaggttttaacttcttcatgcctggatgggataaaatgtaattcattgttaaattaattcatatttgtatttattaatcactgtgacaacattaaccatttgttcttaccaggaagtggtcagattatcatctgagttacagttagactggctaagtttggtattagatcaaggggaatgtccagtaaacagagaggtaagcatgatggaaataatgaagtggggtacacaggaaaaacctgactagtgaggaggagcagctgagagatagggtcagtgaatgcggttcagcctgctacctctcctgtcttcatagaaccattgccttagaattattgtatgacacgttttttgttggttaagctgtaaggttttgttctttgtgaacatgggtattttgaggggagggtggagggagtagggaagtggtccttttacaagaattttgatgcataagtgtctattgtagggtttggatgatctagtaaagtgttttagaacccctttttatcccatgcaccattcagtaaacataaaaatcacaattctgctaatgtcatttggaacttcaaaataaatatcttgtctaaaaacaaaaaa

SEQ ID NO: 352178 - DNA, 1063 bp, Homo Sapiens
  misc_feature (199)..(199): n is a, c, g, or t
  misc_feature (212)..(212): n is a, c, g, or t
  misc_feature (287)..(287): n is a, c, g, or t
  misc_feature (563)..(575): n is a, c, g, or t
gcagtatttagcgaccagggagttccctttggagatccaatcaagcagaaacagggagtgacttaggcccatcaatgggacgttgtaaaccagataactccaaatgtagttttaaagagttccatcgttcttccacagatgagaaagtgcctgaaagggctcttcaaaccttttctgttagggacatccttctgtgccnccaattagaaaanagagttgcagggatggtagtcctccttaaacagcacagactcaatctggaaagagtggcagaaacccctctcccnccaacaatgtatccccgaaaataaactgccaagtgcaagagggacaatcttcagaataaataatattctgaaggactgacaaaacagactatttttagacaaagaacacaccaaatactccgaaatttcaggataaccatacatcaagtacttcgtgcaagtaatatttttaccagttaaaagtcattatgaaacacacattcttttaactgaatttcatatgttatataaaacttgaaaagtgtggcacatttctactattaaccattacattgnnnnnnnnnnnnnaaaaaaagtatatattaatcaaaagtatacattacccagaccttttgatttaaaatataactgaaggaaaatataaactctgagtaaacaggcattcttctacacaaacatgagttatttcagtaaaaaaacaacaacaacaaagcaatttcaatgtaattaagccacctctgattaatacatattttcatgcatgtggaaaaattatttttaactagaactttaagaataagttccatagcaaacaagttacagcatttattcaataaggaatattaaaataattcattagtaaaaaataaaataacttcaaccatatacatattataatttatcatgtacatactccaaaatccccataatttaactaggaaatttatagaacatctttttaaagtatgtcttaggaaaaccaaccaaaacaattggtgccttaactaaagagaatgtgcatacacattgcatcccgggaattccggaccggtacc

SEQ ID NO: 352179 - DNA, 1781 bp, Homo Sapiens
  misc_feature (490)..(502): n is a, c, g, or t
  misc_feature (880)..(880): n is a, c, g, or t
  misc_feature (1409)..(1488): n is a, c, g, or t
ggtaccggtccggaattcccgggatgcaatgtgtatgcacattctctttagttaaggcaccaattgttttggttggttttcctaagacatactttaaaaagatgttctataaatttcctagttaaattatggggattttggagtatgtacatgataaattataatacgtatatggttgaagttattttattttttactaatgaattattttaatattccttattgaataaatgctgtaacttgtttgctatggaacttattcttaaagttctagttaaaaataatttttccacatgcatgaaaatatgtattaatcagaggtggcttaattacattgaaattgcttttttgttcgttgtttttttactgaaataactcatgtttgtgtagaagaatgcctgtttactcagagtttatattttccttcagttatattttaaatcaaaaggtctgggtaatgtatacttttgattaatatatactttttttnnnnnnnnnnnnncaatgtaatggttaatagtagaaatgtgccacacttttcaagttttatataacatatgaaattcagttaaaagaatgtgtgtttcataatgacttttaactggtaaaaatattacttgcacgaagtacttgatgtatggttatcctgaaatttcggagtatttggtgtgttctttgtctaaaaatagtctgttttgtcagtccttcagaatattatttattctgaagattgtccctcttgcacttggcagtttattttcggggatacattgttggggggagaggggtttctgccactctttccagattgagtctgtgcctgtttaaggaggactaccatcctgcaactctttttctaattggggcacagaggatgtcngctaaagaaaagttgaagaaccctttcagcactttctcatctgtggagaagatggaatcttaaaatacatttggagttttatctgttttacaagtccattgatggcctaagttcctcctgttttctgctgtttgatctctaaggaactcctgttgctaaatatgaagagtatggaacattcatatagtctctgtgaagcatggggggagggaagacatttctttttcttataggctttatgctcaaatgtcatagtctcctttcaaagaattgtgttgcattttaaatgcacccagcttaagtagaagacattgaaggatgcattaattttcaggaactattttgaattatgaaaagattcccaattgaaaaaattattcaacaagtaaaagctaagaaatttcattgaaatcataaggcagtttaagcataaattgataaaaatagctgtgtactactaattaatagaaaatcattcaaccaagagaagagtcaagtgaatatcgtttgtttatttgctagtgagttnnnnnnnnnnnnnnnnnnnnnnnnnnnnnnnnnnnnnnnnnnnnnnnnnnnnnnnnnnnnnnnnnnnnnnnnnnnnnnnntgctatgttcaggtgtcttgataaaataacaatgctccagtgttgttgcttacatttagcactaaatttttaccacagggtcagttgaatccagggttttaacttcttcatgccttgaaatgggaataaaatggtaattcattggttaaaattaaatttccaaatttgggaatttaatttaaacccactggtggaacaaccttttaacccattttggtttcctttaccaaggaaaagttgggccaaaaatttatccatcctggaaattttcaccgttttaagaaaatggggct

SEQ ID NO: 352180 - DNA, 2007 bp, Homo Sapiens
  misc_feature (1034)..(1056): n is a, c, g, or t
acaggcgtgaggcatcacacctgcctctcttggctttttagttaggaaggatccagctaggcccgtgtggttagatcagctttgttactgaattacctaaaaccagaccacagcacagccagggagcccagtagtgtttccaagaacagtgtggagcttgagaaagagaactttaaaaattagagggtccctttctgcagaggaagggatgctcgcagggtggcagtggcccagccccagcctcagggacggggagggagagccccctctgggcccagcaggcaggtgttctgaggctggtccctcctcagtttccgcagccacaaggcgaaacggccagattctcactcacggttgttctcactccttttcctgtcccgtttccagtcccactgagccattcacttctgctgaaccatttttcttaggatgcagccgtctcactcccttgtcctgtaaatcgtgtattcatgttgatgattcttggagataggtttcactttttcccagctgcgtccacaggaaaggggagtcggatgccagctgcaccccgcctggctcgcacaggctaagaccacagacagagcagggcttcccggagccacacaggccacgcaccccaggaacccttgctgccgcgggccaggaacaggaatgtgttggtgcctgagacaccaaatggaagaagcacatcaagactgttctcctgcggccaacactggcccggaagccgccctccatacaggccctcagggggcctgccttctgcgcctcagtcccccgtgcatccctgggcctgggtatcacatgctctccaggaaagggacggaatcaatcgtgtgaccgatgggctcgcaaggatgggtgccgccgtgggagccctgcctctggtgctggcaagggattgggtttgtgtgggtgtctctagcctgcagagtccagtgagtgagagtccttgggagcgcggcgctgcctgtagctgtgcctggggatgcacgtggccacgggatttcagtgggacagcgctcccacannnnnnnnnnnnnnnnnnnnnnnttcttagttactgttggaaagggaaaaattcaccatatccaaggggagagacgatgggctgggtttgtttactccaacttcccttctacacccctcctgcaggacagtacgatttggggagaacccagctccccactttatctgcagactctgggacctgacaaaacagtcagagcctgagtgcactgcagcctgaactcccttgagcagcgctataagggactttgcactttaaaaaggggatgcctgtcagtaaatcccctgtgcattgactagaactggggggctgcgcccgctccctccttaatcctagatgatttgctcatgaaatagaggtgggggacgaccgcatgcactctgggaggtgcagccctaaggggtggactccagatctccctgcaagagacagcttggcttggctttggctgttggggaggagtccctgccatcccggtgagcctggggctgttgcttagggtcttctgggtggacacgtggagaaagagaaggcaaacgttggaacactaggaaaagctagaaattcagacaacacacatggatccccttaaaacatgtaaatgtgtcagaacacggttgacctgccgccttcttgaacctggtggcccccgttggaactatcagtggcgtctcccatgcacacgccctctgctttctctttcctagactcgcggtgctcacatccagacattaccttgttggtagcccccaagtggcgtgcagtgacaccagtatcttctctgttgcatttttgcaatcttgtgtcccgctcggtgatgttctacaaactctgttttaaggttgagaaagtttcaagggtgaagatctcaaaacagtgctaaaatcaaaggtgtttgctgtgaagaaaaacgtgtatatattgcaccttgagttgtcagaaggtagaaactgaaataaactaactttaaaaaa

SEQ ID NO: 352181 - DNA, 437 bp, Homo Sapiens
  misc_feature (224)..(224): n is a, c, g, or t
  misc_feature (334)..(335): n is a, c, g, or t
  misc_feature (382)..(382): n is a, c, g, or t
  misc_feature (391)..(391): n is a, c, g, or t
agttaggcatgaggaacagcacagaagacagacaacattaaaaacatgtacttgtgtcagaacacggttgacctgccgccttcttgaacctggtggcccccgttggaactatcagtggcgtctcccatgcacacgccctctgctttctctttcctagactcgcggtgctcacatccagacattaccttgttggtagcccccaagtggcgtgcagtgacaccagnatcttctctgttgcatttttgcaatcttgtgtcccgctcggtgatgttctacaaactctgttttaaggttgagaaagtttcaagggtgaagatctcaaaacagtgctaanntcaaaggtgtttgctgtgaagaaaaacatgtgtatatattggcaccntgagttgtncagaaggtagaaactggaaataaactaacttttaaaaagatttttt

SEQ ID NO: 352182 - DNA, 2161 bp, Homo Sapiens
  misc_feature (678)..(914): n is a, c, g, or t
  misc_feature (919)..(1116): n is a, c, g, or t
  misc_feature (1124)..(1148): n is a, c, g, or t
  misc_feature (2074)..(2074): n is a, c, g, or t
  misc_feature (2134)..(2134): n is a, c, g, or t
gcagaatgcctttttaatatataaagcaaaacaataatgtatgttgtttagggacatccatatatgtaataaaaatacaaaggcacacatgaaaatgttgcgggacttttccttagttcagctaaagacggtggaggtccttgtcacacgccaggaaagattaggctcgcagacaatttgaagggtaaggcagggttttattgggtgtaaaggaagaaaaaggggaacagggactcagcagagccagagttctcctagttgtaggcttcccacctcacagattaaatcccaggttctcccgaggaagaggagggccaggctcctcccagctgcaaactgaggagcgaacttctgtggctccaccccagagcagtgcacaggccagttggagttttaccagggaacccttcccatctggctcattcctcgctctaaagaagtctatctaactgccactaggataagaatagggacaaagacagatcttaactgcttcctgctgatagggggcactgtttcgggaaaatggcaatcagatctccctcagaggcctatctaagggtgcccagcagaaggggccatggtccgagcttccagtagcatgaccgtttgatgtcctgaaggcaagaagagacaaactgggttattaaacacatatggccgggcacagtggctcannnnnnnnnnnnnnnnnnnnnnnnnnnnnnnnnnnnnnnnnnnnnnnnnnnnnnnnnnnnnnnnnnnnnnnnnnnnnnnnnnnnnnnnnnnnnnnnnnnnnnnnnnnnnnnnnnnnnnnnnnnnnnnnnnnnnnnnnnnnnnnnnnnnnnnnnnnnnnnnnnnnnnnnnnnnnnnnnnnnnnnnnnnnnnnnnnnnnnnnnnnnnnnnnnnnnnnnnnnnnnnnnnnnnnnnnnnnnggcannnnnnnnnnnnnnnnnnnnnnnnnnnnnnnnnnnnnnnnnnnnnnnnnnnnnnnnnnnnnnnnnnnnnnnnnnnnnnnnnnnnnnnnnnnnnnnnnnnnnnnnnnnnnnnnnnnnnnnnnnnnnnnnnnnnnnnnnnnnnnnnnnnnnnnnnnnnnnnnnnnnnnnnnnnnnnnnnnnnnnnnnnnnnnnnnnnnnnctgtctcnnnnnnnnnnnnnnnnnnnnnnnnncaaggggagggataaggacagctcaaaaatcctgaggctttttaccaatttgtacacggagaagggggccaaaagtccgaatggtaaacaactttacccttttgctggcatgttgggcttctgggttcccttcccctgaaaccaatcctaagccagccagtttaaggtttaggaaattaactctttccagtttggaaaatgcatctgaggggagtgtcccatagtatggagacacaataaggattgtcattgtgaaccgaggaggagaaaggaaaaaagaaggcattttttcaaaggaatccgaagggttccagatgcatttgaaagtggtgcagactgaagataaatggctacccacatagaaagaggggagcaggcatccctggttcttttcctagcaaatacctggggtacgtgagggatagaaggaatagcgtcctcttccatccttgcatccccatgcaaccttcgaaagtgctaccatgggtgccaaaatggcttgcatccatgaagcaggggtctagagggtgggaattatctcctctacccatgaatgccctatcacccctgctgtcagtagtcttggagttccctagacctcacttatgctcaggggttgaggggttgcatggactccttctcgtaagccaaatgctaaggaaaaactgtggaactgagtcctccaacaagggagagaaaaggatgtcttgtgacacacccagataactggtggctacagttatgtttggtaggatttgggtgcatggtgcttggctttggttagctcccttggtcttactttcccaaaaggaaacctctggatgatgggcaccctatttattcccattgcctagcagaatttgcaggataattgctcataactagaatactaatccagatttttttacattacccatccctcttgntctttctgagctgcagctggagattgctggttggttcacaagcagggtcagtctaaaaangcaggcaaaaatttaaaaacaactgag

SEQ ID NO: 352183 - DNA, 948 bp, Homo Sapiens
  misc_feature (727)..(794): n is a, c, g, or t
agcggatttccgggtgaaactggcattgagggtactggggcgtgcgtgaggcgtttactgatgcttcctggtccggtggcctcggtcccggtaagccaggcatgaagatcacaaggcagaaacatgccaagaagcatcttggcttcttccgcaacaacttcggagtccgcgagccgtaccagatcctgctggacggcaccttctgtcaggcggcgctgcggggccgcatccagctgcgggagcagctgccccgctacctcatgggggagacgcagctgtgcaccacaagatgtgtgttaaaagagctagaaacattgggaaaggacttatatggggcaaaactgattgcacaaaaatgccaagttcgaaattgtcctcatttcaagaatgcagtgagtggatcagaatgtctgctttccatggttgaagagggaaatcctcatcattatttcgtggcaacacaggatcagaatttgtctgtgaaagtaaaaagaagcctggagttcctctcatgtttattattcagaacactatggttttggacaaaccttctcccaaaacaattgcctttgtaaaagcagtggagtcaggtcagcttgtctcagtgcatgagaaagaaagtatcaaacatctcaaagaggaacagggtttaggtgaaaaaacactgaacagagtagaaggaaaaaagcgcaagaaaataagtggtcccaatcctcttagttgtttnnnnnnnnnnnnnnnnnnnnnnnnnnnnnnnnnnnnnnnnnnnnnnnnnnnnnnnnnnnnnnnnnnnnttcggaacagatctaacccaaaagtactttctgagaagcagaatgcagaaggagaatgaatcctttggaattttcaaggacattcaaatgtgaaaatgaattttttacaactagaagtatttataataaaagaccaaacttatttttgtaaatg

SEQ ID NO: 352184 - DNA, 919 bp, Homo Sapiens
tgaacacctggcctacggctctgtgatcactgtgaagaacctccgtgatggccatcggctatctgcactcccacaggcacctctaccccgagggcattggtgcccgtcagcagcaggtcaccacctatttgcacaaggactacaacaacctgtggattatcaagaaacataacacaaactcagatcccctagacccttccttcccagtggagtttgtaagacatggagacattattcgactagaacacaaagaaacttcccggaacttgcacagtcactatcatgaggcccccatgacccggaagcactatcaggtcaccggctatggcataaatggaacaggggactcaaatgatttctggcggattgaggtcgtaaacagaaaatttggaaaccggatcaaagtgctgagaagtcgaattcgcttcatccatttggtcacaggttgtgtcctgggctcctcgggaaaggttctgcccaagtggggctgggagcagttggaagttacttgcaccccatacctgacaagaaagcctcaactccatctggaatgtggaggaccatatcaatcccaagttgccaaacatcagcctggatgtgctacagcccagttttcctgagatcttgctggaatcccacatggtcatgatccgggggaaccagtggcctcaaacccaaggacaatgagttcacgtccaaaccctggcactggcctatcaactatcagggcctacgcatctacagcgagtcaatgacacagatttccgacgtctactctgacttggaacacccgatgaatatgagtggacttgaaactctgaagacgcatcgccctctaccttcctttacagggaagccatattgctgttacccatcaacagacggagcccggttgaccgcgaaggatacaagatttcca

SEQ ID NO: 352185 - DNA, 792 bp, Homo Sapiens
  misc_feature (58)..(58): n is a, c, g, or t
  misc_feature (305)..(318): n is a, c, g, or t
  misc_feature (340)..(353): n is a, c, g, or t
gtgaggggttggagagggaaggtgaggagcagaggggagacccgggaaaggggctgtnaccgtggggtgggggcaaagggtgaagagagtgtgggctttaggagaaaagtgtgaggcatgacccaaattgtaagcatagggacctcagggatggggaagaaacccgagtacgagggtgcagggccccccttcatacacaggagagaacagaactatttagggtgtttgtgtttatggacagtgagggcactgctcttggattcaccagctgttatttttgcttttacttttctcccaccttcagnnnnnnnnnnnnnnccacctccactttttaaaagcnnnnnnnnnnnnnngtatgatggtggtgaataaagaccaaagggtcctctctacctttgaaaactctcctggggtggaggagaccagggcaggatagacagacctctgcagtaagagagtggttgggaaacccagggtgttccttggatctcaggatctgagccatcgagggaagagtggggctgctaggcaagtggattagggggtctggatagggccccacaggtgacagggagcctgcagggcggatctggtgatcatgggagccagagggagtggggacagtgcaggcagtattggcaggagggccagtgcagaagggctggtagctcaggcagtgtgggggaagcactgaagcctgtagtccccacttgggggctaggggtttgctcactcagcaataaataactgtgtcacatcaaatcctaaatataccactacaaagtgagagtt

SEQ ID NO: 352186 - DNA, 1140 bp, Homo Sapiens
  misc_feature (745)..(745): n is a, c, g, or t
tgaacatgtccgtcgtctcagacaagtcgcgaatgggcggctttcaccagtcgcttaagtggcaaccgtggggtccagtatactcgccttgctgtgcagagaggtggcaccttccagatggggggtagcagcagccataacaggccttcgggcagtaatgtagatactctcctccgcctccgaggacggctccttctggaccacgaagccctttcttgtctcttggtcctactttttgtggatgagccaaagctcaatactagccgtctacaccgagtactgagaaatctctgctaccatgcccagacccgccactgggtcatccgcagtctgctctccatcttgcagcgcagcagtgagagtgagctatgcattgaaacacccaaactcactacaagtgaggaaaagggcaaaaagtcgagcaagagctgtgggtcaagtagccatgagaaccgtcccctggacctgctacacaagatggagtcaaagagctccaaccagctttcctggctctcagtatccatggatgcagccctaggctgcaggactaatatatttcagatccagcgttcaggggggcgtaaacataccgagaagcatgcaagcggtggctccaccgtccacatccatccccaagctgctcctgttgtctgcagacacgttttggatacactcattcaattggccaaggtatttcccagccacttcacacagcagcggaccaaagaaacaaactgtgagagtnatcgggaaaggggcaataaggcctgtagcccatgctcctcacagtcctccagcaggtggcatttgcacagacttctgggacttattggtaaaactggacaacatgaatgtcagccggaaaggcaaagaactccgtgaagtcagtgccagtgagcgctggcggtgagggggaaacctctccatacagcctcgaggcctctccactggggcagctcatgaacatgttgtcacacccagtcatccgccggagctctctcttaactgagaaactcctcagactcctttctctcatctcaattgctctcccagaaaacaaggtgtcagaagcacaggctaattctggcagcggtgcttcctccaccaccactgccacctcaaccacatctaccaccacca

SEQ ID NO: 352187 - DNA, 757 bp, Homo Sapiens
gggaatggctgtgacaataaataagattgggaaaacaagaagacgcccttgcatacattaagatatgtatatatggaaatgttaccgggagtcccggttatcccaaaaagggttgtttcctgttgcgtggtgaggccaatgcacgaaaccgaaagggagtgtgtcaagcagtgcaggctgtattcaatggctatggaattggaagatctgaaatcaacttagcttgtgagagctgggaagtttcagagtcgttgtcatggcgaccgtcagttgtcacggcgctggtgggagtgttgtttagcatgagaacaggatgatgataaagccagaggctctttcagaggcgccatcttgggatttcgccagcttcagctggttttcgtcctaagaaggaacttcgaaacacaggcattctttttcctgaaaataagcagagttacagctgagtaggaatttagctctgtcccatatgctatcgcattgggcagcaaaagcagggtggggtccagcgaaatcagcaggcactgaaatgagtaacatacccagccacgtttatgcagcatttttacgaaaatgaaaccatactacctgtaaaggaagatatgctaacaaacaacaaaactggcaggaaccaagattcctactgacactacccttagttttaattttccctgacaacaaatgaggttaacagagcataattatctaccgtgaccccttcaaaaagacaggctgtataccattgcactaagagaag

SEQ ID NO: 352188 - DNA, 665 bp, Homo Sapiens
  misc_feature (119)..(119): n is a, c, g, or t
  misc_feature (286)..(298): n is a, c, g, or t
gaagaatttagcataaataaaagcagcataagtcacctgaaacctgtgagtttgccctggacgagctgctgctgctaactgcatcacacatagggatcagggattataactgaaaaggncagaaatgagtcttttccctttctgggcagggcagccatccctgttcactccttggccttcagaggataccagagagtggccccagtcagttcccctcaattaccaacgagctactaggaaacggccgctgaaagactgaaaaaggagaaaaggaaaataactcagnnnnnnnnnnnnnggaataggactcagaaaaacaaaaacgaggaaaaggactcaggttcctcaccttaaccaagcggtggcagttaggcacttccacacggaaaccttccagtttcaccagagaatggccctggccagaaacttgcaagtgtctttgtgcttaggtgctgtccactgagggtcctcagttggaaaggaaaagatggagagaggaagatttccctgtatgtaaaaggggaaaggagaaaaagaaatcccaaactttgggcctaccttctctcctggctagctcaccagaatatgttaccagtagagggtcttgactgcaagttgtttaggttcttggcattttgaacaaagacttggaagaaacacccagc

SEQ ID NO: 352189 - DNA, 1577 bp, Homo Sapiens
aaaaaactagattgactatttatacaaatgggggcggctggaaagaggagaaggagagggagtacaaagacagggaatagtgggatcaaagctaggaaaggcagaaacacaaccactcaccagtcctagttttagacctcatctccaagatagcatcccatctcagaagatgggtgttgttttcaatgttttcttttctgtggttgcagcctgaccaaaagtgagatgggaagggcttatctagccaaagagctcttttttagctctcttaaatgaagtgcccactaagaagttccacttaacacatgaatttctgccatattaatttcattgtctctatctgaaccaccctttattctacatatgataggcagcactggaaatatcctaaccccctaagctccaggtgccctgtgggagagcaactggactatagcagggctgggctctgtcttcctggtcataggctcactctttcccccaaatcttcctctggagctttgcagccaaggtgctaaaaggaataggtaggagacctcttctatctaatccttaaaagcataatgttgaacattcattcaacagctgatgccctataacccctgcctggatttcttcctattaggctataagaagtagcaagatctttacataattcagagtggtttcattgccttcctaccctctctaatggcccctccatttatttgactaaagcatcacacagtggcactagcattataccaagagtatgagaaatacagtgctttatggctctaacattactgccttcagtatcaaggctgcctggagaaaggatggcagcctcagggcttccttatgtcctccaccacaagagctccttgatgaaggtcatctttttcccctatcctgttcttcccctccccgctcctaatggtacgtgggtacccaggctggttcttgggctaggtagtggggaccaagttcattacctccctatcagttctagcatagtaaactacggtaccagtgttagtgggaagagctgggttttcctagtatacccactgcatcctactcctacctggtcaacccgctgcttccaggtatgggacctgctaagtgtggaattacctgataagggagagggaaatacaaggagggcctctggtgttcctggcctcagccagctgcccacaagccataaaccaataaaacaagaatactgagtcagttttttatctgggttctcttcattcccactgcacttggtgctgctttggctgactgggaacaccccataactacagagtctgacaggaagactggagactgtccacttctagctcggaacttactgtgtaaataaactttcagaactgctaccatgaagtgaaaatgccacattttgctttataatttctacccatgttgggaaaaactggctttttcccagccctttccagggcataaaactcaaccccttcgatagcaagtcccatcagcctattatttttttaaagaaaacttgcacttgtttttctttttacagttacttccttcctgccccaaaattataaactctaagtgtaaaa

SEQ ID NO: 352190 - DNA, 1130 bp, Homo Sapiens
ggtccggattcctcgatgcgcaccgcctcctgggactcggaacgcagcgctcggagccatggcctcggcccccgcggaggcggagacccgacagaggctgctacgcaccgtcaagaaggaggtgaagcagatcatggaggaggctgtgacacgcaagtttgtccacgaagacagcagccacatcatctccttctgtgcggctgtggaggcctgcgttctgcacgggcttcggcggcgggcggctggcttcctacgcagcaataagattgcagccctctttatgaaagtgggcaagaacttcccgccggctgaggatctgagccgcaaggtgcaagacctggagcagctgatcgagagcgcgagaaaccagattcaaggcctccaggagaatgtgcggaagctgccgaagctgtcccaacttgtccccacttgccatcaagcatctgtggattcgcacagccttgtttgagaaggtcctggacaaaattgtgcattaccttgtggaaaacagctagtaaatactatgagaaggaagctctcctgatggaccctgtggacggccccatccttgcatctttgttggtggggccctgtgccctagagtacaccaagatgaagactgcagatcacttctggaccgatccctcggctgacgaacttgtccagaggcaccgcatccacagctcccacgtgcggcaggactcgcccaccaagcgtcctgccctctgtatccagaagaggcattccagtggcagcatggatgaccggccatccctctctgcccgcgactacgtggagtccctgcatcagaactcccgtgcacccctctctatgggcaaacaacgttcttgttcagcccagggaccacctgggagctgtggccagggtacctgtccctgcaccaaacggctgacgtcatgaaccttgaagggacacccaacccaactgatgaacgggtcctggggggggacctgaactatgaaaaaaagcgtctactggggactatgccatgaacattcccctttggaagaaattgttaaactgcactggccaccagaaaagtgaaccccggggggaacagggggaatgggcccccccaggaaggggatcccaaagggcggccctttcgc

SEQ ID NO: 352191 - DNA, 771 bp, Homo Sapiens
ggcgggggtgcagactgcgaaaggcgatagtacttcaggggtccaaaaaacccttcaatgccagccacatacctgctccctccaataatgaagtacccagctgtgtcattataatggaaatcctcccggaagctaatggtctgattgtggtagcttttcaaatcctgtccaatgctagtggttactactatctggcctccgttaaaagagatatccagtcgaaaccactccttcaaaggtatgatgaatttagtttttacagcaaggtcttcccctttgacaagatgcatctgaatatgcaaatagccctcttccgtaagaaatacagaaggtgtgccgtacatctcattagagtcaacaaagtacagaatcccacagaggtaggccttgcaataatggagtaaataaagccacaatgaaacagtaaacactgggtaatccatcctctggcatcgagtggcctccagctctcggttccgaaacctcgggaacttcttgacaatgcctgtgttttctccactggaggcataaggaaagccaagcagggcaaccacatcattttccagaggacactgtgaaatcctgtttgcccgaaggttccaaatataacccatgtatccactcaaggcacacttgatgatctttgaaagggcgttcaaaaggcgggatggtctgcaggagggtaataattcttagctacagcatggagcaagtttacctccccatttaacattccagtctctggcactgtatttgagagtaatccagggg

SEQ ID NO: 352192 - DNA, 1385 bp, Homo Sapiens
  misc_feature (1144)..(1144): n is a, c, g, or t
  misc_feature (1229)..(1229): n is a, c, g, or t
  misc_feature (1234)..(1234): n is a, c, g, or t
  misc_feature (1236)..(1249): n is a, c, g, or t
  misc_feature (1252)..(1255): n is a, c, g, or t
  misc_feature (1257)..(1257): n is a, c, g, or t
  misc_feature (1259)..(1261): n is a, c, g, or t
  misc_feature (1263)..(1263): n is a, c, g, or t
  misc_feature (1279)..(1279): n is a, c, g, or t
  misc_feature (1354)..(1354): n is a, c, g, or t
  misc_feature (1376)..(1376): n is a, c, g, or t
  misc_feature (1380)..(1380): n is a, c, g, or t
ctggtaccggaccggaattcccgggatcggaagtagggcctgatgtaaacacccgagccgggctccaaggcccgggaggtcagaaaaccgggccgcgggcggcaccgacagctggggcccgggtcagggacacgcggaggtcaggccggtgaaggcggcaggaagctggagcacgatcccaggaggaacaatcctgcaccatgactcaacagccacttcgaggagtgaccagcctgcgtttcaaccaagaccaaagctgcttttgctgcgccatggagacaggtgtgcgcatctacaacgtggagcccttgatggagaaggggcatctggaccacgagcaggtgggcagcatgggcttggtggagatgctgcaccgctccaaccttctggccttggtgggcggtggtagtagtcccaagttctcagagatctcagtgctgatctgggacgatgcccgggagggcaaggactccaaggagaagctggtgctggagttcaccttcaccaagccagtgctttctgtgcgcatgcgccatgacaagatcgtgatcgtgctgaagaaccgcatctatgtgtactccttccccgacaatccccgaaagctgtttgagtttgatacccgggacaaccccaaggggctctgtgacctctgccccagcctggagaagcaactgctagtgttcccgggacacaagtgtgggagtctgcaacttgtggacctggcgagcacaaagcctggcacctcgtctgctccattcacgatcaatgcacatcagagtgacatagcctgtgtgtctctaaaccagccaggcactgtagtggcctcagcctcccagaagggtacccttattcgcctctttgacacacaatccaagggagaaactggtggagctgcgccgaggcactgaccctgccaccctctactgcattaacttcagccaccactcctccttcctctgcgcttccagtgataaaggtactgtccatatcttagctctcaaggaaacccgcctcaacccgcctccgcgctcgctcgcgtgggcaaggtggggcctatgattgggcagcacgtggactctcagtggagcctggcgagcttcactgtgcctgctgagtcagcttgcatctgcgcttcggtcgcaanacttccaagaacgtcaactctgtcattgccatctgcgtagatgggaccttccacaaatatgtcttcactcctgatggaaaccgcnacacncnnnnnnnnnnnnnnacnnnnanannngngatgatgataactttnaaggaccctgggggctgtgctagggactttatttggcagtacagtagaagtgagctttacaatgtgtggtggtantatatggaagccaccagccagnaagnagtaa

SEQ ID NO: 352193 - DNA, 1390 bp, Homo Sapiens
  misc_feature (431)..(434): n is a, c, g, or t
  misc_feature (492)..(492): n is a, c, g, or t
  misc_feature (524)..(524): n is a, c, g, or t
  misc_feature (527)..(527): n is a, c, g, or t
  misc_feature (565)..(565): n is a, c, g, or t
  misc_feature (668)..(668): n is a, c, g, or t
  misc_feature (701)..(701): n is a, c, g, or t
aaggcctggaggtcagaaaaccgggccgcgggcggcaccgacagctggggcccgggtcagggacacgcggaggtcaggccggtgaaggcggcaggaagctggagcacgatcccaggaggaacaatcctgcaccatgactcaacagccacttcgaggagtgaccagcctgcgtttcaaccaagaccaaagctgcttttgctgcgccatggagacaggtgtgcgcatctacaacgtggagcccttgatggagaaggggcatctggaccacgagcaggtgggcagcatgggcttggtggagatgctgcaccgctccaaccttctggccttggtgggcggtggtagtagtcccaagttctcagagatctcagggctcttgtgacctcctgccccagccctggagaagcaactgctagtgttccccgggacacaannnngtgtgggagtcttgcaacttgtggacctggcgagcacaaagactggcacctcgtcttnctccattcacgatcaatgcacatcagagtganatngtctgtgtgtctctaaaccagccaggcactgtagtggnctcagcctcccagaagggtacccttattcgcctctttgacacacaatccaaggagaaactggtggagctgcgccgaggcactgaccctgccaccctctactgnattaacttcagccacgactcctccttcctctgngcttccagtgataagggtactgtccatatctttgctctcaaggatacccgcctcaaccgccgctccgcgctggctcgcgtgggcaaggtggggcctatgattgggcagtacgtggactctcagtggagcctggcgagcttcactgtgcctgctgagtcagcttgcatctgcgccttcggtcgcaatacttccaagaacgtcaactctgtcattgccatctgcgtagatgggaccttccacaaatatgtcttcactcctgatggaaactgcaaacagagaggctttcgacgtgtaccttgacatctgtgatgatgatgacttttaaggaccctgggggctgtgctagggacctgcagtggcagaactgcagagctgagccttggcagtggggcgtgcttggaagccaccagccagcaagcattaatggggctggtgcccactttccactcagcagagctatgtctaaataaagagctcacttccccccagcacttcttgatgactgtgtgccccaagggccaggccagagacccaggaaggcagcgaccccttgggatccctaacctggaggaaattgccagggacccagagggagtgccctaatccaacctggggattttttaaaagcttcctaggaagagatgatctccgatgtgatgaatacgaataaaaggcccttaatggcaaaa

SEQ ID NO: 352194 - DNA, 524 bp, Homo Sapiens
  misc_feature (91)..(91): n is a, c, g, or t
  misc_feature (104)..(104): n is a, c, g, or t
  misc_feature (106)..(106): n is a, c, g, or t
  misc_feature (108)..(108): n is a, c, g, or t
  misc_feature (191)..(191): n is a, c, g, or t
  misc_feature (443)..(443): n is a, c, g, or t
  misc_feature (455)..(455): n is a, c, g, or t
agggtgccctggctggagctgtcatcacacacacccctcagctcggaggctgtgggctcctcaaagctggagaaagaggccaagatttttntgcacacggagtngngngataggagccgggccaagcgctggcccctcagcggtgagccctgcccactcttaccgagcaaggtgggtggctctggtacgantcccccaggggaagagcatggctaccagggagctgcagcggagccctccagccctcaccccaggccagccccaccccggcctctttgagaattctcagaactttgtacctttcccctgatttttaaaaccctttttctaaacagacttgactttcttacaaaatgcatttgggaaaccagacctttgctacccaccaatgtctctggggttttgtaccagtccctgcttttcagggccaccctgcccagggncccaggggccgnctttcccctccacatttagggatgttcctggttccatcttgggccgggttaatttcgtgttgggcttgc

SEQ ID NO: 352195 - DNA, 736 bp, Homo Sapiens
  misc_feature (57)..(57): n is a, c, g, or t
  misc_feature (116)..(116): n is a, c, g, or t
  misc_feature (425)..(425): n is a, c, g, or t
aattgggctggtccccgggtcaggaagaagacaagcggccccgatgatgcacatgancccccacgttgtagacactcatcccgatgtacttgctgtcgttgagtgcggggatgctnacgttgcgggtctcccaagctaagaaacaaccgaacaacatgagaagtcccttgtaggcatagacgatgccaagccagatggtcatatgggtgttctcacagtgctccaggagagggcggatggagatatcccgtcctgctgggtccggctccatgctgtacttctccactgtccttcgcagggggtccacagcctgccagcagatcaggatacacaggtcgatcagcagcatgccccccacgatcacaagcagtttctggtccttgatgatcttcttcttcattttcacatttttgaagatggcgtgnactctcccaggtctttgcaaacatggcccccaaaaagcggtccgtgtaagcccacggtgagaatcccaggtcctgacggtgcaaagtgtttcaaaggtcttttcagagacaaaggatccatcaaggccaaagagaaatacgaaagcataggaaagcatccctccaaggatgataaggttgttcatgtatggactcgacatctttatgagcttctgattccggttcttgatgttgaagaagagaaaagcactggccatgatcatcccgaggatggtgagggcagagaggatgctgtagagaggtagggagat

SEQ ID NO: 352196 - DNA, 1116 bp, Homo Sapiens
gaggctggaccggtccggaattctcgggatacagtctcaagtttccactgaatggtaacaaagactgtagaatgttgttggtactgcagtgagaggcatgcttccttagaccaggcaacatttcatttgttgcatttccagtttccaataccaactcacctacaaagattttaccaaaaaccttaggaccaataaatgtgaatgttggaccccaaatgattataagcacaccacagagactaaccagttcaggaagtgttctgattgggagtccatatacccctgcaccagcaatggttactcagacacacatagcagaagctactggctgggtccctggtgatagaaaacgggctagaaaatttatagactctgatttttcagaaagtaaacgaagcaaaaaaggagataaaaatgggaaaggcttgagacacttttcaatgaaagtgtgtgagaaagttcaacgaaaaggtacaacatcgtacaatgaagtcgctgatgagctggtgtcagagttcaccaattcaaataaccatttggctgctgattcggcttatgatcagaagaacattaggcgaagagtttatgatgctttaaatgtgctaatggcaatgaacataatttcaaaggaaaaaaaagaaatcaagtggattggcctgcctaccaattctgctcaggaatgtcagaatctggagatagagaagcagaggcggatagaacggataaagcagaagcgggcccagctgcaagaacttctcctacagcaaatcgctttcaaaaacctggtacagagaaatcgacaaaatgagcagcaaaaacagggccccgccggctctgaactctaccattcagctgccattcataatcatcaatacaagcagaaaaacagtcatagattgccgcatcttcagtggacagttttgagtatctttttcattttgacaacacctttggagatcctggaatgacataaagtactaaaggcggaagggggaaatgtccctttgggcctggaaatcaggcaaatggccctctggaaggatctgaaacttgggaaaatccctgtgcccaaaggggtttttaaaagggttaatatcccagaattctccccccggg

SEQ ID NO: 352197 - DNA, 2822 bp, Homo Sapiens
agcggggcgggggaagcggggctgtagctgggcaggcagagggcggacgaaatcggtagcgatctcggctgcggcgctgccgcagctgcccggcccgcggggcgcgccctgacccttcatctttgggcaggctcgagggcgcgcgcacggttggcgttctggggcctcaaactcctgggccttgaccgggcaggccgcgtctccccgggtgtgagtccaccgggacccggccgccgcctaagcgcgggcgccacagaagcggcggcgcccgaagacgcgctcctggctcggcccgacagcctcgcttggccgccagttcttctgcagccgaaggcggttgttcttttaaagaattattgaagacgaagggtctcttctttttatctttttaatggctttacagaatcttaaatagaatacagtttgacatgacggcaaaaaatgttggtttgacttccacaaatgcagaagtaagaggatttatagatcagaatctcagtccaacaaaaggtaaatacctagaagtggaattgcctgggtcatatggcaacatttcatttgttgcatttccagtttccaataccaactcacctacaaagattttaccaaaaaccttaggaccaataaatgtgaatgttggaccccaaatgattataagcacaccacagagactaaccagttcaggaagtgttctgattgggagtccatatacccctgcaccagcaatggttactcagacacacatagcagaagctactggctgggtccctggtgatagaaaacgggctagaaaatttatagactctgatttttcagaaagtaaacgaagcaaaaaaggagataaaaatgggaaaggcttgagacacttttcaatgaaagtgtgtgagaaagttcaacgaaaaggtacaacatcgtacaatgaagtcgctgatgagctggtgtcagagttcaccaattcaaataaccatttggctgctgattcgcaggcttatgatcagaagaacattaggcgaagagtttatgatgctttaaatgtgctaatggcaatgaacataatttcaaaggaaaaaaaagaaatcaagtggattggcctgcctaccaattctgctcaggaatgtcagaatctggagatagagaagcagaggcggatagaacggataaagcagaagcgggcccagctgcaagaacttctcctacagcaaatcgctttcaaaaacctggtacagagaaatcgacaaaatgagcagcaaaaccagggccccgccggctctgaactctaccattcagctgccattcataatcatcaatacaagcagaaaaaacagtcatagattgcagcatctccagtgacaagttttgagtatcttttcaatttttgacaacaccctgtgagatccatggatgacatagaagtactaaagcgggatgggaattgtcgtttgggcctgggagtcaggcaaatgcttcttctggaagatctgaaacttgcgaaatccctggtgccaaaggctttagaaggttatatcacagatatctccacaggaccttcttggttaaatcagggactacttctgaactctacccaatcagtttcaaatttagacctgacccactggtgccaccttaaccccagtcaagtgtaaaccaagggttatgcttggatgcagaagtggccttagcaactgggcagttcctggccccaaacagtcaccagtccagcagtgcggcctctcactgctccgagtcccgaggcgagaccccctgttcgttcaatgatgaagatgaggaagatgatgaggaggattcctcctccccagaataaagacaagagaaagcctacgtttcaatatgtgatgctcatgtgtgtttgtagtgtgagctcttgtttttgaaatgattgcttcagtctttgcctttgtttgcactgtgtgttcagtgaaaactagagaaacacaataagcaaatcacatgaaggctgagatgattgagatgaaagttaacatagtgtgaatgaaagtctggccaacagagcagtagatgatataacaaagaaagcatgctttctgaggagatagtggggataatccctgaagagttggcagtgtgagtgcaactcatttatcttctgtgaggtgggatttttgtgttcctcacacccatgtaattattcttagaattgagattgctacacggagcagtccttgacgatcgtgtttctgacgtttctcttccttgcctggactgcctttgacaaggcagaaatgaacatgaaaagtccccaggagaggggagctgtgtagtgagggatactgagggcagtcctgtggctgaggggcacagattgaactgctgaactagttggaggtctagatgaggtgctttacgcatcagctgccttagacagcttctagaaaagagcgagcgctacttcttaagtacttaagtgacatttagataatttatagtaaaactgaaaattattattagcccaatgcattggtgccatagaatttactaagggctactttctggaagccaaaatagaatagcatttccatgtgcattaaatactttgccagcactgcctttgccagcatcctaaatctggagttttacaaagaaggaaactgtatctttaggttaatcaaagctatgcatttcatatagctttttcatttaaaacaagacaaagaaacaaattcctatgaccaaattgcttgcctacagttcactgcagtaattgtatgatctcacccagtgtgcaatttgtgaaaatgaaccaaatgtcattacttttgtcttaaagaaaagtctatttcaag

SEQ ID NO: 352198 - DNA, 753 bp, Homo Sapiens
agcgtggtagaatgttgttggtactgcagtgagaggcatgcttccttagaccagattataagcacaccacagagactaaccagttcaggaagtgttctgattgggagtccatatacccctgcaccagcaatggttactcagacacacatagcagaagctactggctgggtccctggtgatagaaaacgggctagaaaatttatagactctgatttttcagaaagtaaacgaagcaaaaaaggagataaaaatgggaaaggcttgagacacttttcaatgaaagtgtgtgagaaagttcaacgaaaaggtacaacatcgtacaatgaagtcgctgatgagctggtgtcagagttcaccaattcaaataaccatttggctgctgattcgcaggcttatgatcagaagaacattaggcgaagagtttatgatgctttaaatgtgctaatggcaatgaacataatttcaaaggaaacaccacaagaaatcaagtggattggcctgcctaccaattctgctcaggaatgtcagaatctggagatagagaagcagaggcggatagaacggataaagcagaagcgggcccagctgcaagaacttctcctacagcaaatcgctttcaaagacctggtacagagaaatcgacaaaatgagcagcaaaaaccagggcccgccggctctgaactctacccattcagctgccattcataatcatcaatacaagcagaaaaaacagtcatagattgcagcatctcc

SEQ ID NO: 352199 - DNA, 2107 bp, Homo Sapiens
  misc_feature (42)..(78): n is a, c, g, or t
tagatcactatgggcgaatcggagtaacgcggtggcggccgnnnnnnnnnnnnnnnnnnnnnnnnnnnnnnnnnnnnnatcaggccaaatcggccgagctcgaattcgtcgagagcggagagtcgcgggcggccgcttgggcgcacttgccgggtcaccttgtcccggaggagaaatggcttccctgaggcaagtgtaacctacattcccagcccaccagcctgacgcccagccagggagagagtaccatggatggcatcattgaacagaagagcatgctggtgcacagtaaaatcagtgatgctggcaagaggaatggtttaattaacaccagaaacttgatggccgagagcagagatggtctggtgtctgtttacccagcgccccagtaccagagccaccgggtgggggccagcacagtgccggccagcctggacagcagcaggagtgagccgatgcagcagctgctggaccccaacaccctgcagcagtcagtggagtcccgctaccggcccaacatcatcctctattcagagggcgtgctgcgctcctggggggacggtgtggccgccgactgctgcgagaccaccttcatcgaggaccggtcgcccaccaaagacagcctcgagtacccggatgggaagttcattgacctctcagctgatgacataaaaatccacaccctgtcctacgatgtggaggaggaggaggagttccaggagctggagagcgactactcaagcgacacagagagtgaggacaatttcctcatgatgcccccgcgggaccacctgggcctcagtgtcttctccatgctctgctgcttctggcctctgggcatcgcagccttctacttgtcccatgagaccaacaaagccgtggccaaggggggacttgcaccaggccagcaccagctcccggcgggccctattcctggcagtgctgtccatcaccattgggactggcgtctatgtgggcgtggccgtggccctcatcgcctacctctccaagaacaaccacctgtgagcttcctgcgaatggagggggagcacccggggccaggtctgtgtggacgtggaggaagcaggcataccgcatgatgctgtacagtacaaatgattgccaaatgatgccacgaagccctgggatttcctacccatggatttattttgtttttatccctttaatttcatgttcacagcactgtgtagagcaccagacagacgggcactgctaatccttccaaaggaaagcttccaaagatcccagcccgcaaggctgtctctggatggattctggtggatgaatggcaacgcggctctctgcagcctgccagtgcccagagtgccaccgcattagcaatatacaaacagtccaaaaaagtgtttattttttatggaatacggtgcaataggcagaggacaagggacacatcactcttctgtctgtggccctgctggagtcctttgtgccccccggagtccacacgccttccctgcaagacgagaatggggctgggaagaaagaggcaacaccacggctggcaggagccccgctgcactgctctgcagacccattggcctgaccctgagaagcagagccagcaaagcccgggacctgcccctctttctttcccttcacaccaccccagcctcaggatgtcaagccacctccggaacgtgtctacactccacagctaccccgcagcaatacgcactcttgggacctcgctgatctaggatggggaggcaggccaccgcccctcccaagactcctcaagaaagagccccgcggttgctccggaaactcgaggcactgcagctatgggcactgcctcagcctaaagacacaggggcgcctcccaatcaccgcgctggcggatgctcaccccgtcataagcagaaactagtgatcctggaaatgagatgggccttactctgtcgactaaatgaatagctattttcttgtcattttttaaagtgcaactcttgcttcatgctgcttaagttaccagatgaatgctgagaaataagtaatcacagacattttaataccatttcattgctgttttacgagtgttcattacttaacaaaaaattatctttta

SEQ ID NO: 352200 - DNA, 917 bp, Homo Sapiens
gcgtctatgtgggcgtggccgtggccctcatcgcctacctctccaagaacaaccacctgtgagcttcctgcgaatggagggggagcacctggggccaggtctgtgtggacgtggaggaagcaggcataccgcatgatgctgtacagtacaaatgattgccaaatgatgccacgaagccctgggatttcctacccatggatttattttgtctttatcctttaatttcatgttcacagcactgtgtagagcaccagacagacgggcactgctaatccttccaaaggaaagctccaaagatcccagcccgcaaggctgtctctggatggattctggtggatgaatggcaacgcggctctctgcagcctgccagtgcccagagtgccaccgcattagcaatatacaaacagtccaaaaaagtgtttattttttatggaatacggtgcaataggcagaggacaagggacacatcactcttctgtctgtggccctgctggagtcctttgtgccccccggagtccacacgccttccctgcaagaacgagaatggggctgggaacgaaagaggcaaacaccacggctggcaggagcccccgctgcactgctctgcagaacccattgggctgaccctgagaagcagagccagcaaagcccgggacctgcccctctttctttcccttcacaccacccagcctcaggatgtcaagccaactccggaacgtgtctacactccaacagtaacccgcagcaatacgcactcttgggaacctcgctgatctaggatgggggacgcacaggccaacggcccttcccaagaactcctcaaggaaagaagcgccggagttgctccggaaaactcgaagcactgaaggtatgggaactggcttcagcctaaaaacacaggggcgccttcccataag

SEQ ID NO: 352201 - DNA, 452 bp, Homo Sapiens
caaaactggaaatgtgcagaaagtaggctttggttaatttgtggattcatttttatttttgtctttgtttaactttttaaaaaataagatttctggagtagattggtatattctgttaaagacttacagtgatccattttgcttacactgttgcatcacaagggactcacccagggaccatgacctgctggtgtgtgtgtatatttacaaaaacaaaacaaacaaaccacccattgggatataaggtagcaatcacaaactaaagactgcggcttgttgaggtgcaataccctgactcccaaagttagttacagtgggttttattgtttttgtgactgaaggatttattcagactgctgtactcttcatttgatgtaacaaaatgctattaatctaaatatttgtaaataaagtacctgtatctagattaaattaaaatgggtggcatattt

SEQ ID NO: 352202 - DNA, 1619 bp, Homo Sapiens
gggtcggtaccgatggcgaatccgcaagattaccaaagcctactttctgcacattccagttttggcttttatttaacattgactatacaatactctggtactaccacatgtttacaacccagaaagatgtacttttatgttagtgtctgtaaagagggatttaaaatgtgtattttaaacacagcagttgagctgagtgcattttctatagtacgctgaggtgttacctattctatttcaaataaattctcaattcccagccactgaatcataaatgcaataaaaaaaatcaacagaaatgaagaacttaataaaacatgttgtccaaaaaaataagattgtttctcttgctatacagtattaattcagtggccaaaccacctggtgcaaagtaataacttactttgtatcagcacaagcgctgaaacacctttagaaacactttcccttttacaaaacaatttatgccaacatgacataaaacagcccctcacactgtgaacacagggatatcttaagttatttcactgtagggttaaaaatgcacaatttaaaatcccttaacagcagacctgtggttctgactgtccagttcagaatctgaccattccaagaagataaaggtataaaagcttaaaatgtgcaatagtaaacccagccttttttctttttctatacagtaaggcaagaatgcagcctgtaatgcaaaaacgtttacaaaaagagaaaagcaggttagcacattgtcgattgcacaagaacagttaagaaaatcagcaggtaagcaacagtgcaaagatggaacagaatctgctagtgttaatcctctgatgctaggagctctttccagcataatgtccccaaacactgccagcaccaaggggtggagccagtactacttgtgaactgcagttgtgtctatttctttgtgtgaaatggaagggagtaacatggtcacatataggtcatactgtacaaactggtattttatactgttccaatgccagtaatcaatttattttcttcattaaaataatatacacagaatgtattgttagttcgattccttcaaattttatacatatttactttctgttaaagagaaaaggataaaatggtataaaaaaagataaagctattaattaagcacgagagagaagataaatggatattttccctgtgtgaggctaagacagaagcaaatctcgttaagaaaaatgccacccacacaacaggaaatttatccaaaacaaaacaaaagcagttatagaaccccttctctaccatcagaagtaatttcacagcaataaacttattggttacaacagacatacttgaacagttaaggatgggaagaaaggcttaagatatcaccaaattaaaccgtacaatgagacaaagccttgccaaagggagggtaaaaatcatgaagtccagcatcagtgctcggtttaaatcatatattggtgacatacttatcacgaggacaagggggaaaaaaagtctagatttaccatgcaggagagatttattactctacttgcctttgataacctgattacatctagttgtttagcagtttagtattgtgttaaactgtttttacaacagagtttttt

SEQ ID NO: 352203 - DNA, 554 bp, Homo Sapiens
tcttcctgcagggaccctgggcatcctgctgctgggcctgggcctatagactgccctgccccttcttcccaaacactgagaagaccccgctggagatgaccccaaagccacgcctgctctacggccctaagcaatagacgcctgccctggctgctgatgatggtgatccctttgtcctttgacttggcagtcaaaaatggagtgacaccccagactcagtcaggaagagaacctgcagcctgcctcagctcaggctaccacgccaggctccactcgctggtatttccaggcttgctaagtactaaccaactcatccccagtaacactgcatgttcatatcctgaattacaaatcaaaatgagcaaacacgtgcataagcaaatgagaaaaaagaaggcacacatcaaatgatgagatgtgcagccagtgcaggtaccccgggagtgttgcaagttaaactgatgaaaagacgtttagtatttaattgctcctcatgtaacattactctgcttcagaaatgttttgtattttgatataaataaacatttgctaaa

SEQ ID NO: 352204 - DNA, 729 bp, Homo Sapiens
acagacagacacagggaagccaggtgggagaattctatcctgcatgatcaaagtccctcctggggaagagaaaaacactgaagaccaaggggcaggagtcactgacatgaagcgggatgtggtcccttcacgtcagtgactgcgcccccttctgggccctctatccccagccccacacctagcagttaggaaattaaatctgaatgggaggtcaagaccttctgacactgatacagacgacttagcaagtggagcgttaaactgctcttctcccctagccaacaattcccctttctaacacctcagtctaaagttccacgaattcaagaacatcccatcaagataccttcctcccagtccctggactctgagactccaccctccaatgccacaggcaaccccctgtggacaggaagtgtgtgtgcaggcttgcctcttcccccacctcctactttcagaccgcccaaagtggatcaccatgaacatctaccgccaagaagagtggaagcgggaagcaggcagcaaaaatccacgacagagccttttccccaagctgctggttggtgacagtagggaagagggacagggcccacactgaaccatgggagagtgattctcacacatctccctattcccgactcttgctctatatagtagacagaggtagcaagacagaaacaactcctcagatacctccaccttctaccaaagggaaaagcaccaaaattc

SEQ ID NO: 352205 - DNA, 711 bp, Homo Sapiens
  misc_feature (33)..(33): n is a, c, g, or t
  misc_feature (106)..(106): n is a, c, g, or t
ggaaaaaaacaatgtaaaatcctctgtaaaatnaatgttgtcctaactgtaatgattaatctctgcctagtgttaagaaaagctcccactactgtgtgtgtctgtnccgttaacatcgcgtgcgcatgtgcacatactgcagtcttgactttccaattacaaaatgcctaagtcaggtcacattgtcttcttccagccagtttctaaggcaggcaatggaaacaggagccgatgccaaatggtctagaggcagaagggctgcatgctttgcagggccagccccaaggctgccttccagagctgcactttctctggggacagtaaactctcaccgcagctgccagccccctgtgcttggccatgcccctcacatggacttggaatcagtgtctctcttgctgatgagcacctccaggagcctcagtttcgcctttatgtgcttatattcactgtattcttcagccataggagtgcggtcttccttctggacatttcttccattctgtctgaaaaagttgtcttcaaaatcccgaagtttctttcgaaaccttttcttttcttctctcatttcctggaggtgttccaggagttcaggtattgaggcagcatggagatttgaaagccctgtgtcctggctgcattttgatggtattttatcatccattgggcaaataaatccatcagcgtcatcttcgaattggtccaaaaagc

SEQ ID NO: 352206 - DNA, 497 bp, Homo Sapiens
  misc_feature (182)..(182): n is a, c, g, or t
caggctgtagccggaccctcttctggccaagccagggcagaatacccaatgaggctgaatatctactaaaaccttttcctccattaacttgccagatattcaccatcttttccaaagcgcctgctagatatttgccactgatactccaggaaactggtgagaaacttggatcactgggtgancccaggctttcctcagcatccccttccaatctgttgaacacacaggtctgttgcagtgaatattgcttcttggtaacattccatacgcggatggtgccatcattgccacttgtagccaaaagaccttttttattacaccaaacacatgtcattactctgttctgatgagcctccaatttgataaaggagcattttctaagatctcctcccatatcagcaagtgtctgcagcgtcgtttggttgtcacggtcgtgtgcagcaagagtgcgcacgagttgctgagctgcccattgcctattctgtgaggacatcctg

SEQ ID NO: 352207 - DNA, 1173 bp, Homo Sapiens
ggcagtaacctcacgggtataaggtagcgaggcctgggtgccgaattcggcacgaggcaggcctggcccatccagagatggggcagaggtgggcctcccactcctgtgctctcttctgagcaggaactgggcccttgacagtgtcctttgacattccctcgccctaccaaagatcgtcttttctcctcccacctctgtcaccaccaaagacgggcggaggtggggctgggccctcctgcccccgcccatcccccttccatgagcccagacctccctgggtggtgctaggctctgagctgggggctcagaccagggatcgctcaggcccctgtcacctgtgggcccggggaccacttgggggcaggtcagaggatgtatgtggccggaccagcttccccaccttcattaggacaagaaactgcccagcactttgccttcagttcaacgcacaaacgctcctggggcctcatgggggcagagcctcccctgggcctgcagagagtcctgttagcagcgacgtccccccgccgcggggtcctgtcagcccggcagtgtcttctcagtgtcttcacctgagcgagtgtctgtggacccaacgcgttctgctgtggctctgccctttccaggttgagaggcctgcaggagaaacacactcccctcctgggtttccacactcaggaggtcagaggactggctcctgtgaccagggcccctctcccctgaatgggaaaggggtctggggatgggagggcgcaccacagagaggagatgatgctgggtgtggcccatcttctgtgggccccttcccagacaccggatccatgggcactaacccgcctcccaggctgatgcccggaggcagcttcctgggcaggagggttccatgggcactaacccacctcccaggctgatgcctggaggcagcctccagggcaggaaggaccctgtgctccccgccccccatcctgacatcctgttcttttgcacttaccctgtgctgtgaatgtaacagtgggccttggccccgcccactctgatttgcattttcatttgtgtttgtttacacatccatgcactgcctgtagcagtcgattgtcacagcttcgacttttggatggtagagtgtgtgcactgactgtgagtcgaataaacaattgagacgatttccttcca

SEQ ID NO: 352208 - DNA, 373 bp, Homo Sapiens
  misc_feature (327)..(327): n is a, c, g, or t
  misc_feature (330)..(330): n is a, c, g, or t
gaaaaataacgcttcaatgcttttaaaacagcaagataatagttctttgatactttgagaggcgctttgatgaccctcatccaagtctatgacactttcctatggttttctgtattctatgtctggatggagctgttaaaagatgaacaaattggtggatatttggggaaagcaacacaaatcttaaaactcacccgtgaagtgtgagaaaacaaggaggggaacaaatgggacttaccaagcaaggtcattgttgtgaaaagtctgtaaatgcttctaactcttccccctcttaaaatcataatagttgtacagaattttaaaaanggnaaagtttaaaatacctatataatagaggaaaattagaggaagc

SEQ ID NO: 352209 - DNA, 1089 bp, Homo Sapiens
  misc_feature (39)..(39): n is a, c, g, or t
  misc_feature (41)..(41): n is a, c, g, or t
ctcattttcatcaaggttcctgatttcttgataggtagngntaacttatgtaattgtagaaagtaacatattctctgaacagtgcgaaggtataaagcaaagcctcgtgactgcctgtttctcgctttaccaggactttctgaagaccttttcccccgatgtcttccggttcttctgcctgcggagcagctaccgctcagccatcgactacagtgacagcgccatgctccaagctcagcagctgctcctggggctgggctctttcctggaggacgcacgtgcctacatgaaggggcagctggcctgcggctccgtcagggaagcgatgctgtgggagaggctctccagcaccaagagggccgtgaaggcggccttggcagatgattttgacacacccaggtggttgatgccatcctgggccttgcacaccacgggaatggacagctcagggcgtccctgaaggaacctgaaggcccgagaagtcctgctgtgtttggtgccatcatctcttactttgaacagttttttgaaactgttggaatttctctggcaaatcaacagttggcaaactctcgtgcgcagaaccagagatgagtccatctcagcaacagaatgtcgccagctctgcacacacgtttatgctcaaagactctcagaatgtgcagaagtcacaggcacatacgtttcaggagacggcagcgaggctaccttgcatggtgtggtggacgagctggtgcggttccggcagaaggtccggcagtatgcgctgcccatgcccgaggccacgggggacgcccggcggcagcagctcctagaaaggcagcccctgctggaagcatgcgacaccctgcgccggggcctgactgcccacggcatcaacatcaaggacagaagcagtacaacatccacgtgggaactgctggatcaaaggacaaaagacccaaaaatcagcgggctgaggatggagcacagccatgaacctgctcacgacaagacgcacccatgcttctcagggtcaaggctttatgttaaagcttcctgtcggggctgctaggtcagcattaaagtaaggcaacctacagtaaggcc

SEQ ID NO: 352210 - DNA, 839 bp, Homo Sapiens
atggcctggtacggtccggaattccgggatatcgtcgacccacgcgtcgtgctcctggggctgggctctttcctggaggacgcacgtgcctacatgaaggggcagctggcctgcggctccgtcagggaagcgatgctgtgggagaggctctccagcaccaagagggccgtgaaggcggccttggcagatgactttgacacacccagggtggttgatgccatcctgggccttgcacaccacgggaatggaccagctcagggcgtccctgaaggaacctgaagggccgagaagtcctgctgtgtttggtgccatcatctcttactttgaacagttttttgaaactgttggaatttctctggcaaatcaacagtacgtttcaggagacggcagcgaggctaccttgcatggtgtggtggacgagctggtgcggttccggcagaaggtccggcagtttgcgctggccatgcccgaggccacgggggacgcccggcggcagcagctcctagaaaggcagcccctgctggaagcatgcgacaccctgcgccggggcctgactgcccacggcatcaacatcaaggacagaagcagtacaacatccacgtgggaactgctggatcaaaggacaaaagaccaaaaatcagcgggctgaggatggagcacagccatgaacctgctcacgacaagacgcacccatgcttctcagggtcaaggctttatgttaaagcttcctgtcggggctgctaggtcagcattaaagtaaggcaactaaaccaccacacaccgcggcgccgcccctacagtttccctcgaagggccccaagattaccacgcttacccag

SEQ ID NO: 352211 - DNA, 1314 bp, Homo Sapiens
  misc_feature (110)..(164): n is a, c, g, or t
  misc_feature (683)..(739): n is a, c, g, or t
gcaggcagagaagagcagggacaaacgcgtctggtgattaatgcattttagtagaggagggtcacaacgtggtggcagggtggtcaatacacaaatcctcgtatttaaannnnnnnnnnnnnnnnnnnnnnnnnnnnnnnnnnnnnnnnnnnnnnnnnnnnnnntaggctattaaataacaagaattaaagactcaggaaatagaaattccagttctaactgccaccctttaactatgtgaccttgaacaggctctcagcctcgctgggcttatctgtaaaacacagactagacgatcccatttcaatgctgcgaatcggctaatgagcaacactggagcacaggactggttgaaataggctcccaaatgtagaaacataaatatactctcacttacttatgatctaggcagaatgacttacctagaacttgggaatagatatagtacacgaacagtgaactgcctgtttttgacaacacagacaccacctattgaaggctatacacaagcatgaactcactctcccttttagcctataaagtagatcttactgtttaacaggtaaaatggggctgattaaggctgagcaatcaccaagtgtcagaccgcgtgccaaactccacactgtaagatgcgtcacctaagcagcatgctcaggcatgaatgagccttaaaaggccannnnnnnnnnnnnnnnnnnnnnnnnnnnnnnnnnnnnnnnnnnnnnnnnnnnnnnnnagcttaagtcagtctccactcagggaagatgcccctctcagtcatggtagacctgggcagtgggtgccagctgaccatgtaccccagtcagcagggtgagagtctgttgctatgtgcaaaagtgtgacctaaggtttaggctgcctacaggaaccagaaaactctgattctgtgtcatttacatgtgtaaaatctgaaacttggggccaggacatccaaaatgggaatcctcacttaccaacgttggaggacaccgcccggttcatgatatcaaagtgcctcattaaatttgtccttgacagatggatgtgccagcactttggtctgagaacatcgacttccaaccccaggtaccacttggtgatctcctcataatttgggctggtactgagcccaagagcacagcacctgccaaaaagaaaaattacttgcctccatcctgggcacaaatgaaaggcagatttctgaagtggcccattggttttgttttgaacccgggccctacaggctagtgacactacctttaccgggaatttataagtaacctaaaacagtcctaacaccttaatggatac

SEQ ID NO: 352212 - DNA, 1028 bp, Homo Sapiens
ttttgacaacacagacaccacctattgaaggctatacacaagcatgaactcactctcccttttagcctataaagtagatcttactgtttaacaggtaaaatggggctgattaaggctgagcaatcaccaagtgtcagaccgcgtgccaaactccacactgtaagatgcgtcacctaagcagcatgctcaggcatgaatgagccttaaaaggccacacagcacagtggttaagagggcggggcctggggttagactgacatcatctgaatccagcttaagtcagtctccactcagggaagatgcccctctcagtcatggtagacctgggcagtgggtgccagctgaccatgtaccccagtcagcagggtgagagtctgttgctatgtgcaaaagtgtgacctaaggtttaggctgcctacaggaaccagaaaactctgattctgtgtcatttacatgtgtaaaatctgaaacttggggccaggacatccaaaatgggaatcctcacttaccaacgttggaggacaccgcccggttcatgatatcaagtgcctcattaaatttgtccttgacagatggatgtgccagcacttggtctgagaacatcgacttccaacccaggtaccacttggtgatctcctcataatttgggctgttactgagccaagagcacagcacctgccaaaaagaaaaattacttgcatccatcgtggcaacaaatgaaggcaagatttctgaagtggccatttgttttgttttgatcctggtcctacaggctagtgacactactttacagggatttatagtagctaaacagtctagcacttatgaatatggattttggagtcagcctggtagctaaagtgcccttgcatgtaaactctctgagcctcagcttccatgtctacacaacagggataccatatcccctaccccatagggttgctgagaggagctgagataaagcaaataaagtgcttggaacagcttctgatacatggcaaatgtccaataaatggtaaccaataaga

SEQ ID NO: 352213 - DNA, 1118 bp, Homo Sapiens
  misc_feature (173)..(173): n is a, c, g, or t
  misc_feature (195)..(195): n is a, c, g, or t
  misc_feature (212)..(212): n is a, c, g, or t
  misc_feature (236)..(236): n is a, c, g, or t
  misc_feature (260)..(260): n is a, c, g, or t
  misc_feature (310)..(310): n is a, c, g, or t
  misc_feature (362)..(362): n is a, c, g, or t
  misc_feature (642)..(642): n is a, c, g, or t
  misc_feature (961)..(979): n is a, c, g, or t
  misc_feature (1008)..(1062): n is a, c, g, or t
  misc_feature (1099)..(1099): n is a, c, g, or t
cccgggataaagaccattccccggtcgatgtagattacaatgcggccaaaggtgtagagctgcttcccttcgtgtcgcttcccaatgatgggcatgaagacaatgttgtgctcctcagccttggtctcaatgaggtccttaaagttcatgggcacagagctagcggccacgcnaatgcccctctgagccatgttntcagcctcccgcctctnctgcatggcctcgtactggaagtncttcctccgctccgtgtgggtganataggcaatgttctcccgtgctcctggctgcatgtaggcacctaagatanaggaggacagggcggtgaggagaggtgtttccaggtgtatggaagttgacantgtggcttggcccaggtcttgggtgtgccagagtgcttgtgactcactgaagggcagctctgcctcaaagatacaactgtgtggaggaagttgtagacgactggccagtatcacataaaaactgtttagaaggttcctggctagtatctagtaaccagattattaatatttaacattttaaaatgaagtatctgcaagggatttcttccttcagagctggaaacattaatagagagttctcagctactcttctgttcccaccttgctctgtagagttttnattttccaccaccaaagaggcagcttttagtaccttgaaaacatagggcccacactggctttatttttaacctacccacacagggcccccatcctgaaagaagttcacatatatttagggagctgaaatgagtgtttaaaggataataccaagaccataaatgctaagtgctaattgaggggtatattcaggcaacagttttggaaacatgaagccaagggtagctaaggaagagtttttagaaaaaacttgataattacagaagcagagaagtatatttgccttattacttaatctctgttttcacagaataggctannnnnnnnnnnnnnnnnnngagaccgagtctcgctcttgtcacctagnnnnnnnnnnnnnnnnnnnnnnnnnnnnnnnnnnnnnnnnnnnnnnnnnnnnnnngttttaagcgatttctttcttgccttcagccttcctnaggttggctgggcattacc

SEQ ID NO: 352214 - DNA, 1372 bp, Homo Sapiens
gtactatgaggagtacaggatgtccgaccgtgtggaccttgctgtggccatcgtctatccactcatgaaggagtacttcaaggagtgggatcccctcaaagactgcacttatggcaccgagatcatctctaagtggaaaagcctcctagagaatgaccagctcttgtcccatggcggacaggacctctcagcagatgcctttcacaggttgatatgggaagtctggatgccttttgttcgaaatattgtcacccagtggcagccaaggaactgtgacccgatggtggactttttggatagttgggtgcacattattcctgtgtggatcttagataacatactggaccaactcatcttccccaagctgcaaaaggaggtggaaaactggaacccgctcacagacactgttcccatccactcttggatccacccatggctgccccttatgcaggcacggctggagccactctattcccccatccgtagtaagctgtccagcgccctgcagaagtggcaccccagcgactcctctgccaagctcatcctccagccctggaaggatgtcttcactcctggctcctgggaagcattcatggtcaaaaacatagtgcccaagctggggatgtgtcttggtgagctagtcattaacccccaccagcagcacatggatgcattctattgggtgattgactgggaagggatgatctctgtctctagcctggtgggacttcttgaaaagcacttcttccccaagtggcttcaggtgctgtgctcttggctcagtaacaggcccaaattatgaggagatcaccaagtggtacctgggttggaagtcgatgttctcagaccaagtgctggcacatccatctgtcaaggacaaatttaatgaggcacttgatatcatgaaccgggcggtgtcctccaacgttggtgcctacatgcagccaggagcacgggagaacattgcctatctcacccacacggagcggaggaaggacttccagtacgaggccatgcaggagaggcgggaggctgagaacatggctcagaggggcattggcgtggccgctagctctgtgcccatgaactttaaggacctcattgagaccaaggctgaggagcacaacattgtcttcatgcccgtcattgggaagcgacacgaagggaagcagctctacacctttggccgcattgtgatctacatcgaccggggagtggtctttgtccagggcgagaagacgtgggtgcccacctcactgcagagcctgatcgacatggccaagtgaactgtggcaggtccagaaccagtcagagacttgcccctaagagggatgtactgtaaataaacagtatttttagatcaccttcaaaa

SEQ ID NO: 352215 - DNA, 1609 bp, Homo Sapiens
  misc_feature (144)..(144): n is a, c, g, or t
  misc_feature (161)..(223): n is a, c, g, or t
gatggcggcggctggctctccgggacggtcacatcccgctgcaggggcgggcggaggccgccgcactgcctcccgcaccggggacccaggccagcgtccgggcaacgccccctgctcccggacagactccgtggcccgctcganccctgggggctccgcannnnnnnnnnnnnnnnnnnnnnnnnnnnnnnnnnnnnnnnnnnnnnnnnnnnnnnnnnnnnnnggatggggtaggggcagcgccaccgagtcgggcgatgggccgccctctgggcaccgagcagccccccgaggcctgaccaaccgcgaggaccggcggaggagccccgcctggatgtcaagcggatgccaagcggatgccacagttccccccccagcggactccgtggggacatggcttcgctggtgcccctttccccatatctaagccccacggtcctcctgctggtcagctgtgacctgggcttcgtgcgagcagaccggcctccctctcctgtgaatgtgacggtcactcacctcagagccaactcggccactgtgtcctgggacgtcccagaaggcaacatcgtcattggctactccatttcccagcaacggcagaatggccccgggcagcgtgtgattcgggaggtgaacaccaccacccgggcctgtgccctctggggcctggctgaagacagtgactacacagtgcaggtcaggagcatcggccttcggggagagagtcccccagggccccgggtgcacttccgaactctcaagggttctgaccggctaccttcaaacagttcaagcccaggtgacatcacagtggaaggtctggatggagagcggccactgcagactggggaagtggtcatcattgtggtggtgttgctcatgtgggctgctgtaattgggctgttctgccgtcagtatgacatcatcaaggacaatgactccaacaacaatcccaaggagaagggaaaggggccggaacagagtcctcagggaaggccagtggggacaagacagaaaaagtcaccatctatcaacaccatcgacgtttgagtgaagaaacacacccagaagagagatgcactaacaactggggatagggatggggtcagggggagcccaagatggtgatctgcccgagactcccagagggtaatgccactcccacaatctcaggcctggtacccatcctctttccactgtgagcagagccagaaggtaggtctgttcagagtctgtgcccctggacctggggagtggatatcagatgggatatctccttccattccccggtccaggggagagtcactagttgtaccctactccattaggtcccaaatgggggccccatttcacctgtatcaggactctgagcatccccagctgccccacatcttgcctctggccctcagagaggggtgtttctgtgggtactcctcttaccccagcaaataaaaggaattgtctgaccctagaggcagatgctgcactgcactactccaatgtcttccatggagcctcaggtgctccccctctcacctggcagccccttcagctgctagtgatatcacttgttggacatttttccaataaaggtttttggacaaactgg

SEQ ID NO: 352216 - DNA, 433 bp, Homo Sapiens
gcctactactactatacggctgcgagaagacgacagaagggaagggtgtggaaaggatggacccgtgagcctggggagtggaatatcagatggggtatctacttacattccgaaggccaggaggagagaggctaggaggaccgtactaccttaggacccaaatgggggcccacatttcacctgtatcaggactctgagcatccccagctgccccacatcttgcctctggccctcagagaggggtgtttctgtgggtactcctcttaccccagcaaataaaaggaattgtctgaccctagaggcagatgctgcactgcactactccaatgtcttccatggagcctcaggtgctccccctctcacctggcagccccttcagctgctagtgatatcacttgttggacatttttccaataaaggttcttgggcaaaa

SEQ ID NO: 352217 - DNA, 1013 bp, Homo Sapiens
gcctttgcgtgtctgggatgttcttggatccttgtccctgcggatgttatctggggcagtccagcccattccggcggccaacatggccacctctctcacaatgatggcactttcccgtgcgcagtggccgcttgtccatccagaccttccactgtgatgtcacctggggcttgaactgtttgaaggtagccggtcagaacccttgagagtttcggaagtgcacccggggccctgggggactctctccccgaaggccgatgctcctgacctgcactgtgtagtcactgtcttcagccaggccccagagggcacaggcccgggtgttggtgttcacctcccgaatcacacgctgcccggggccattctgccgttgctgggaaatggagtagccaatgacgatgttgccttctgggacgtcccaggacacagtggccgagttggctctgaggtgagtgaccgtcacattcacaggagagggaggccggtctgctcgcacgaagcccaggtcacagctgaccagcaggaggaccgtggggcttagatatggggaaaggggcaccagcgaagccatgtccccacggagtccgctggggggggaactgtggcatccgcttggcatccgcttgacatccaggcggggctcctccgccggtcctcgcggttggtcaggcctcggggggctgctcggtgcccagagggcggcccatcgcccgactcggtggcgctgcccctaccccatcccggcgcgggcccggcgacgcgggcagcgcggggccgagctgcgggcggagcgggcgcgggtctgcggagcccccagggctcgagcgggccacggagtctgtccgggagcagggggcgttgcccggacgctggcctgggtccccggtgcgggaggcagtgcggcggcctccgcccgcccctgcagcgggatgtgaccgtcccggagagccagccgccgccttctgcagcgctggccccgctcgctccgccgcagcccggccggacgcgcggcc

SEQ ID NO: 352218 - DNA, 725 bp, Homo Sapiens
  misc_feature (631)..(631): n is a, c, g, or t
tattctcactaaattctccgttattaaaatcgatttctgcatcttgcctggaaaatgcacttacatatttacaagcgttgtatgtcaatgtgcatgttttgaatttcctaacagtgtctaatcttagtagtttcatagtagttatgtaaaatctctttaactgcaaaatactataaaatattacttgaaatattaaagtattagtgccatttctagctgtggcaaggcacaagtcttactatagcttacttatgtcttctcatagatttcagtacagcatctgagtagtggatctgtttactgacagtatacacaaactaggtcttgacctcacttctttcttcatttaaaaggagaagatttgaaatagagctagtgtaaataataaataaaattatttaaatagcatcagtggctcaataccatctgttgaggaataaaataatttggttaacatacagaacatcgataatatacaataatgactttttaaaaaatgagtctgatctttttggctcacctagcttcccttaataagaaaatttgagaaacttggatctgaaaagtgtagttgtacttcctaacattaaattcctggctgtaatagttaatactttggcagcattatggntagtcttgtttatgccattggcacttactaggctaaactttctgaaactgattggttttgacctatgagataaggaaacatgcctaagaaatgg

SEQ ID NO: 352219 - DNA, 637 bp, Homo Sapiens
  misc_feature (136)..(136): n is a, c, g, or t
  misc_feature (409)..(423): n is a, c, g, or t
tgtaataaaccgtctttaataaactaggcccaggatacatctttgcctcactctgatggtgatgaaaaaaagagccacagccagcatggcatctgaactggaggtagagataaacgatgagaatgaaataaagatnacagaggatgaggagggtggtggaaacgatactagcagagggtgtgatgggccaaattctgaagactcactgtgcaggcacagagctagggaatgtggctcttagcatgccagggagtgaaaaagcctccgttcactttagtcccttctgaaatctggacgagagaatgaatgaagttcattcacttctggaattcaaacatgttcccaaagaggtttaagaggagaatctaaaggagcctctctgccataatcacttcccttctccagagannnnnnnnnnnnnnnagttccctcagggctgcagagccagaaaggcagccagagaacaccaaggaaatgtcacacccaggtatagatccaaagttaaaagctcctagatgtttcattgctgtaagcctacacactcctatttaaatgcgagcaccgccagagagccactgcctcactcaggacctgaggggaagggcaagtaaaaatttaaaacgttttcacagggtac

SEQ ID NO: 352220 - DNA, 375 bp, Homo Sapiens
  misc_feature (89)..(89): n is a, c, g, or t
  misc_feature (126)..(126): n is a, c, g, or t
gaaactgccacttttaaaaccatcagatctcatgagaactccctcgctatcatgagaacagcatagaggaaaccgcccccatgatccantcacctcccaccaggttcctcccttgacatgtgaganttacagtccgagatgagatttgggtgggaacacagagccaaaccatatcagcttatgattagcacgtgaaagaaagaaacagtgatgaaatagagagtaacaaggggaatccactttctataggagatgaggaaggtgacccctgagcggtgacgtgatagatgaccaccgccccgctctgggcaaaagaaagcagaaagacagcaaggcctggtgaaagacttgcatattatgactgactattactgc

SEQ ID NO: 352221 - DNA, 1370 bp, Homo Sapiens
  misc_feature (86)..(137): n is a, c, g, or t
ccccccacgacgtacggccgcctcgcgttcctctccttctatgtcggctggcaccggcccggcatttctgggatgccggcccggtnnnnnnnnnnnnnnnnnnnnnnnnnnnnnnnnnnnnnnnnnnnnnnnnnnnnggcccggtacgggcggcgcgatgtgaggcgtccgagcccggagcctccgcctggcatcagctccacgtagcccagcgccggcacgcgcgaggccccccttctgcagaggccgggctggaggagaagatggcggccaagcagcccccgcctctgatgaagaagcacagccagacggacctcgtgagccgcctgaagacccgcaagatcctcggcgtgggcggggaggatgacgacggggaggtgcatcgctccaagatcagccaggtcttaggcaatgaaatcaagtttaccattcgggagcctttggggctcagggtctggcagttcgtctctgctgtgctcttctccggcattgccatcatggcgcttgccttccctgaccagctctatgatgcggtctttgatggagcccaggtgaccagcaagacccccatccgcctctacggcggtgccctcctcagcatctccctgatcatgtggaacgctctctacacggctgagaaggtcatcattcgatggaccctgctcaccgaagcttgctatttcggggtccagttcttggtggtcactgccacgctagctgagacgggcctcatgtccctggggatcctgctgctcctggtcagccgcctcctttttgtcgtcatcagcatttactactattaccaagtcggccgaagacccaagaaggcctagttgcccgctgggcctggggccctgcccatgcctgggccagagtggcgctggggcctcggcttccctttggctcctggaaggcaggagggtcccctgccctgccccagtcctgccccagggaggcagggggtggggggccttcctttcctcctgggcaccccgtgtgctgtgatctcctgggctttcaggcttgacatgctggtctggggagagacagggcctctgctgccctgttcttcaccctcacagtgatacctcctttccttgggtctcttggcctccagaccccctcaatagacactgactaaagtcaagctggagtcatgagggtagtgggctaagtcgagggtccagcctcttctgccaggaagcccttcttgcttttgagagaggctgtgaccaccccccatccttctccctacactcccagccaacctagtgcccaagcagctaaacttggcttccttctaatcctggaaaaccctgtacccctcctcctcaatctggccctctaccacatgcacagccgtgaaaact

SEQ ID NO: 352222 - DNA, 695 bp, Homo Sapiens
  misc_feature (131)..(131): n is a, c, g, or t
aacgcctccaaagcaccatggtgcccacctcccatatctcatcacctgtgtttctgctccttttgggtgccaacaaatcatgacctcattgtgatggataaaattaacctcccaacttgatgggattatgnaaatattttaaaataatatcccttaatagtaaaagatttttacaccgaagattccatccctcaaccacttaaagcttcagtgaagccagtcaggtgtagtgcttctcagttaatgctactattggacttgattggagagaggggcatcaaggcggccttaagggtgattaccccaacagcaaggggctcagtttgaaaggcttaaggagacagtctgggagagaagaggggatatcttatcacagggcgtggaactgtgcctttgtggatggaggtgacaggatttctaacccttcccagcattgtcacagcaaaggccacagaatgacaaagctggaaactgaaaagtgctgcaaaggggagagaaaaaggaaactgatttcaagtccagctgaacaggcccaggtatggtttggtttagtttggttggtgatgcaagtaacaggagggagggaccacagccatgccacccttcaataagggtgattttgcaaacaggttggctttttgccatcagagggaggcattttacttcacttctgaattatcataatcttgtccaac

SEQ ID NO: 352223 - DNA, 2127 bp, Homo Sapiens
  misc_feature (766)..(766): n is a, c, g, or t
  misc_feature (1101)..(1126): n is a, c, g, or t
  misc_feature (1402)..(1434): n is a, c, g, or t
  misc_feature (1491)..(1501): n is a, c, g, or t
  misc_feature (1984)..(1984): n is a, c, g, or t
  misc_feature (2056)..(2064): n is a, c, g, or t
ggaaaaaagattgcactccaggattaggaggtgtgagatattttagcttttttgtcttatctgcgtgggtattgctgctttattttaaaaaatcctgcctaaagtaaacactttgttttaaaatgatacaggatcagattttgttagatgctagaaatggatttattctaaaatttggaactgtcgtacacattctatatgtaagatagcacacaagtagaaatatttaaaagcagtcttattcacagattgcagtaattctgtatttctactaagataatctgctttgtgccaaaacagtaatttccaaacttctgttcaccatgaaaaggcaatcttaaagttcattatgtaaaactaattataaacaggacccaatttatattcatagatcctctcaagtattatacaatttaaaaactcttgttccaaagtcctgtcttaactattgaaacaccttaatctgtggttactaatccagcaaattcaaggaaccaggctatgactaagaatttaggtggaattgatgtctgggcaattaaaataaatggcataagagcttaaaaaccaaagttgtgccagtggctttcaactagaggcagtaacctgtcattccagaggattgctgagaaatgtgtaggggcacttttttggttgtcatatttactaggggcttctgttggcatttaagcctaaagacactcacccctgcagtgcatgggacagcctggcacaatgaagaattagccctcccaaaatgtagatntattttatttcaagggatagggcagattaccattagaagcaaaattaaaagtacaagctgggcaaactgacagaatactagataggagagactaattccaaccttctaaatttggctagtaaagtgcaataaaggcattgataagttctgttagctcaccatagcacttgtaaaacaggaattaataattgaatcagatttaagggctctgtcctgttatacatatttaaggcagaaaaaaagttacatgtcgattaggtacttatcaagaatggtcaagctaagattttggttaatagagtaagcttacatatctagagaaacaacatagtggnnnnnnnnnnnnnnnnnnnnnnnnnntctaccggtaatttcccaatagctttgaatattcacagcagagctttattacttgagagaaagactggaagacctgaaagccacttctgctttctaaccccagttccttaaatattgaaatcttgtacattttgtgaaattccagtatgttttgcttaaggtgttaataaaattagtttgcatcatgtagtcattgagtgagggggagatataagccaaggattttaaattgacccttagctatagagaatttgctataagctagtcttgtttgtnnnnnnnnnnnnnnnnnnnnnnnnnnnnnnnnngtgttttttacggtttcctggtattaagtaattctggtaacgtgcattggcagctcnnnnnnnnnnnaaattaacattatagtgtgcttacgggcccctgtttgttagcagcgtgaattattatgtttaacaatacgttcactttacacaacaaaaaatttatttgaggcgttccttacccagctttacgtggtccatattgagcctcaatctccatacatagtcttttcttgtgacagtatttggttattcccccagtggtccgccgtatattgggccatctccaaatattggtgtcctaactaatggtctaaagtccctttgttaaataagtccttaaccctcctcttgaaacatctttggaacccatcttgtattacactttaagcctttggaaggagtataaaccattctcccaggtggtgcgcgttgcctctaagctctttggcgagggcgcaccttctttccctttcatagattactttggtgccgtccggtatattctttcaacacaagatattggggtgtttagagatctggcgcttggtcncctggtggtcaacgctccgcttatgctggaatcctctatttcccttcctcagtgggtgttccctttacccannnnnnnnncgccaaattggactggtcaagattccataatctcccctttctagattcttccctaattggatt

SEQ ID NO: 352224 - DNA, 478 bp, Homo Sapiens
  misc_feature (76)..(137): n is a, c, g, or t
gaaatgtgtaggggcacttttttggttgtcatatttactaggggcttctgttggcatttaagcctaaagacactcnnnnnnnnnnnnnnnnnnnnnnnnnnnnnnnnnnnnnnnnnnnnnnnnnnnnnnnnnnnnnntattttatttcaagggatagggcagattaccattagaagcaaaattaaaagtacaagctgggcaaactgacagaatactagataggagagactaattccaaccttctaaatttggctagtaaagtgcaataaaggcattgataagttctgttagctcaccatagcacttgtaaatcaggaattaataattgaatcagatttaagggctctgtcctgttatacatatttaaggcagaaaaaaagttacatgtcgattaggtacttatcaagaatggtcaagctgagattttggttaatagagtaagcttacatatctagagaaacaacatagtggaaaaccg

SEQ ID NO: 352225 - DNA, 674 bp, Homo Sapiens
ccaaagcagtaagggtcctctggcatgctaggctaatggcccattcccccaaattaaagtttgaaatatggaccagtgaaaagggccagccaccaaagaagcactagagtgcctggacagagacccctggggcacacagagccatcaataccaccaccctcccgcaaatacaggttgcatgaaaaacaaaaaatgtgtggcccagctctggtgctggttactcagttacatgttccctccactatctatctggcatgttacatggctcgcaagctgctgagcctggcctggtgcttggcaaagcctagcgagctgggttgggagtggggtggctggtggggtgagccccaggtagtgctggctacagttcccatcttcagtctgcagtcctgggtggcttcagttggccctgagagcacaggaagctttagacatagtctactggtggggcagggctgccagttatggaagcaggttgttctggaggaaagatgaattagaagtgcccatatttcagtcgagggtgattgttcccacatcgacttaatggcagagctccacatgggtccttgcttcctgcatcatgaccactgtctcccagacactgatggcaaccaccaagaggacaattcgtccatcccaggcaactactgtcaatcgtaaaaatgggattg

SEQ ID NO: 352226 - DNA, 952 bp, Homo Sapiens
  misc_feature (864)..(865): n is a, c, g, or t
  misc_feature (873)..(873): n is a, c, g, or t
  misc_feature (880)..(880): n is a, c, g, or t
  misc_feature (884)..(884): n is a, c, g, or t
  misc_feature (896)..(896): n is a, c, g, or t
  misc_feature (910)..(910): n is a, c, g, or t
  misc_feature (925)..(925): n is a, c, g, or t
  misc_feature (927)..(927): n is a, c, g, or t
  misc_feature (937)..(937): n is a, c, g, or t
  misc_feature (942)..(942): n is a, c, g, or t
  misc_feature (948)..(948): n is a, c, g, or t
  misc_feature (950)..(950): n is a, c, g, or t
tccgccttcggaggctgacgcgcccgggcgccgttccaggcctgtgcagggcggatcggcagccgcctggcggcgatccaggccggtgcggggcctgggcgggagccgggaggcgcggccggcatggaggcgctgctgctgggcgcggggttgctgctgggcgcttacgtgcttgtctactacaacctggtgaaggccccgccgtgcggcggcatgggcaacctgcggggccgcacggccgtggtcacgggcgccaacagcggcatcggaaagatgacggcgctggagctggcgcgccggggagcgcgcgtggtgctggcctgccgcagccaggagcgcggggaggcggctgccttcgacctccgccaggagagtgggaacaatgaggtcatcttcatggccttggacttggccagtctggcctcggtgcgggcctttgccactgcctttctgagctctgagccacggttggacatcctcatccacaatgccggtatcagttcctgtggccggacccgtgaggcgtttaacctgctgcttcgggtgaaccatatcggtccctttctgctgacacatctgctgctgccttgcctgaaggcatgtgcccctagccgcgtggtggtggtagcctcagctgcccactgtcggggacgtcttgacttcaaacgcctggaccgcccagtggtgggctggcggcaggagctgcgggcatatgctgacactaagctggctaatgtactgtttgcccgggagctcgccaaccagcttgaggccactggcgtcacctgctatgcagcccacccagggcctgtgaactcggaagctgtccctgagccatgttcctggatggctgcgccacttttnnggccattnggttggntggngtccgggacaanaaggggtgccaganaccctgtattgtgtnanaaagggatcngcccnagtggnanat

SEQ ID NO: 352227 - DNA, 1141 bp, Homo Sapiens
  misc_feature (90)..(286): n is a, c, g, or t
  misc_feature (578)..(578): n is a, c, g, or t
ggaggccacgtcttcatttacctttatctctagtagccaaaagtcttgatttttatataactggaaaaaccacgcagcataatgcttatnnnnnnnnnnnnnnnnnnnnnnnnnnnnnnnnnnnnnnnnnnnnnnnnnnnnnnnnnnnnnnnnnnnnnnnnnnnnnnnnnnnnnnnnnnnnnnnnnnnnnnnnnnnnnnnnnnnnnnnnnnnnnnnnnnnnnnnnnnnnnnnnnnnnnnnnnnnnnnnnnnnnnnnnnnnnnnnnnnnnnnnnnnnnnnnnnnnnntgagcaccgttgagctttggtagaaaatggcaaaattacgatgtttttctcatttctggtgattggcttccgagtgttatttaaagagcggagtggagagggctctttgcagccctgcggtagtgtcttgtgctcaccaagaggctcacgggaaacatgtcctccaacatgaaggtgtttgctaagattccaaccaggacccagtcttgggccacagaacactgactgctccccaagcccctcgcagaacgcagggatatttttccttcagaacctgttgcatcagaatggngaaagcgagggctgagaatcccagaagaggccgtgaactgttctggaaaagcgagggctttgcagtcagaccttcatatgcactttgttctatctgttgcgctctgcctaaatgaccacgggccagtgactttacctctctgatccctgctccttgcctagatagtggggatcacgtcgtaatgtatgttaaagaaccgggtgcgggacttggcacctgggaagtgtcttaatacatgtctgtcgagaaaaggaagggtctcgacgtgcggaaacaagacggatgccaggaaatacgtctgcccacctccacgcccctgacagcggaggctcctggaggtctggtgagaggccccacgtgctccagccccctccgctctgtgctgagctctgcctttaagagactgcagctcctgcctctaaaaagcctttcaaaattctttattaaattttcatggcgcataaagtcaaggttctgttacttggcctcagttgtcttggcaacttcataaaacgcaataataaaacgaagctgagtgttgctaaacacaggctcattgtata

SEQ ID NO: 352228 - DNA, 881 bp, Homo Sapiens
  misc_feature (39)..(39): n is a, c, g, or t
  misc_feature (78)..(78): n is a, c, g, or t
  misc_feature (87)..(87): n is a, c, g, or t
  misc_feature (97)..(97): n is a, c, g, or t
agaaccactggtaactcttaactgctgtctgcttttctntggagactgcgggttgcagacaccagcagccccctattnctgcacgtnaggtgtcctncacctcagtactgtggacatctcgggccgcatagccctgttgcgcgggcatcctgtgcgttgcaggagatgcagcagcatccatgaccgcaacccatcagagtgttctaagaacggaagcatctgggctggatggaatttagcatcaagcagagtcccctttctgttcagagtgttgtaaagtgcataaagatgaagcaggcaccagaaatccttcggcagtgccaacgggaagactccgagctgcgaggtgaaccgcgagtgttctgtgttcctcagcaaagcccagctctccagtagcctgcaggagggggtcatgcagaagtttaacggccacgacgccctgccctttattccagccgacaagctgaaagatcttacttcccgggtgtttaatggagaacccggcgcacacgatgccaaactgcgttttgagtcccaggaaatgaaagggattgggacaccccctaacactacccctatcaaaaatggctctccagaaattaagctgaaaatcacctaaaacatacaggaatggcaagcctctctttgaatcttccatttgtggtgacagtgctgctgatgtgtctcagtcagaagaaaatggacaaaaaccagaaaacaaggcgagaaggaacaggaagaggagcataaaatatgactccttgctggagcagggccttgtcgaagcagctcttgtgtctaagatctcaagtccttcagataaaaagattccagctaagaaagagtcttgtccaaacactggaagagacaaagaccacctg

SEQ ID NO: 352229 - DNA, 1831 bp, Homo Sapiens
  misc_feature (389)..(421): n is a, c, g, or t
  misc_feature (592)..(600): n is a, c, g, or t
  misc_feature (1352)..(1352): n is a, c, g, or t
  misc_feature (1360)..(1361): n is a, c, g, or t
ggaattcccgggatctgtatccagctccttttcctaaatggtagacacttccccaggcagtgggtgggtcagggtggccagtcactctcctagctgtccttgcctggggacttagatttaccccatccaggactgtggtcgctattctgtgagcgattgatggcgcatatgcagaactcccctggagtcatggctctagaaagtgtccaggcccatcgtgacaatggtgccaagcaccgggctggtgaccagtgcctaaacacacacgctcctttaatccttacggcaagcctgtgaggcggataggaccagccctgatctatagtgagaaaattaaggttcagagggagaaggtccaaatagtggccaagctgggactgagatctcgnnnnnnnnnnnnnnnnnnnnnnnnnnnnnnnnnctttccctcgtgtccatgacttttctctgccattagcagggaagtgtgcggagggcttccagggaatcaagtgaccctccctctgaatttcggtgcctcttccccccgccccttgctcacacatttcagtaggtcacaggccaaatggcagcccaaaaggtgggcagagannnnnnnnncttcccctcacccctgcttattaacacaattgtgacaactactttaccttacatcccagggcaaacggacagcttgcggtacctccaaaaatttggaaaaccctgagtctaagaccacctcttgataaaagaggcctttgctcacattttctgctcggaatctttctttgccattggtgggtgtatgtccgtcccagctgagactgcgggagagctgagctccagcttaaaccgcttttaatggcccttccctactgggggatcgctggagcccatgccaggttacggtagtcattttaaacctctgccacaaggccacgccatagaatcaatttccaagtcaatgttcttggccctaaaatgtttgcgcccactgaggatttcattaccaggtggaagatgggggaacatatgccacgttaaagagcaagtgctgagtgtgccaggacttgagaaggaccttaggctgaggagtggacagtctggtatttatttcgcctctcccaagtacccagcacagagtgggaaaaagaagaaactgctcctgccttccagtagctggcaacttgacatcaagaacaaaaacattcgtagctggacccccgtcctttcatcgtgcccaagtcttacatgttggcttaagctgcccccttggaggccgtacctttctctttggactgtgacagtggacacctaacagcctgagccatgtgtggctgtcttatcccccaagggttgtccaggcccgttcntgcagggnnctgttgtgtagactgcagacatccatacctcaccacagaccaaagatgacctcgtgtcagactgtgggctgatgagaggtagagcagcatgcatcgaggcctgagggtgcagggcgccctctcttggcctggaggaattgctcctaactagagtaagtttccacgagggtcccaggcagagctgcagagctggaaaccgggagctccacagtccttgccctgctcatggacctcccttcgaagcacctttctacagactggactgcccaccttccggggggtggcaacctgggtttccgggggcttattctggccaaattattccagcctcctccctcatgggttcaaaatttcattttttcccgttttcaatccccccacctcccaagaaaaagccctttctttaacttcccaattaaggggaaatgaagggggcttcaacccctcctttctggtcctccccaagaaga

SEQ ID NO: 352230 - DNA, 977 bp, Homo Sapiens
ccggaattcccgggatgcgggaggggttcagggcagaagaagaccgggagggtctttcaaaagaactcatgtacggctgttaaaaaaagtcagcagaggctcaggaagacttaaagtgtgcagaaggcggggaagggagggcccattgcatgcaccaagaggaaattggaaggaacaagcgacgttggctgctaggagagcctgctcccaacatctaggggctgtcctgacgggtcacagtgggtcgaactgagccaatgagagcagctctggggagacccactggtgccctggaggctgggtgggtttgggttggatgaattctgtgtgtccttttggaaatgtggaggccatgaggggggatcagggctcttagggttttgacccttaagagttttgtatctgtaattcaaaggttctttagttctgggatgctgagattcgggatagggttcctaatggcacaaaagccagagataaaacatccttcacgtgctccctacccggttctttctgtaccagacccacaaggtccgagttgggatcctagtgctcctgtctggtcagggcctatctttatgtgttcgttaaacttttaacaatgagaattaattctgtctcttgacattgtcatttgcatgctccccacacacaaatcctttcctggtgacaccaggagctacaactctccttggcctcctcttgtgactcccaactccctccttgggaagcttggcctcaggacctctgggatagacaggccacgaatcctgctgtgtcccgttgtgttcctaatataaatggtgtggatggcactttgacctagagcagtgggaaatgcatgcaccactcaacattctgacatgtcacccattttacattcttacaggcatactttttttaaaaaaagagtgtctattctttaatgagcatcccttctttaaaaaaacctaattgccattattcaccacatacac

SEQ ID NO: 352231 - DNA, 1171 bp, Homo Sapiens; identical to SEQ ID NO: 178159
  misc_feature (335)..(347): n is a, c, g, or t
  misc_feature (539)..(548): n is a, c, g, or t
  misc_feature (702)..(702): n is a, c, g, or t
  misc_feature (838)..(838): n is a, c, g, or t
  misc_feature (1023)..(1023): n is a, c, g, or t
  misc_feature (1031)..(1031): n is a, c, g, or t

SEQ ID NO: 352232 - DNA, 716 bp, Homo Sapiens
  misc_feature (14)..(14): n is a, c, g, or t
gtaatcctcagggnattttctggtgttggcccatggacaagcaaccagtaatgggctcactttagggacgcaaaccacaaagccccacctcaggaacccaaatttccaacttccttgcccctggggcaaacttctagcaaccaagccagaggcaaatgtcagacaggataagggatgacatcccatcaatcaagttgaaaatgggagggacccagcagtttgtaataaagccataaaactggtactgactctgggtgagagggagaggcagggtggtgactagagagctggttctgtgaccttgggaaatggtctcacccctctgagccctggagatgacctgatggggcagctaggaggtccaaatggaaggactgcaaataaaaggcactgggaactctcaggggccacacacatgtgagatcttccccaataaaatcagccttagctttaaaaccaggaaattgttagcaacaggctctcaccttcctccaacacccacagcattgcctatctccctgtgatagcttgattctaaagataacagcctgcctttactcagaaaccaggactgtgacgtgttttgcacacattctcttttcactttcacagtgtgtgactatggcatgcaacttatgttctctgtgcctcagtttactcaagtgttaaacaggaatactcacatgaggattacatgagttaaaatggataaaatg

SEQ ID NO: 352233 - DNA, 679 bp, Homo Sapiens
acaggcctttttctgtaagtatattggaaaatttttttgagatttgtggcaatttggaaaaaacaaaccatgtagcctagaaatataggaaaaattcaaaaagttatatagatactagcctattttatcatttactataaaatacacacaaatctattataaaaagttaaaatttataaaaacatacaaacaaactgtacatggcaccattcacggttgagagaaatgtaaacaaagatacagtattaaatcataactgcataaaattaactgtagtacatactgagctactataattattttgtagttacctcctgttgctattgtggtgaactcaagtgtcaaaagatctgtttaaaacaccatgtgatgctaatcatctctgtgtgagcagttcatctctccataaaccgtggatcacagtaaaaagtgatcccttgcggttcttgcatatttttcatggttagtgcaatactgtaaaccttgaggacataaaaactgcaggacccatatgaagcaccaccagtcatagaagtgctcccaagaagcacagaagagtcatgacattacaagaaaaagttgagttgcttgataccatagattggggtctgtggttgcccaccatttcaagataaatgagtccagcataaggaccattgtaaaagaaagaaggaaagag

SEQ ID NO: 352234 - DNA, 1211 bp, Homo Sapiens
  misc_feature (457)..(515): n is a, c, g, or t
atctctgtaattctttattaaaaatactgctgtacacatagagactgaaaacaggattaaagatgaataacacaaattgggtcatgacattagaacctaacacactggtgctttttagggaagttgttgacatccaaatcacagaaccaaggtcaaaagcaaaatacaaaggtaccctcaaaaatatttacaatgaagtaaatacactaacagaatttaaaacaggtacaaaatattgaaatgaccaacgttacatgatttcaagggttgtcctttctgtgcttttatctgtcacgacaggaaggtgtggaaagtttatatccttaatttgactactcttggatattaaaatctttctattaattaaaaagacttttagacaacctcttaaatgggaattacactatggaaaacagggctcccccaaaaacacctaggcagaactgagagttctttnnnnnnnnnnnnnnnnnnnnnnnnnnnnnnnnnnnnnnnnnnnnnnnnnnnnnnnnnnntatgcattacctgacaccaaccttttctggctgacaatatttattcatgaaaacatatcagctgtctaccttttatatgcaaaccaagtcctgaggttaacctaggggctgaagcaaactagcatttaggatgcaaacattcttggatttgtgatgtaaacttgccttgcacagggaagtttgctggtctatacagaatgagaaattcaagccctattttaacccctgccctctttagctttcacaaaacattggtccacaaattaaattttcaaaaagttcccagaccccaaaactaaaatagatgatcccctttcattttcaaagaaaacaatattggaaaaaatctccagcccgcttataaattaagcatttcatatttcttctagaatacaagtagttcttttttgtacaaaagaatacaatatgatttgtcaaaaaacatataaaaagacagctgctcttcctcaaatacatgagctaatgataaaagactttttcatgttaatgtctccaagttcttctttttacataaaaaagaacattatggtggcaaatgtgaattatccttttaatattgaacattatattcttttaaaatccatccagatcaaatgcaataattttctttttaactcaacaactgatgctaccaaacgtggactcaatatatcttgttaaaacgtgtaaagcgtg

SEQ ID NO: 352235 - DNA, 1560 bp, Homo Sapiens
  misc_feature (48)..(48): n is a, c, g, or t
  misc_feature (65)..(65): n is a, c, g, or t
  misc_feature (68)..(69): n is a, c, g, or t
  misc_feature (73)..(73): n is a, c, g, or t
  misc_feature (79)..(81): n is a, c, g, or t
  misc_feature (85)..(87): n is a, c, g, or t
  misc_feature (91)..(93): n is a, c, g, or t
  misc_feature (96)..(96): n is a, c, g, or t
  misc_feature (108)..(108): n is a, c, g, or t
  misc_feature (110)..(110): n is a, c, g, or t
  misc_feature (114)..(115): n is a, c, g, or t
  misc_feature (120)..(121): n is a, c, g, or t
  misc_feature (127)..(127): n is a, c, g, or t
  misc_feature (159)..(159): n is a, c, g, or t
  misc_feature (165)..(170): n is a, c, g, or t
  misc_feature (173)..(173): n is a, c, g, or t
  misc_feature (175)..(175): n is a, c, g, or t
  misc_feature (180)..(181): n is a, c, g, or t
  misc_feature (185)..(185): n is a, c, g, or t
  misc_feature (187)..(187): n is a, c, g, or t
  misc_feature (189)..(189): n is a, c, g, or t
  misc_feature (194)..(194): n is a, c, g, or t
  misc_feature (199)..(200): n is a, c, g, or t
  misc_feature (202)..(202): n is a, c, g, or t
  misc_feature (234)..(234): n is a, c, g, or t
  misc_feature (239)..(239): n is a, c, g, or t
  misc_feature (242)..(242): n is a, c, g, or t
  misc_feature (249)..(249): n is a, c, g, or t
  misc_feature (271)..(271): n is a, c, g, or t
  misc_feature (282)..(282): n is a, c, g, or t
  misc_feature (302)..(302): n is a, c, g, or t
  misc_feature (306)..(306): n is a, c, g, or t
  misc_feature (309)..(309): n is a, c, g, or t
  misc_feature (314)..(314): n is a, c, g, or t
  misc_feature (882)..(882): n is a, c, g, or t
  misc_feature (1462)..(1462): n is a, c, g, or t
ccgggatcgcggggctccaggctgcggggcggacgtagcgccgagcgntccaccgcggaccgcgncgnngccncccgtnnnccannncctnnnccngtcccaaccccntntccnnccccnntttctnccccgatccccgattctattctccgccgcctntctttnnnnnnttntntcttnngttntntntgtgntttcnncntgcgccgggctatttgctatttctccccttcnatcangtnattttcntctcgttcgccggctggatttngtgcttggtcnggtagctgctgctgtaagantgtntcnagatnctactgttatgtatgacactgttaagagaaccttggcacctctgaggcccaaagggaaagacaccagtgtgaaagaggtgagcatctcctggaccaccctcaagcttcaggtgagctgaacttctaacactaccatcaaagcaactgggaaccccttgaatttgatttctggagacgcgagcataatccttttgcagacatctcaacgctggctctccaggtggagcaccatggaaggcgactgtctgagctgcatgaagtatctgatgtttgtattcaatttcttcatatttttcttcctgttcatcctgatcatcttcctggcagagctctcagcagccatcctggccttcatcttcagggaaaatctcacccgagaattcttcaccaaggagctcaccaagcactaccagggcaataacgacacagacatcttctctgccacctggaactcggtcatgatcacatttggttgctgcggggtcaacgggcctgaagactttaagtttgcatctgtgtttcgactcctgaccctggatagtgaagaagtgccggaagcctgctgccnggagggaaccccaaagtcggggacgggggtcctgctgagccgggaggagtgcctcctgggaaggagcctattcctaaacaagcagggctgttacacggtgatcctcaacaccttcgagacctacgtctacttggccggagcccttgccatcggggtactggccatcgagcttttcgccatgatctttgccatgtgcctcttccggggcatccagtagagggtatggcctgaagcctgaagactcgccccacccaccactgcccagcacccaatgtcctcccgtgcccctccccgctgtcctcttggccccaggggagaagatgaggccatcagagatggccaggagaagggccaggggaatagagctatttttttaacaaaacaaaatgaagacaaaaatatggactgatgtatcctcgcctggactcagggcaggtgccgtgggtttctccagagaccccagcacctggccccaggatgcaggcctgctctagagaccaaaaggaccaccagggcccagcggccttctttggttccagccagaaccctggggcccttttcttccttaattggaccaagnaccttgttgccaaagaaagggagggatttagggcaaccagggaggcaaaaaggcaaaattttaggggagattcttcaaagccccaggggcttgcacgg

SEQ ID NO: 352236 - DNA, 739 bp, Homo Sapiens
  misc_feature (664)..(664): n is a, c, g, or t
  misc_feature (679)..(679): n is a, c, g, or t
  misc_feature (708)..(708): n is a, c, g, or t
aaaaaacctatcacttttatgctcattcatcctcctaattcagtgtctgggtcatgagatgtttggttcatagcttcaaaaactgttcaagaagactgatttcagttctctctatgttgatcttccagttgaatctggagtcttctgattgtggaaaggagtagcagatcacattatactgaaaattgtccttttcattgagaaataaaggttgactgagctacctaaagtcactttcctttggactgtaagccttagagagaacaataatacctttgcttttcttgaggtagtattagaaaactctagttcccattgataggataaacttgttttctcgtttcatggtctttttatagaaaacagtcacaaaatcttgacatttggcatccctggaaaagctcaagtggccttttcaagtagggtatcatgtagtattctgcaggtttacagtcagtatcctgcaaggaaaggtgacaaacttcctgtgaagttaggaagaaatattagtaacccacacacttgaagtgagttttccattttaccttgtaggaaattgtactagagatagaacaaatgaaattagttttcttttccagggtatatcctgtggagataccagcacagagtattttctctgagttcttctcaggggtttaaagcntcagtgagctttttnctttttctctttgggtagtgtggggaccntttgttaccctaggaaagattaggccgggaa

SEQ ID NO: 352237 - DNA, 810 bp, Homo Sapiens
  misc_feature (731)..(731): n is a, c, g, or t
aaatcccggttagattgcaggcaccgccggacgctggctcccggaggttttagttttccctctaccaggagtgtgaagacacagagacttattgcgctggcgaagatggctgaggcgaaggcgtgtccgacttgtcctcggagttctgagggtttcagtgaccccagaaggctgagaagtggaatccgaactcgaggctgcccgaagcctcgggctgtttgagtgtagagccggtaggggagggctttcaaagtgtggccgcgagggcgagcgtgggggatcggttatgagctcccgagggcggggactctgctctgtgtcccctgaggaagtccagtcttgttataaggtatgagaaaagtaactttttaaaaatggacaaataataattgtatgttttatatactgatagggtacaatatgctgttttgatctatgtttacaatgcgaaatgattaaatcaagctaattaaatccatcacctcacttttttgtggtgaaaacatttaaaatctacttttagcaattttgaaacatgcaacacattatttatgtagttgctattctatgcaatcgattaacaaagtttatttctcctgactaactgaaattttgtactgttttaattaacatctcccttttccccatttttcagtctctggtaaacaccattctttgcctcttaagagttagacttttttagattccacaaataccacttatgtggtatnggtatttatctttctgttactggcttctctcacttagcataatgtcctcctggttatccatgttgtccagatgacagaa

SEQ ID NO: 352238 - DNA, 1025 bp, Homo Sapiens
  misc_feature (847)..(847): n is a, c, g, or t
  misc_feature (860)..(860): n is a, c, g, or t
  misc_feature (868)..(868): n is a, c, g, or t
  misc_feature (882)..(882): n is a, c, g, or t
  misc_feature (916)..(917): n is a, c, g, or t
  misc_feature (922)..(922): n is a, c, g, or t
  misc_feature (929)..(929): n is a, c, g, or t
  misc_feature (943)..(943): n is a, c, g, or t
  misc_feature (946)..(947): n is a, c, g, or t
  misc_feature (957)..(957): n is a, c, g, or t
  misc_feature (964)..(964): n is a, c, g, or t
  misc_feature (967)..(967): n is a, c, g, or t
  misc_feature (969)..(970): n is a, c, g, or t
  misc_feature (973)..(973): n is a, c, g, or t
  misc_feature (981)..(981): n is a, c, g, or t
  misc_feature (990)..(991): n is a, c, g, or t
  misc_feature (999)..(999): n is a, c, g, or t
  misc_feature (1005)..(1005): n is a, c, g, or t
  misc_feature (1007)..(1007): n is a, c, g, or t
  misc_feature (1009)..(1009): n is a, c, g, or t
  misc_feature (1019)..(1019): n is a, c, g, or t
ggcctgggtggcgaattcggcacgaggccgttctccaggcccggctgacagagttagccgaggccgccatattgaataagcgacccggcctcctagggggtcgtcgtggtccagacagtttagcagaacagcctccgcggctccggggagaagcaatatgttaaggatacctgtaagaaaggccttagtaggcctttctaagtctcctaaaggatgtgttcgaacaactgccacagcagcaagcaacttgattgaagtatttgttgatggtcagtctgtcatggtggaaccgggaacgaccgtcctccaagcttgtgagaaggttggcatgcagatccctcgattctgttatcatgaaaggttgtctgttgctggaaactgcaggatgtgccttgttgaaattgagaaagcccctaaggttgtagctgcttgtgccatgccagtaatgaagggttggaatatcctaacaaactcagaaaaatccaaaaaagccagggaaggtgtgatggagttcttattagcaaatcacccattggactgtcctatttgtgaccagggaggtgaatgtgatctgcaggaccagtccatgatgtttggaaatgataggagccgatttttagaggggaagcgtgctgtggaagacaagaacattgggccattggtaaagaccatcatgacaagatgtatacagtgtactcgctgcatcaggtttgcaagtgagattgcaggagtagatgatttgggaacaacaggcagaggaaatgatatgcaaagttggcacatacattgaaaagatgttcatgtctgaactgtctgggaatatcattgatatctgccctgtaggggncctaacctctaanccctatgnctttactgcccggncttggggaacaaaaaagacaaaatccattgatgnnatggntgcgggngggagtaatattgnggnnagcacaaaanctggggnagngnntgnggttttgncacgtatgnntgaggggncaatananangggggtctgntaaaac

SEQ ID NO: 352239 - DNA, 3793 bp, Homo Sapiens
  misc_feature (3565)..(3656): n is a, c, g, or t
  misc_feature (3661)..(3661): n is a, c, g, or t
  misc_feature (3693)..(3693): n is a, c, g, or t
  misc_feature (3723)..(3733): n is a, c, g, or t
ctctctcgcgccttgactatgaccgttgtttaacaacaggctgtacggtccggaattcccgggatatcgtcgaccacgcgtcggcgtggcgtgttgtggtaggtcgtggtctgagtgcccggtacagctgcgcgtctgcgggaataggtgcagcgggcccttggcgggggactctgagggaggagctggggacggcgaccctaggagagttctttggggtgactttcaagatggactctactctaacagcaagtgaaatccggcagcgatttatagatttcttcaagaggaacgagcatacgtatgttcactcgtctgccaccatcccattggatgaccccactttgctctttgccaatgcaggcatgaaccagtttaaacccattttcctgaacacaattgacccatctcaccccatggcaaagctgagcagagctgccaatacccagaagtgcatccgggctgggggcaaacataatgacctggacgatgtgggcaaggatgtctatcatcacaccttcttcgagatgctgggctcttggtcttttggagattactttaaggaattggcatgtaagatggctctggaactcctcacccaagagtttggcattcccattgaaagactttatgttacttactttggcggggatgaagcagctggcttagaagcagatctggaatgcaaacagatctggcaaaatttggggctggatgacaccaaaatcctcccaggcaacatgaaggataacttctgggagatgggtgacacgggcccctgtggtccttgcagtgagatccactacgaccggattggtggtcgggacgccgcacatcttgtcaaccaggacgaccctaatgtgctggagatctggaaccttgtgttcatccagtataacagggaagctgatggcattctgaaacctcttcccaagaaaagcattgacacagggatgggcctggaacgactggtatctgtgctgcagaataagatgtccaactatgacactgacctttttgtcccttactttgaagccattcagaagggcacaggtgcccgaccatacactgggaaagttggtgctgaggatgccgatgggattgacatggcctaccgggtgctggctgaccacgctcggaccatcactgtggcactggctgatggtggccggcctgacaacacagggcgtggatatgtgttgagacggattctccgccgagctgtccgatacgcccatgaaaagctcaatgccagcaggggcttctttgctacgttagtggatgttgtcgtccagtccctgggagatgcatttcctgagctgaagaaggacccagacatggtgaaggacatcattaatgaagaagaggtgcagtttctcaagactctcagcagagggcgtcgcatcctggacaggaaaattcagagcctgggagacagcaagaccattcccggagacactgcttggctcctctatgacacctatgggtttccagtggatctgactggactgattgctgaagagaagggcctggtggtagacatggatggctttgaagaggagaggaaactggcccagctgaaatcacagggcaagggagctggtggggaagacctcattatgctggacatttacgctatcgaagagctccgggcacggggtctggaggtcacagatgattccccaaagtacaattaccatttggactccagtggtagctatgtatttgagaacacagtggctacggtgatggctctgcgcagggagaagatgttcgtggaagaggtgtccacaggccaggagtgtggagtggtgctggacaagacctgtttctatgctgagcaaggaggccagatctatgacgaaggctacctggtgaaggtggatgacagcagtgaagataaaacagagtttacagtgaagaatgctcaggtccgaggagggtatgtgctacacattggaaccatctacggtgacctgaaagtgggggatcaggtctggctgtttattgatgagccccgacgaagacccatcatgagcaaccacacagctacgcacattctgaacttcgccctgcgctcagtgcttggggaagctgaccagaaaggctcattggttgctcctgaccgcctcagatttgactttactgccaagggagccatgtccacccaacagatcaagaaggctgaagagattgctaatgagatgattgaggcagccaaggccgtctatacccaggattgccccctggcagcagcgaaagccatccagggcctacgggctgtgtttgatgagacctatcctgaccctgtgcgagtcgtctccattggggtcccggtgtccgagttgctggatgacccctctgggcctgctggctccctgacttctgttgagttctgtgggggaacgcacctgcggaactcgagtcatgcaggagcttttgtgatcgtgacggaagaagccattgccaagggtatccggaggattgtggctgtcacaggtgccgaggcccagaaggccctcaggaaagcagagagcttgaagaaatgtctctctgtcatggaagccaaagtgaaggctcagactgctccaaacaaggatgtgcagagggagatcgctgaccttggagaggccctggccactgcagtcatcccccagtggcagaaggatgaattgcgggagactctcaaatccctaaagaaggtcatggatgacttggaccgagccagcaaagccgatgtccagaaacgagtgttagagaagacgaagcagttcatcgacagcaaccccaaccagcctcttgtcatcctggagatggagagcggcgcctcagccaaggccctgaatgaagccttgaagctcttcaagatgcactcccctcagacttctgccatgctcttcacggtggacaatgaggctggcaagatcacgtgcctgtgtcaagtcccccagaatgcagccaatcggggcttaaaagccagcgagtgggtgcagcaggtgtcaggcttgatggacggtaaaggtggtggcaaggatgtgtctgcacaggccacaggcaagaacgttggctgcctgcaggaggcgctgcagctggccacttccttcgcccagctgcgcctcggggatgtaaagaactgagtggggaaggaggaggctcccactggatccatccgtccagccaagagctcttcatctgctacaagaacatttgaatcttgggacctttaaagagcccctcctaacccagcagtaactggaacacacttgggagcagtcctatgtctcagtgccccttaaatttctgccctgagccctccacgtcagtgccatcggtctagaaccactaaccccgcattgctgttgatcgtcacgctcgcatctatagataacggctctccagacctgagctttccgcgtcagcaagtaggaatcgtttttgctgcagagaataaaaggaccacgtgcaatacttaatgccgcatgatctctatccctcttcccaataggggctggctcttttgacaacctttggcgtctgtagaataaatgctgtggctcctgctggnnnnnnnnnnnnnnnnnnnnnnnnnnnnnnnnnnnnnnnnnnnnnnnnnnnnnnnnnnnnnnnnnnnnnnnnnnnnnnnnnnnnnnnnnnnncaccncgcaatcagggctccagaaaacgctaggtganaaacaccccctcacagatacagggccaagnnnnnnnnnnngagcccgccggccgacgacaaagagaccataaaagaaaataaagcttgtcctgttgtgcg

SEQ ID NO: 352240 - DNA, 707 bp, Homo Sapiens
aaacctaggctaggtacgaggcctgggtggtgaatcggcacgaggctgatggtggccggcctgacaacacagggcgtggatatgtgttgagacggattctccgccgagctgtccgatacgcccatgaaaagctcaatgccagcaggggcttctttgctacgttagtggatgttgtcgtccagtccctgggagatgcatttcctgagctgaagaaggacccagacatggtgaaggacatcattaatgaagaagaggtgcagtttctcaagactctcagcagagggcgtcgcatcctggacaggaaaattcagagcctgggagacagcaagaccattcccggagacactgcttggctcctctatgacacctatgggtttccagtggatctgactggactgattgctgaagagaagggcctggtggtagacatggatggctttgaagaggagaggaaactggcccagctgaaatcacagggcaagggagctggtggggaagacctcattatgctggacatttacgctatcgaagagctccgggcacggggtctggaggtcacagatgattccccaaagtacaattaccatttggactccagtggtagctatgtatttgagaacacagtggctacggtgatggctctgcgcagggagaagatgttcgtggaagaagtgtccacaggccacggagtgtggaagtggtgctgg

SEQ ID NO: 352241 - DNA, 796 bp, Homo Sapiens
  misc_feature (40)..(40): n is a, c, g, or t
  misc_feature (358)..(366): n is a, c, g, or t
  misc_feature (535)..(535): n is a, c, g, or t
  misc_feature (766)..(766): n is a, c, g, or t
acagcagcattcaacagagctgggcaagggaaggggaganagagtcaaggattgaaatgaagggacttcaaaaagaaggaacaaactaaaaacccaacccacacacaatactgttaataagccagcgactctacacacacactccttaaataataaagtgacaggtcccggctggccccgcaagaccaccgcaagagggggtcccgccaccagagggggtcccgcctgccactgcacggctttcctccctctatctacaggacaaacaaaacacgggagaggggaaaaagcccacattttcttcttgataaatgctgttcaaaaacccatgaaggactcaaagtgacatggtggtttnnnnnnnnncctaaatgatcaacagatgttgctttctatatttttcctttgttctgtttgaactgggctaagtaagcacagttagaccctgctgttcacttgaccacgtcctaaacccgggacaagtgagcactcattcatgcacaagcagacccggaggcatgggctggggcagcanaactgggttcccgcagcgccctgcctgcaggctcatgctggaggccacggaaccaggcggcacagggcagattctgtttgtcaagcgccccacaagccttgcccagattgtcaagctcagcagcgagaatggttttgacgaggaggatggaaacagcatctgctctggaagccgctctggcgtggggagagtggggagagggtgcgcttgctgcagctgctgccttaggangctcctctgtggccaggcttctgctctgcc

SEQ ID NO: 352242 - DNA, 608 bp, Homo Sapiens
  misc_feature (140)..(159): n is a, c, g, or t
  misc_feature (171)..(171): n is a, c, g, or t
  misc_feature (187)..(187): n is a, c, g, or t
  misc_feature (207)..(207): n is a, c, g, or t
  misc_feature (209)..(210): n is a, c, g, or t
  misc_feature (266)..(266): n is a, c, g, or t
tggaaggcgggaccccctctggtggcgggaccccctcttgcggtggtcttgcggggccagccgggacctgtcactttattatttaaggagtgtgtgtgtagagtcgctggcttattaacagtattgtgtgtgggttgggnnnnnnnnnnnnnnnnnnnngggaagtccctncatttcaatcctggantttttttcccctccccttgntnnagttctgtggaatgctgctgtgcgcgtgtgagggccgctctgaacacagggccctngggttgtgtgaactgaaattctccctgtatttgtgagactcgcaggagtccccatctgtagcacaggcaatgccagtgccatgctgcagcctcagaaaccaggcctctcactccagcagcaggcagaaccgtgtctgtggtcgggtgctgtccacagctctgtctgccttgttcttgggcttgagctggatagaaggggggtctcttcaccttccctgaattcagaacagaccctgtgcctggaagcagtgtgcccaggcaattcgctaggccctctttgcaagacacctggtgttctgacgcagcaggctcagggcctgagaccatggtccgagagtaggg

SEQ ID NO: 352243 - DNA, 1082 bp, Homo Sapiens
  misc_feature (692)..(692): n is a, c, g, or t
  misc_feature (801)..(801): n is a, c, g, or t
agcggcctcgggttcctacctcgcgtccctaggcggcggcggccgggcgtcccgggatggccttcatggagaagccgccagccggcaaggtgctgctggacgacacggtgccgctgacagcagccatcgaggcgagccagagcctgcagtcccacacgagattgccttgcaacaggtttccatgttcttccgatcagaaccaaagtgggaggtggtggaacctttgaaagacataggttggagaataaggaagaaatatttcttgatgaagattaaaaatcagccaaaggaacggctagtgttaagctgggctgaccttggcccagacaagtatttgtcagataaagattttcagtgtctaatcaaacttctgccttcttgtttgcacccttacatctatcgggttacctttgccacagctaatgaatcctcagcgttgctaattaggatgtttaacgaaaagggaacattgaaggatctgatctacaaggcaaaaccaaaagacccatttctaaagaagtactgcaaccctaagaagattcagggcctggaactccagcaaataaaaacatatggacggcaaatattagaggtactgaagtttcttcatgacaagggattcccttatgggcatcttcacgcctccaatgtgatgctcgatggggacacttgccggcttcacaattcagganaatcaatacattggaaagtgtggatgtccactgctttggccacttactgtatgaaatgacttatggacgaccgccagactcggtgcctgtggactccttccctcctgcnccgtccatggctgtggtggccgtgttggagtctacgctgtcttgtgaagcctgtaaaaatggcatgcctaccatctcccggctcttacagatgccattattcagcgatgttttactaaccacttctgaaaaaccacagtttaagatccctacaaagttaaaagaggcattgagaattgccaaagaatgtatagagaagagactaattgaggaacagaaacagattcaccagcatcgaagactgacaagagctcagtcccaccatggatctgaggaggaaag

SEQ ID NO: 352244 - DNA, 874 bp, Homo Sapiens
agcgggcgtgttgacagcggcggcggtggaaccgggcgggcggcgggagtcggcgcctcgggttcctacctcgcgtccctaggcggcggcggccgggcgtcccgggatggccttcatggagaagccgccagccggcaaggtgctgctggacgacacggtgccgctgacagcagccatcgaggcgagccagagcctgcagtcccacacggaatatattattcgagtgcaaagaggaatttctgtggaaaacagctggcagattgttagaagatacagtgactttgatttgcttaacaacagcttacagattgcaggcctaagtctacctcttcctcccaaaaaattgattggtaacatggatcgtgaattcatagctgaaaggcagaaaggtcttcagaactatctcaacgtgatcacaacaaatcatatcttgtctaattgtgagctggttaagaagtttttagatccaaacaactattccgcaaactatactgagattgccttgcaacaggtttccatgttcttccgatcagaaccaaagtgggaggtggtggaacctttgaaagacataggttggagaataaggaagaaatatttcttgatgaagattaaaaatcagccaaaggaacggctagtgttaagctgggctgaccttggcccagacaagtatttgtccacgataaagattttcagtgtctaatcaaaacttctgccttcttgtttgcacccttacatctatcgggttacctttgccacagctaatgaatcctcagcgtagctaattaaggatgtttaacgaaaagggaacattgaaggatctgatctacaaggcaaaaccaaagaccatgttaaagaagtactgaacctagaagat

SEQ ID NO: 352245 - DNA, 451 bp, Homo Sapiens
ctttcctcctcagatccatggtgggactgagctcttgtcagtcttcgatgctggtgaatctgtttctgttcctcaaattagtctcttctctatacattctttggcaattctcaaatgcctcttttaactttgtagggatcttaaactgtggtttttcagaagtggttagtaaaacatcgctgaataatggcatctgtaagagccgggagatggtaggcatgccatttttacaggcttcacaagacagcgtagactccaacacggccaccacagccatggacggggcaggagggaaggagtccacaggcaccgagtctggcggtcgtccataagtcatttcatacagtaagtggccaaagcagtggacatccacactttccaatgtattgattttcctgaattgtgaaaaataagatcggtagaaggaaggcaggcccaataaggaattctc

SEQ ID NO: 352246 - DNA, 477 bp, Homo Sapiens
aagaaacagctgagcaggtccagagggcaccaaccttggaaggtaggagattgtggtgccaccactgtcactggtttggtcatcggagcagatgagaaggggtcctcaggtgtgctgaaggcattggtgatctgtgagcacagggagctgatgctctctgcctccccttctacttctggcactgcaaggcaaacagaaaatggctccagacagaaaaatggaataatcctgaaatttgacagtatgatgcaagctggcactttatactgtatctcctgcttatgtaagaaaaggctcaattaactgtatggcagggctacaaaaccagtttcaaaaaatttactggccacaatttcattggcttttcagatgggaaagtataaaatgtcaacaattaatgtactaaggcacatcttcctcccttacaaatccccaaatttcttcatttcttcttcttataacactgttgaggatctg

SEQ ID NO: 352247 - DNA, 1141 bp, Homo Sapiens
agaaatgaacaaagtctgtcctttttcccctcacatccccttattttcagagaacgagtactcagtggatgacgagtgcttggtgaaattgttgaaaggcctgtgtctgaaatacctgggccgtgtccaggagaccaaggagaattttaggagcatctctgccaatgaaaagaagattaaatatgaccactacttgatcccaaacgccctgctggagctggccctgctgcttatggagcaagacagaaacgaagaggccatcaaacttttggcaatctgccaagcaaaactacaagaattactccatggagtcaaggaccacactttcagaaatccaggcagccacactccaagccaagtcttcccctagagaacagcagcaagatccatggtctcatcagtgtccttgtagctttgtgcagacagttccgggctggaagacagagacagctggacagagctcctgaaaacatttcaaaataccccctccccctgccctgccctgcctttggggtccaccggcactccagttggatggcacaacatagtgtatccgtgcagaagccgagctggcattttcaccagtgtagccaagggcctttgccaagggcagagcaggtggagccctctgcctgccctatcacacatacgggtacttgcttttcactgtgatgtttaagagaatgtatgaacagtttacattttccttagaaatacattgatgggatcacagttggctttaaaaaccaacaacaatcaaccacctgtaagtctttgtcttcacctattatcatctggaggtaaatctctttatatgatgatgccaaagggcaaattgcttttcaaattcagcaagttctcagcttgtgtgacggaaggtccttcagaggacctgaggaatgcctgggagaggctaagcctcaggcttcaatgcttctggggttgggcatgaggatgtacacagacacccactaccttactactcacacttcatttcactccttttgtaaatttccaatttaaaacatcaagcacgtcttttgagtgagataaaatctgagctcttctgtagaaaaatccatctctaccagtagaaaatgccaggccttgatggaagagctgtgtagcccttcctatgcca

SEQ ID NO: 352248 - DNA, 1144 bp, Homo Sapiens
  misc_feature (382)..(453): n is a, c, g, or t
tctgtctccaaagatgaaaaaggacttctctgccctcaagggaaccccacagtatcttagaggagacaatcatgtcggtgagatggtgtggtgatgaagcctgctgggtatacagctcagggaaagtcatcgatgatggctcaggctcagcctgggcacgccccagaggagagagatggagtggggcctcaaagggcaggtttaggcagaaaagaaaaagggcattccagctggggcatgtgcaaaggcagcacgtaatgtgtaagttctagatcgtcagggaggaagggtcagttgggtgcctgtttttctgtttttagtcctttaaaatgagtagaagcaacctgttaccctggaaagagcactggacatagacctagtnnnnnnnnnnnnnnnnnnnnnnnnnnnnnnnnnnnnnnnnnnnnnnnnnnnnnnnnnnnnnnnnnnnnnnnngcccccagggatcatgtgaaagtgagaaagcccttttcacactgtggagcggtgcagatgtgggaaacctcaaagatggttgcccattttaaatcctttcatctctcatctctctttcttctctcccttctgccctgacgtaggcccatggttgggtgggtgaggccagaagaaactgcctccggcaagaggtagcaagccgctcaggtggctctgctggcatcggagcccacagaagtgaggagtggccgatggacctgccctccaaatgtgcctgactctgggtcttgctgtcactggatttcctggcatggcagacagaaagaaagatagtttgaccaagtcgtagaagctgatccagcgggtaaaaagggggcagggaactcgtcccttttattcttgcctcagagctgcctgaagacatgggccaggccggaggctggacaactttggataacgctgacctgtacttccaagtaaatgcctcctgaagagcccgggacccttcctgggagaattctgcagccagaatgaaggtgccatcagcaggaggcactgtgaagcaccatcctgtcgctgtccttgtccattcctagcaagttaatcgtgtcttgttaaccagcagttcctgttcaacgtgtaaagagacctgatgttttccctaataaagctgataacagattttgcaaaa

SEQ ID NO: 352249 - DNA, 687 bp, Homo Sapiens
  misc_feature (23)..(23): n is a, c, g, or t
  misc_feature (398)..(424): n is a, c, g, or t
tctcgtggactctggcaccacangtgccaggggtgagcgcaggccctcgacttgtcttcgccccagaccctgaaggaaggtgctccctcacacaccagggctggagagacactgcgctcagggacggcttgatgggagaggctggggcagggccttatgtcttctcctagtacaacaaacaagataaccagatgcaacgtgaagatctagactggaccctggtttgatgaaccagctgtaaaaacacatttctggaacaactggagaaaccggagtatgccctggactggatattaaataaaaatttattgacatgtaaagatggcaattattaacaacaacaaaaaacagattataaaacatttcatacaacacgattgtattttggcaagcaaatnnnnnnnnnnnnnnnnnnnnnnnnnnnggaaacgacctggaagaatatttggtgcttttattttttagattatttgtgtttctgaaatttctacaattaataaatactgctttaaaataatcaatggttatttgtaattttaaaaaatcaaggatttccattcaatgctagatgccacaagtgggtgacattctaagaaaaaatattggcgatatctacattgactagaaatttttatctagaacagactttttcaactgaagttcctcatctgaatctcaaaaaccagc

SEQ ID NO: 352250 - DNA, 366 bp, Homo Sapiens
  misc_feature (200)..(209): n is a, c, g, or t
  misc_feature (211)..(211): n is a, c, g, or t
tgcgtggccaaaaattgctggatctgttccaagacatctcgctgcatctccactgccatgtgatagacatccatggtctgagctattgtacattaacagcattctgaaacatcagcataatgtcacgctgaaattcagctgtgcttcggatcagtccattttctatgtttttcttaatagttgacaaatccataggcctnnnnnnnnnngnacaggggtaagtagcagtggggatggaaagaggacgcacctagatctatgaatacattatcatatagactttctcatatataccttaactcccagctgccagcacttaaatgctaaccccttatcccaaaacatgcacttaacccaagaaaaaat

SEQ ID NO: 352251 - DNA, 123 bp, Homo Sapiens
acattccaaacctaggaaagggatttctccttatctggctcttaacccaggagggctaaacacttcagctgcttgaagaaatcgcctgtggagctgcatgcctgccaaaggattgggataaga

SEQ ID NO: 352252 - DNA, 1095 bp, Homo Sapiens
cgaatgggtgcccccttggaaaaaagggggtccccgtgggttcttttcctgggctcccacaaggaggtttcttggcctgtgaccccggggccccggggtgaggccttccgcttggggggaaggaacctaaggggagagcaggatttttcccccccaagccatgggcgggccttgttctggtccctgtaaatagacccagccactgaaggggctgcagcgggaggtcaagcacaggaaagcttcagctccaccaaccccggtgctgacgttgcgctcatcctcatcgatgccaaatacaaaaaaccgcagggctcttctcctccagggctgtgggaaccagggggatggagaacttctcatcaaagaagatggagtaggcatttctctggatccgagaaatgcccacgatctgctcgtccggcagcaggctgacgcgcatgaagcaggactcgaagctggcctcctcccgctccaggaggtccttgccctgcatcaccgccacgttcagcgtgtgggaggcagtgtcgtactccatgctcacctccacctggcccagtgtgaagtcctgcccaaaggtgttgctcacggaggagatggagttcagggagtcggccgactgggacttccggagggtcccatagggggccaggtccaactcccggcccatcagctccagaggccccagttcactgatgctctcaaaggtgtcctcaatgctgagactgcctttgcggctgggtggtccccgcgtgctggcccgctgggcattccaggcaggcactctcttctccctggcctctgcgcagctctcgccgtacttctgctgaaggtacctgtagtcgtaattggggaacggagaggggctggggaagctccccgacgtccagagcttccacaggctcacagctgcgattcccagcagggccagggcccctgcagcatagacacccacctcccagccaggggggctcttgatgacgctcagatggtattctgccacatccacagccatgatgtctgctgcagtgactgtgaccgggctccgcggaggggccgccgctccggctggctccagatcccgggaattccggaccg

SEQ ID NO: 352253 - DNA, 2702 bp, Homo Sapiens
  misc_feature (426)..(434): n is a, c, g, or t
  misc_feature (453)..(464): n is a, c, g, or t
  misc_feature (1972)..(1972): n is a, c, g, or t
cggtgcgcacggagccgagccggggctcccgttgcgctgcaccgcgttgggtcggagtcccaggacttcagcggagatccgcgcgctgcgacggccggtgcagagcccgccgagcgcccagtcccggcccggggctgagttgggggcatgctctagccgcccccccggagcccgggagagaacccaggagcgccgccgcccagccccagcgccccgagcggaaccgctgcgaaggggccctgaacggccgtcgccctccctacgggcagcccccgggggttggcgaccgaagtctaggttttcgagaaagccagggtgggaaccctaactggactcttcgggacccccaggaaggatctgaggcctgagccatcctcctttctaccctgtctgccccccaggactgggcagttgcaggaggccctnnnnnnnnncccaggactgtggttgtgnnnnnnnnnnnnaaaggccggacaggatgggaccaagttagtctgtccagtctcacccagcacctcccaggcccagagagaacccccggggctctgaaagcttgccctgccgcctgaccgccatggagacgaagctgccccctgcaagcacccccactagcccctcctcccccggactgtcgcctgtacccccacccgacaaggtggacggcttctcccgccgttccctccgcagagcccggccccgccgctcccacagctcctctcagttccgctatcagagcaaccagcaagagctcacaccgctgcccctgctcaaagatgtgccggcttccgagctgcacgagctgctgagccggaagctggcccagtgtggggtgatgtttgacttcttggactgtgtggccgacctcaaggggaaggaggtgaagcgggcagccctcaacgagctggtggagtgtgtggggagcacccggggtgtcctcatcgagcccgtctacccagacatcatccgcatgatctcagtgaatatcttccggactctgccgcccagtgagaaccctgaatttgaccctgaagaggatgagcccaatcttgagccttcgtggccacacctgcagctggtatatagtttttcctgcgtttcttggagagcccagacttccagccctccgtggccaagagatatgtggatcaaaagtttgtcctgatgctcctggagctatttgatagtgaggatccccgggagcgtgagtacctcaagaccatcctgcaccgggtctatggcaagttcctgggtctccgggcctacatccgcaaacagtgcaaccacatcttcctccggttcatctatgaattcgagcacttcaatggtgtggctgagctgctggagatcctaggaagcatcatcaatggctttgcgctgcccctgaagacggagcacaagcagttcctggttcgcgtcctgatccccctgcactctgtcaagtcgctgtctgtcttccatgcccagctggcatactgtgtggtgcagttcctggagaaggatgccactctgacagagcacgtgatccgggggctgctcaaatactggccaaaaacctgcacccagaaggaggtgatgtttctgggggagatggaagagattcttgatgtcatcgagccctcccagtttgtgaagatccaggagcccctttttaagcaggtggctcgctgtgtttccagcccccatttccaggttgcagagcgggctctgtatttctggaacaatgagtatatcctaagcctcattgaggacaactgccacactgtgctgcctgctgtgtttgggaccctctaccaagtctccaaggagcactggaaccaaaccatcgtatcactgatctacaatgtgctcaagaccttcatggagatgaatgggaagctgtttgatgagctcacagcctcctacaagctggaaaagcagcaggagcagcagaaggcccaggagcgtcaggagttatggcaaggtctggaggagncttgctacgccggctacaggggacccagggggccaaggaggcccccctccagcggcttacaccccaggtggccgccagtgggggtcagagctagacagcacctcagaaggggaaaagctaaacccagagctgtcagtccccccaccccctctcctgtccaggggcccagagagaaacacacctacccctggccttgccagagtggcttctgaggactccctgcccagcccagctttcactggggggagacgaggagaggcaatggtggtcttggcaacagaatgctcagcccctcgtggcaggacttgacaagggcaagcttgaccaggaagctgccatcagggatcttcccctgccccgcaaagctaggctccagctgcaggcgggctcccaccctctgctcctggccttgggcaagggcactcagcgcctcgcctgcccctgccttggccaatgcgaggtccttccttatccccaccatggggtccatggtctatttattctcgcccagctcaccctctacacagacactgtcctgggtgcacactcctcccttccctcgctgtgtacttccttgtcccctttttatttattgggcagggggagggggagggcacaggcaagaagagattcacagtgtcctggggtaagggggggttcacagtaatcatggtctactcctctttccgtggctgggggtagacttaataaagagagaaattcaaaaaaa

SEQ ID NO: 352254 - DNA, 466 bp, Homo Sapiens
  misc_feature (68)..(68): n is a, c, g, or t
  misc_feature (372)..(372): n is a, c, g, or t
agtagctaagacttgttctgactccctgtagcttcctacagaagccagaaccactcaggccccacccngtcatcttctctgtgactgcaggctgggatctgtctgtcctctgctctcttccctcagtagagggtttttatggagtcacagaacaaaaatggttccatgccttccctttgccggtggggtggtagtgagggagtctggactgtgagggagtctggactgtggggggccccaggaaagggagctgcctcaccctctctccccagggagcagcagaaggcccaggagcgtcaggagttatggcaaggtctggaggagctgcggctacgcgcttaacaggggacccaggggccaaaggaggccctnccaagcggctttacaccccaggtgggccgccagttggggttcagagctagacagcacctcagaaaggggaaaagctaaacccagagttgtcagt

SEQ ID NO: 352255 - DNA, 441 bp, Homo Sapiens
ttgaacaaaggcaaaacttgaacccaggaaaactgccaatcagggaaacttccccctgcacccgcaaaagctaggctcccagctgcaaggcgggctccccaccctctgctccctggccttgggcaagggcactcagcgcctcgcctgcccctgccttggccaatgcgaggtccttccttatccccaccatggggtccatggtctatttattctcgcccagctcaccctctacacagacactgtccctgggtgcacactcctcccttccctcgctgtgtacttccttgtcccctttttatttattgggcagggggagggggagggcacaggcaagaagagattcacagtgtcctggggtaagggggggttcacagtaatcatggtctactcctctttccgtggctgggggtagacttaataaagagagaaattcaaaaaaaa

SEQ ID NO: 352256 - DNA, 784 bp, Homo Sapiens
atgtgacagatttgagataaatgggctgcaggaagtgggtcaacagtgccccttgcaggcccagcacgttccagcgtaggattttgtcactacaggacatggtacggagggctctccccgagccgaatgccatcccacgtaggcacaatgtcactggattccacagggattgtgccttctccgttctccaccttggtgcggagctttctgcttgccttgcttcttgctgtgtgcgcagaaggctgggaaccagcgacccccaacttttgcttggtaaacgaacttgggctcgtgaggaggtccggactggtcgaccaacttgaattcagcagcaaagccatgggagcgggcgtactccaaaaggccacccacagggttggtgttcaggtatctcacgagctcgccaatcttcctgaccttgttgggcatcatggattccaagttatcaagtgactctgagatcataccttcaggctggttatcagaagccatggagttggtcgcctccccatgtcagggccttcatggcttcctctgcggccatctgctttgccactttcttgctgggagcactcacactggggaaagtttgggctcccactgcaacacagtattggaacttgggttcatgggcagggccttcttcggacaggagacggaattcgcaggagttccccaatttgtgcatacactcaagcagtgtggtgacggggctcttcccagaaaagaaggatgtggctgaaggggtaggggtctgggactctgcagtcttctctgattcttt

SEQ ID NO: 352257 - DNA, 975 bp, Homo Sapiens
  misc_feature (939)..(939): n is a, c, g, or t
tgagagcagcagcgacggccgtggggacaacgtgggccatgtcatcattgggccgtcagccagtggcatgggaaccacacattggaaccagatgttggccacgctgcgcaggcccgtgtccatgtggcacgctgtccggcgaaactagcaaccagggcgggccagttgggcaatggagctgctggagcccggtacccactcagctctgtctgatgccctctccatagcccagctggagccgtgaacactggggtcccctggcagagtcctcatgacccatcctggtctctctgtccagattgcagcagaggagtgggcgtggctctgtgtccagggccccagggtctgctcctgctgaggaccagctgtggctgggccagggacagaggactcaaccctgctcctcccggtaggccagctgccgagccgggctatgttctggaacccagtgaatcttgggggccaggcactgtgctaggcaccagcaggggtaacacgaagaagacccggcccttagggcatcaggaagactagctcccctgccccggaggatctgctcagtgctgatggcagcccagctgtgtggactcagggggctctgagggctagggaaacaggaagggcctctttgacaaggtaggagctgtgcttggaggggcaggaaaagaactgagcatgtcgcaggcagcgggcccagcctgagcaatggcaggatgtgaacttccccatcgcaaatgcagttctcagcccactgcagtggaatacaaagaagggcctttttcggggccggagaagagaccaagagaccaggcccgggcagcagcctaccggccacgtggaacactggctccggagttattctctgtcaaatctactccccggacctcaaccatggcaagaaccagaggtccaaagaggcccagacccaggtccttgtgntcagtcctgcggcaaaccaggcccagaccctgcaag

SEQ ID NO: 352258 - DNA, 499 bp, Homo Sapiens
  misc_feature (75)..(75): n is a, c, g, or t
  misc_feature (109)..(110): n is a, c, g, or t
gctaaatcaccagctttcaggaacatgactgctcctggcagtggaaggtgctgaaacagaaattttaattaaaanctttatcaagtactcttcacagtgctgcttggtnncatagaaaatcagtacattatatcgagccctactttggaggagctggatttctgagggagctgatccagttctaagtgtcttctcgaattaggagatagatgatctttgatggggatctcctccgtcaccacaggccagtcacagaaccaactagccacgtgctgccagacctcagtgggcccaagcaggagcaatctcttctatcccccatctcccccaggaccatcccgcccattgtcaacgtcatccagggctcttctggtagtgagtgacttttctgcacatgtttagggcttgggggagctagaacacaggaaacatgaatgcaaaaggcatgggaaaacactgtttttgcttttgggttagtaaaatgttgggcaggacaaag

SEQ ID NO: 352259 - DNA, 489 bp, Homo Sapiens
  misc_feature (74)..(74): n is a, c, g, or t
  misc_feature (110)..(110): n is a, c, g, or t
  misc_feature (328)..(328): n is a, c, g, or t
  misc_feature (457)..(457): n is a, c, g, or t
actgattggaacactttcctcctcttccttcctagccccagctattcactggggactgtcatagctgggattcnaaaggtgccacatttttcagtttcatctccactagnttggttcccgggcaggaagtcaggcagcagggaaggacacgggaacagcaggtggagaattcctacagtctttcttaccctgctagcaatagctctcagtttcagaggcacagtctttggagaccattcagcactgagaaagcaatatttagaacctattgcaaaactgggcctgagttaggcatggtgatgaatgcatcagcaaggaatagaaagtncttatcgtgaaacccttcaacctcaactatgccttcatagacacacacgttcatgcacatgtaggcacatgtaccatctcacatctttcactttcccgagatgccatatacaattacctacattaatanctgtagcactatacctttttgagcccgagaga

SEQ ID NO: 352260 - DNA, 2033 bp, Homo Sapiens
caaaatggcatttgacagagatggtgaaaaggccgatatatctgccaatgtctatccagacataaacatcatcactggagcccttaaactgtatttcagagacttacccatccctgtcatcacatatgatacctattccaaatttatagatgcagcaaaaatctccaatgcagatgagaggctggaagctgcccatgaagtgctgatgctgctgcctcctgcccactatgaaaccctccggtacctaatgatccacctcaaaaaggttactatgaatgaaaaagacaatttcatgaatgcagaaaatctggggatcgtgtttgggcccactctgatgaggccccctgaggacagcaccctggaccaccctgcatgatatgcggtaccaaaagctgattgtgcagattttaatagaaaacgaagacgttttattctaatccatcagggaaatgagctgaatggccccagcaccatccaagttgacacagctaaaggaataaaaacatttcttaccacttgatttgttttccaagcaagtgctagaatttgctggactgcagaggatcgctgagtggggtactgtgtctcatagacatgcgccacctccacgtgagaacaagggtgaaggtgagggaagcccctcaccttgggtcttttgctgtgcctcctatgtatgtctggtttgctggaagagtgattaatacatctttaatttattaaaaaacaatgtagacctttaaacttcagtcttattggtaataaaagggaacttaattcatacaggtacttgatacagttatacattttccacttacaaaaagaagacaattctgttaaatgaaacctgtatcgtaaaatgtatttttattttacccacgagaatgttgttatttttagcaaatagaactcaatgcagtgcattggttattaccctgtgtaccttgtccctcattttgctgtgacaccctgaaaaagctgaccacaaatgcagtattatcttgacatacctctgtcctcctcagtgctttttaatgaaatttcacctgccccttgtgttcctgctttggacagtttttgctcttaagcattggcattcttctattgtatggtatgtatttatagcaattgtaggatggtctgaaatgtccacacactttctatgcatacaaattttgtgaattcccaaagtatgctttggaattggtcatagtcttttcgtatcatgagtgtgtatcccagaagatacagaatgcggtcattttacctgaaattatttgagaacactggatgtatctggtctgtgtaaaaagttagcactttaccctcttttcttcctggccaagccctctgaattcatctgttaatatcaaattgtatttttgccacatttctgtattggtgaaaagcgaatctgcagaataactgccaacgtttttcattcttgttttacaaacctattttttaaagtgagaataaggttggtttttaccaaatatttgttcctccttgacaaaagtagctctgtgtggataatatgattttattactacagttccagtcacttggttatatttatcttagcatgagcctttcacaccaagatttctatattttgtaacataggtgaaatatttaaaacatcaaaaactgtaaatctagatttttaaaaaatccaactgcaatgtcttttcctttgattgagatgatttgtgtaaactcaccagtcttgctttggagtgagcagaagagaatgactattttacgtggagcatcattgtgtgactgttgacctggacagtcccaagggctatgcagatggactccattggcacagggaggtttgacctcttccctgctattatccctcctcccaactgtacagatttgtttgttgtagtttatgtacttcttgatactgtcaaaaaattatctggaaatggttttattttgtgaagtgaacaatactttgtaatttatgatagtgtaaatggaaggcaaagcatcacatgtattaaattcttctgtctattaaa

SEQ ID NO: 352261 - DNA, 1616 bp, Homo Sapiens
  misc_feature (624)..(776): n is a, c, g, or t
cagagatcagcactaataggcattgcatggtccacacaggagagaaaccgtacagattgtgagcagtgtggaaaaggctttattggtaggctagatttttataagcatcaggtggtccacacaggagagaaaccatataattgtaaagaatgtgggaagagcttcagatggtcctcatgccttttgaaccatcagcgagtccacagtggagaaaaaagcttcaaatgtgaagaatgtgggaagggattttatacaaattcacaactgtcttcccatcagagatcccacagtggtgaaaagccatataaatgtgaggagtgtgggaagggctatgttactaagtttaatcttgacttgcaccagagggtccacacgggagagagaccttataattgtaaggaatgtgggaagaactttagccgggcctcaagtattttgaatcataagagactccactgccagaaaaaaaccatttcaaatgtgaggactgtggaaagaggcttgtacacaggacataccgtaaagaccagccgagagactatagtggggaaaacccatccaaatgtgaggattgtgggagacgctacaagaggcgcttgaatctggatatacttttatcattannnnnnnnnnnnnnnnnnnnnnnnnnnnnnnnnnnnnnnnnnnnnnnnnnnnnnnnnnnnnnnnnnnnnnnnnnnnnnnnnnnnnnnnnnnnnnnnnnnnnnnnnnnnnnnnnnnnnnnnnnnnnnnnnnnnnnnnnnnnnnnnnnnnnnnnntgagaggagttggtagacagcaagggaagggtccctggagacccccagccaaaggggtcagtgtctcatccccacataacacaaaaagcagcctggggaagacaatcaagctacaggcactgataagggaactagcacaggggattgtgcctggagacatgcccatgcctgcacagatagaagaacctccagcccattcaggtaaaaactcgcacaaacctccggctcactcagttaagggaacaagaccagacacagaaatgcctttgtcctttgtataatcagcaggctccgaggaaaaagtttcttcttttgtgggcatgaacacagtgggcttcagtaggttcaggttggcactttcttttgtggaaaaggaaaagcccagcctctgtaaatcatcacttcagctcctgattggtcccaggccaagctgaatagcccttaggaataatcacttcaactcctgattggtcccgggccaagctgaatagcccttatgaatcatcacttcggttcctgattggtcccgggccaaggtcccagaccaagctgaatcacgctttctccaagacagcccgcaggctaagtgcattccttccccttcccagtccataaaaaccccggaccccagcctcatactgggcaacttatttggatccccatctccactgtggagagcttttttctttcacttattaaacttttactccaatttcacccttgtgtctgtgcttcttaatcatattggacgtgagattaagaactccgggggatacatcacaagagagactgttacagtgtggtgcatttgtgagactacaacacatttttagcaatttg

SEQ ID NO: 352262 - DNA, 548 bp, Homo Sapiens
ataggtttgggcagctcaaagcataggaaatagtaagggttttctagagctcctcctttggtggcctgtttgagtagcacaagggacgtcatcctaaatgtgcagttgccatttgttctgtagtgacttacagggatctcagtggcaaagggcgtcagtgagacaacaactgagcaaaaagaactagacgaggcttgcgcttggaaagtcacggtaggattggacctgccggccacatggctcagggagtattgacggatttgcacattggcaggaaactctcccgtttgggattctttaaatggggcacagaaggccacctgtttgcatttctgggtaaaaaacagtcatcccccatgactgcctgcatcgggtttgtcttgtgccaaagttactcttcctttgtttttactttgccttgatttttagcattagctggtagtttggcttggaaatgtcctggatagccgattccctaagaaactgaaacatttaatattggcttaggatgtatcagatggggccaaataaagcttctttacaatagt

SEQ ID NO: 352263 - DNA, 1106 bp, Homo Sapiens
gtgaggctcggagtcgccggaggagccagtatctgtgtcgccgccgcccgcggcgtccccggtttggtgttgcggcgcccaccttcgggaggatcaggctgcttctgatgcttggaagatatcctctcagccacaaagatggtaataaatctttgcctcccacagttcagaccaagaattcactgcaacaagatatcagctgatggttacgaagtagaaaatctcatctctgaagatctcacaaagagaagtcatggtttcaggacagagtatttcattaagccaccagtctatgtgacagtttcatttccctttaatgtggaaatctgtaggatcaacatagacctcacagctgggggaggtcagaacgtcactggcctggaaatgtacacatctgcctcatctagcagagtgtcttggaatacgccccagtgccggaccctgggcccagctgagccatctgtcccagacaaggaggcgttcaccttggtaggcaaagtcttactgaaaaaccagagccaagtggtgtttagccacaggggcttcaaggccaggcccccttttggcgcgatggaagccacactcccctcccctgctgttgtggcccaggagctctggaataaaggggctctttcccttagccacgtggcccacttaaggatctgtatcacccatgtgacaggcggcggtatcccttgtatcaagcggttggaagtgtggggtcagccggccaagacctgctcccaggaagtgatagacagcatcctgctggtcacctcagagaacctgcctcaggatgtggctctgcaggctccagccttgcccatggaaagtgactgtgaccctggggaccagcctgagagccagcaggctccctccagcctgcagaagctggccgagatcattcaggatgtgcctgaggagttcctggatcccatcaccctgggagatcatgccttgtcccatgcttgcttgccctcaggcaaggtcatcgaccagagcacactggagaagtgtaaccgcagtgaagccacatggggccgagtgcccagtgaccctttcacgggggtagcttttactccgcactctcagcccctgcctcaccc

SEQ ID NO: 352264 - DNA, 1110 bp, Homo Sapiens
  misc_feature (82)..(128): n is a, c, g, or t
tgacggggtgtgccggggggaaaggggcagcatgatggtctgagatggtgtagcgtcggaccatgtggcagtttctgaggcnnnnnnnnnnnnnnnnnnnnnnnnnnnnnnnnnnnnnnnnnnnnnnncaatagcgtcctttcacaggctaacctcggctcttcccagtcctctggactaaaatggggaacacattggtgcctggcaccaatggggacttttgccccgccggaggcccccgccgagaggaacccctgcccaaccctgggagcttctgatgagctgcaccgtctatgcaaagatgtattcccagcacagatggagggagtgaagctcgttgtcaacaaggttctgagcagccatttccaggtggcgcacactatacacatgagtgccctgggcttgccgggatatcacctccatgcggcctatgcaggggattggcagctcagtcccactgagacgcagcatggccaagttcctgacatggcagtttgatggcgagtatcggggagatgactacacagccactctgaccctacgaaatcctgacctgattggggagccggcgatcatggttgctcacttcctgcagagcctcactcatcggctggtgctgggaggagagctagtttatcaccggcggccaggcgaagagggggccctcttgacactggctgggaagtactccgctgtacactgggtagctacattgaatgtgggatcacgcggggcccctgcaactcactacccaaatggcccacgaccccgttcaggtctgcgaatgggagtttgaggcaaatatcacgctcacagactcaaccttctcctctgggttaccacctgactctggcccccggcccaacatggtattttacaggcccgcgtggaaaccaaccggcgtgtgaaagcccctcgtctcgcagaaaaaccactgccccctcctgcccgtccaccctagcccctcgggagacctttccccctctatttggccccaccacattccactacgtgtgcttcccccaaatacctccgcgcgtttccggtcccgctccaaaataatcaccgttcccccggccgtttcgcttaccccttagccgatctagggcg

SEQ ID NO: 352265 - DNA, 2508 bp, Homo Sapiens
cagcaaagtaaggtcaggtacgaggctgggtggctgaatcggcacgaggaggctaacctcggctcttcccagtcctctggactaaaatggggaacacattgggcctggcaccaatggggactttgccccgccggagcccccgccgagaggaacccctgcccaaccctgggagcttcgatgagctgcaccgtctatgcaaagatgtattcccagcacagatggagggagtgaagctcgttgtcaacaaggttctgagcagccatttccaggtggcgcacactatacacatgagtgccctgggcttgccgggatatcacctccatgcggcctatgcaggggattggcagctcagtcccactgaggtgttccccactgtggtaggggatatggacagcagtggcagcctgaacgcccaggtcttgctcctcttggcagagcggctccgagctaaggctgtcttccagacgcagcaggccaagttcctgacatggcagtttgatggcgagtatcggggagatgactacacagccactctgaccctaggaaatcctgacctgattggggagtcggtgatcatggttgctcacttcctgcagagcctcactcatcggctggtgctgggaggagagctagtttatcaccggcggccaggcgaagagggggccatcttgacactggctgggaagtactcggctgtacactgggtagctacattgaatgtgggatcaggcggggcccatgcaagttactaccacagggcaaatgaacaggttcaggttggagtggagtttgaggcaaacacaaggctacaagacacaacattctcctttggttaccacctgactctgccccaggccaacatggtatttagaggcttggtggatagtaactggtgtgtaggtgctgtgctggagaagaagatgccccctctgcctgtcaccctagcccttggagccttcctcaatcactggcgcaacagattccattgtggcttcagcatcactgtgggctgaggttgtccagagccagcccccacagcagctggaacctctgagtcaggtgccctagggccaaagactaggcccctcttcagagcccaccttgctgggtgatctctaggacccaggagcagagtggtggacaggaccatgccctcctcagaactggagctgccacaggggcagttgatgaggcagaggctccgaggatcccccctctgctaccagccccagtatcaccttccccatgctcttgtggctgtggactaagggagaaggattaaggggtatggctgaattcccccggcaccccttgccctcaggcttccttcttcctttccctttggttaatcctgcatgggattagctgaccatcctgttttccatcccagagcctcccaaggctgggaaagtagggctgaagggctagatgtttggtctcaggaagtggggcccacccattcccagaaggagcttctttacctcttagccctgaggtttcctccttcccatcttctgtgcttccagagaacaactttgttcctatggtcacccccactatccccatgaccgcatgaagagggcagttattgctttagtctttcattgcaaccactgggctccctttgaacccggcccaatctttggtcccagcattttcccactccagtgtatccagggtgttccaggtgagctggggaaggaagtgagcatggcctcagctgcagatctcctggagcagcggcatcatggcagacaggccctggatgtgctggatttggtacccgtaggcctcattaatgctccggagctcagccagcaggcctagcaacttcgcatacagaaacctttggaggaagtagtggggttgccaggaaaacaggagggaaataaggcagttgggagtcttgtctctaggccctgatcccctgaactattcctcagtgaagccaggtctgaacattagagaaaatcatgctctggtatgacagactatcagaggttccaaaggtcctccagggggcctcggtctgacactgtcttctctcaccatgctcagttttttctgaacccaggagctctgagagccgagtgtgaagaaagctccagacttggccagaactccaaccatgtggaatctgagggcctggccttctagagcaggttctagaaggtggatgtgttctatggtataaagcatcccctttctggccaaactagctcttggaggaacgagcaaaacagaagcggtgcatacctcagagcctggataaatcacagactattgaacctggaactggctttgaccatgaaactgtgaatggccctaacttcaagggaaatgagaaatcgaaggaattggcccaatggcgaggagaggaaaggccaagggaagagaaaagtctgcgttagtctggagaagttggactagtgaggtaatggatgtcatcaatctcaggaatgctattacccagagcctctgagctactactttgcatctgtactgaat

SEQ ID NO: 352266 - DNA, 605 bp, Homo Sapiens
acaaactacggctaggtagcgaggcctgggtgtcgaattcggcacgaggaggctaacctcggctcttcccagtcctctggactaaaatggggaacacattgggcctggcaccaatggggactttgccccgccggagcccccgccgagaggaacccctgcccaaccctgggagcttcgatgagctgcaccgtctatgcaaagatgtattcccagcacagatggagggagtgaagctcgttgtcaacaaggttctgagcagccatttccaggtggcgcacactatacacatgagtgccctgggcttgccgggatatcacctccatgcggcctatgcaggggattggcagctcagtcccactgaggtgttccccactgtggtaggggatatggacagcagtggcagcctgaacgcccaggtcttgctcctcttggcagagcggctccgagctaaggctgtcttccagacgcagcaggccaagttcctgacatggcagtttgatggcgagtatcggggagatgactacacagccactctgaccctaggaaatcctgacctgattggggagtcggtgatcatggttgctcacttcctgcagagcctcact

SEQ ID NO: 352267 - DNA, 435 bp, Homo Sapiens
agcctcagacttcaagttaaagccacaatggaccacagagcttagacatcagggctaacatggaatctctgtcattaaatcttgagatcttactatctttggtcaaagaaaaaaataatcacaaatgacattttgaggacaagacatctgaatgtaaacttgatcctagaggatattaaggaattactggtaatttgattaggtatgacaatgatcatataaaaagtgccctcatgtttttagagggaaagtaaattacgtagggatgaatatcaggatgcaattacataactactgtcaactattttgtaaatacttcagaaaaacaaatgaagtaaatattgcaaatgttaatagtttttaaatctatgtgatgggtatatgatagctcattaaactggtgtctctacttttatgtttattgaaaagtttttg

SEQ ID NO: 352268 - DNA, 1083 bp, Homo Sapiens
  misc_feature (981)..(981): n is a, c, g, or t
  misc_feature (983)..(983): n is a, c, g, or t
  misc_feature (1007)..(1007): n is a, c, g, or t
  misc_feature (1033)..(1033): n is a, c, g, or t
  misc_feature (1041)..(1042): n is a, c, g, or t
  misc_feature (1055)..(1055): n is a, c, g, or t
  misc_feature (1067)..(1067): n is a, c, g, or t
cttctcgtttgaatatttgctaccaccaccaagatctgcaccgcggcgcggcggcggcggcgtagccgtagaggtgcacagagaacacccctagcatgaacagtgtgaggattccaccagctttttcaccatgaaggagacagaccgggaggccgttgcgacagcagtgcaaagggttgctgggatgctccagcgcccggaccagctggacaaggtggagcagtatcgcaggagagaagcgcggaagaaggcctccgtggaggccagattgaaggccgccatccagtcacagttggacggggtgcgcacaggcctcagccagctccacaacgccctgaatgacgtcaaagacatccagcagtcgctggcagacgtcagcaaggactggaggcagagcatcaacaccattgagagcctcaaggacgtcaaagacgccgtggtgcagcacagccagctcgccgcagccgtggagaacctcaagaacatcttctcagtgcctgagattgtgagggagacccaggacctaattgaacaaggggcactcctgcaagcccaccggaagctgatggacctggaatgctcccgggacgggctgatgtacgagcagtaccgcatggacagtgggaacacgcgtgacatgaccctcatccatggctactttggcagcacgcaggggctctctgatgagctggctaagcagctgtggatggtgctgcagaggtcactggtcactgtccgccgtgaccccaccttgctggtctcagttgtcaggatcattgaaagggaagagaaaattgacaggcgcatacttgaccggaaaaagcaaactggctttgttcctcctgggaggcccaagaattggaaggagaaaatgttcaccatctttggagaggactgtgaacaccagaattgagggcacacaggcagataacagagagtctgacaagatgtggcttgtccccacctggaaattataagaangncgtcctggatgacccattgtcgcnaaaactgatggtcagtgcttctcccnctataaannttaaaactctganatgtacacaaanctgggccgggtgcagg

SEQ ID NO: 352269 - DNA, 1387 bp, Homo Sapiens
  misc_feature (35)..(35): n is a, c, g, or t
  misc_feature (1148)..(1148): n is a, c, g, or t
  misc_feature (1160)..(1160): n is a, c, g, or t
  misc_feature (1175)..(1175): n is a, c, g, or t
  misc_feature (1293)..(1293): n is a, c, g, or t
  misc_feature (1303)..(1303): n is a, c, g, or t
  misc_feature (1345)..(1345): n is a, c, g, or t
tgaaagggcagagaaaattgacaggcgcatacttnaccggaaaaagcaaactggctttgttcctcctgggaggcccaagaattggaaggagaaaatgttcaccatcttggagaggactgtgaccaccagaattgagggcacacaggcagataccagagagtctgacaagatgtggcttgtccgccacctggaaattataaggaagtacgtcctggatgacctcattgtcgccaaaaacctgatggttcagtgctttcctccccactatgagatctttaagaacctcctgaacatgtaccaccaagccctgagcacgcggatgcaggacctcgcatcggaagacctggaagccaatgagatcgtgagcctcttgacgtgggtcttaaacacctacacaagtactgagatgatgaggaacgtggagctggccccggaagtggatgtcggcaccctgggagccattgctttctccacacgtggtctctgagctgcttgacacgtacatgtccacgctcacttcaaacatcatcgcctggctgcggaaagcgctggagacagacaagaaagactgggtcaaagagacagagccagaagccgaccaggacgggtactaccagaccacactccctgccattgtcttccagatgtttgaacagaatcttcaagttgctgctcagataagtgaagatttgaaaacaaaggtactagttttatgtcttcagcagatgaattctttcctaagcagatataaagatgaagcgcagctgtcataaagaagagcacctgaggaatcggcagcaccctcactgctacgttcagtacatgatcgccatcatcaacaactgccagaccttcaaggaatccatagtcagtttaaaaagaaagtatttaaagaatgaagtggaagagggtgtgtctccgagccagcccagcatggacgggattttagacgccatcgcgaaggagggctgcagcggtttgctggaggaggtcttcctgggacctgggagcaacatctgaatgaattgatgacgaagaagtggctattagggtcaaacgctgtagacattatctgtgtcaccgtgggaagactatttcaacgattttgccaaaattaaaaagccgtattaagaagaggatgacggccngaggcgcaccgngcgcgtgggtgggtnggagtacctgcggggcggttcatggcagaagcgcattttccttcccggagccccgggaggaacgcaagggagggtgcccgagaaagaatggttaggggagggcagaaagcagctgcgnccttcctgtntccgggaaacctgggcgttccgcgggttttcgggggggaaanaacggtgggaacgggaataactgtgcaaaaaaccccattgcg

SEQ ID NO: 352270 - DNA, 1147 bp, Homo Sapiens
gcctgggtggcgaattcggcacgagggtcagtttaaaaagaaagtatttaaagaatgaagtggaagagggtgtgtctccgagccagcccagcatggacgggattttagacgccatcgcgaaggagggctgcagcggtttgctggaggaggtcttcctggacctggagcaacatctgaatgaattgatgacgaagaagtggctattagggtcaaacgctgtagacattatctgtgtcaccgtggaagactatttcaacgattttgccaaaattaaaaagccgtataagaagaggatgacggccgaggcgcaccggcgcgtggtggtggagtacctgcgggcggtcatgcagaagcgcatttccttccggagcccggaggagcgcaaggagggtgccgagaagatggttagggaggcagaggcagctgcgcttcctgttccggaagctggcgtccggtttcggggaagacgtggacggatactgcgacaccatcgtggctgtggccgaagtgatcaagctgacagacccttctctgctctacctggaggtctccactctggtcagcaagtatccagacatcagggatgaccacatcggtgcgctgctggctgtgcgtggggacgccagccgtgacatgaagcagaccatcatggagaccctggagcagggcccagcacaggccagccccagctacgtgcccctcttcaaggacattgtggtgcccagcctgaacgtggccaagctgctcaagtagcctccgccggcctgccctgctcgcccctccacagcctcggtccctgcctttagaaacgcgggacagctgattgctctccttggccaaacgtgctccttttagctgcacggcctgtctttaggtgccagtgtgatgcaccgggtgtgcgtcgagtgagcgtcccgaggccacgtgcggaggcccctcactgtgctgtcaaaggcctgtgggtgcagggctctgccgcacagcctctcttgggtgcttgtttgttgcagtggttgaaagtgtgtggggcacagaggacgtgcacctccctgccctcctcctccctgggccttcaccgcaccccatctgcttaagtgctcggaaccccgtcacctaattaaagtttctcggcttcctcagagaaatg

SEQ ID NO: 352271 - DNA, 780 bp, Homo Sapiens
aagttgactctgaggccctggtgggctgcctgcggggcaagagtaaagaggagattcttgcaattaacaagcctttcaagatgatccccggagtggtggatggggtcttcctgcccaggcacccccaggagctgctggcctctgccgactttcagcctgtcctagcattgttggtgtcaacaacaatgaattcggctggctcatccccaaggtcatgaggatctatgatacccagaaggaaatggacagagaggcctcccaggctgctctgcagaaaatgttaacgctgctgatgttgcctcctacatttggtgacctgctgagggaggagtacattggggacaatggggatccccagaccctccaagcgcagttccaggagatgatggcggactccatgtttgtgatccctgcactccaagtagcacattttcagtgttcccgggcccctgtgtacttctacgagttccagcatcagcccagctggctcaagaacatcaggccaccgcacatgaaggcagaccatggtgatgagcttccttttgttttcagaagtttctttgggggcaactacattaaattcactgaggaagaggagcagctaagcaggaagatgatgaagtactgggccaactttgcgagaaatgggaaccccaatggcgagggtctgccacactggccgctgttcgaccaggaggagcaatacctgcagctgaacctacagcctgcggtgggccgggctctgaaggaccacaggctccagttctggaagaaggcgct

SEQ ID NO: 352272 - DNA, 1147 bp, Homo Sapiens
tgttatcagtctgggtcctatcgtgccggcctacgtgccagtttaagcgtaaggtatttctacactgtgaggggtccaaccgttctcggcctcttggacacgaatgttgacttcaggaaggccattggttggctggcctgtccgtgggtcactgaattttcaagatggagaattttcgttggcacattaatcaacgccctttccaaagatggattgccccccgtaattgcgtcgtatcggcgtctttcatgcccaggcactccccaggtagctggctggcttctgcctgactttgcagcctgtccctagcattgttgggtgtcaaacatacaatgcacttcggctggctcatctcccaaggtcatgagggatttatgatacccagaaggaaatggacagagaggcctcccaggctagctctgcagaaaatgttaacgctgctggttcccgggcccctgtgtacttctacgagttccagcatcagcccagctggctcaagaacatcacggccacgcgcacatgaaggcagaccatggtgatgagcttccttttgttttcagaagtttctttgcggggcaactacatctaaattcactgaggaagaggagcagctaagcaggaagactgatgaagtactgggccaactttgcgagaaatgggaaccccaatggcgagggtctgccacactggccgctgttcgaccaggaggagcaatacctgcagctgaacctacagcctgcggtgggccgggctctgaaggcccacaggctccagttctggaagaaggcgctgccccaaaagatccaggagctcgaggagcctgaagagagacacacagagctgtagctccctgtgccggggaggagggggtgggttcgctgacaggcgagggtcagcctgctgtgcccacacacacccactaaggagaaagaagttgattccttcattcacttcgccattcattcatacttccgtccatccattcagaaagcatttattaagaatttactcaggcatgatggcccatacttgtaatcccagctattgggaaggatgagatgggaggatggctgaggccagagtatacaccggccagccaggcacaacagacgtgatccggtcgcttgtgtttgctggccggcgtgct

SEQ ID NO: 352273 - DNA, 389 bp, Homo Sapiens
gtatcttatcaccatgggtgaggcaagaagtcttcagggggaggggccaccgtgtcatgggctgtccaccccacaggttcccgggcccctgtgtacttctacgagttccagcatcagcccagctggctcaagaacatcaggccaccgcacatgaaggcagaccatgttaaattcactgaggaagaggagcagctaagcaggaagatgatgaagtactgggccaactttgcgagaaatgggaaccccaatggcgagggtctgccacactggccgctgttcgaccaggaggagcaatacctgcagctgaacctacagcctgcggtgggccgggctctgaaggcccacaggctccagttatggaacgaaggcgctgccccaaaagatccagg

SEQ ID NO: 352274 - DNA, 755 bp, Homo Sapiens
  misc_feature (84)..(84): n is a, c, g, or t
  misc_feature (94)..(94): n is a, c, g, or t
  misc_feature (99)..(99): n is a, c, g, or t
  misc_feature (570)..(623): n is a, c, g, or t
agctcccaccaaacttacccccaaaagagcagcaagagtccactcattagggcacccagcccctgcagaagacgccagtcctgnacaagcgcanccagnccgggcagcagcagggtgcccaccaccgaaaaaaggccagcccccatggagaaggccaggcggtggggagggtcacacaactccaggcgagccagatacagggcgaggagggcccctgccaatgtgcccccgtggagtaggcgcaggaccagcagggtagggaagctggcagccagggcctcactggcccccaggcctgtggtcagcaccagggaggccacaaaaactgcccggcgtccaaaccggtcacagcctgctcccaggatgacacagcccagcagccagcccaggaggtggctcacctgctccagcgggaccttccagccgtctccacacacaaggttccactatggggaacagcagccacgtggaggccagctcaggaccctcccctggggacaggtgcagggagtcccagaatggctaactggaaggggccctccatgtccatgctcaatccctccgtggagnnnnnnnnnnnnnnnnnnnnnnnnnnnnnnnnnnnnnnnnnnnnnnnnnnnnnnagcctctctggtctccggcagcccctgcacaggggtcggggggatctgcccaccctaagttttctgcttgtccctagatagggcctcaccccacctccgcacaccattgctcttcccccacggccagctctg

SEQ ID NO: 352275 - DNA, 818 bp, Homo Sapiens
  misc_feature (83)..(83): n is a, c, g, or t
  misc_feature (637)..(637): n is a, c, g, or t
  misc_feature (730)..(730): n is a, c, g, or t
  misc_feature (732)..(732): n is a, c, g, or t
aacagtccgcagaagagaaaaggcgtctgattataaactacatcatcacgtaagtgaactgcactatgcccttgtggccaganaattgcattttctaaaaggaaggcagtcttttattctttttggacttccaaagcttgatttatagtaactacaaacatcacgacttttggaaggttatagaaaaactcttagaaaaaataatttcaaacattagtcacactgttgaaatactcatccaaatattaataatttgttcttcagtaagaaatagaattcttcataacaaatgccccagagttgcctcactcaaataccacagccattaaaaaccaaactgttagcgaaataggcaaaatgtttttgtagtcttactgaacacctgtagctctatccgctattgttccaataggcaccatgtttatctgaataagtaacagcaggtagcatctgacagatactaacactaagcttacatactgtatgaaaaagcctaacactgctacgtgtgcttgctataggtgtactgtctgatgcacatgaaagcggacctagttaacaacctttggggaccggagagtttactttgccttgactgggttctcgttccaaccagcgaactctaactttttgtttnataatgatactcttttaaaaaatcctgtaaaattgagggtagagggagcccatcaattccatcatacgtagtgcacctgcagattaccgcgcnanagatatactgcaggctaaaagggaaagtcctatttagtgatatagtaagcaatggttcaaaaaacatgcacgaactgggatcttta

SEQ ID NO: 352276 - DNA, 514 bp, Homo Sapiens
  misc_feature (190)..(191): n is a, c, g, or t
  misc_feature (313)..(313): n is a, c, g, or t
  misc_feature (459)..(469): n is a, c, g, or t
  misc_feature (483)..(483): n is a, c, g, or t
  misc_feature (495)..(495): n is a, c, g, or t
aggtcctgggtctgctctgggtcttagggagaatgagtagaaatttggaatggttcttgaggtcctcagttttcctgctcagaacatcaaggtagaccagatagctttggagtcaaagcctagctagtgctaaagaatgtggatctgcccaaagattcctctagctgtatgctgaatgggcagaggtccnncaagaagagtagaagcaaccgcaccccaactgtaacatttcaagaaagacaagtaacaaatcccttatatctttatagcatctttcaactaacgtagggcctcatatgcatatagatgtcanttctgtcatcatttgaggtaggcatattagactgatccccattttacagattttaaaaaaatttaggaagttaagtgaatttgcccggtgaatgtatagctgggcctagaagcaaagcccttaaatgttcaacccggactttcccnnnnnnnnnnnaatattcccaaagncccggttttaanagggtttccggggccccag

SEQ ID NO: 352277 - DNA, 885 bp, Homo Sapiens
  misc_feature (32)..(33): n is a, c, g, or t
  misc_feature (47)..(74): n is a, c, g, or t
ggcctcccaaagtgttgggattacaggcgtgnngtcccgcccggccnnnnnnnnnnnnnnnnnnnnnnnnnnnnagattgtaatgattaacagaaacaggggtacctttcccaggggtgtccaccagaagagttgaagaagaggtgagaagatcccaaggtgaagcctgtcaccacgcagacagaactgccccctattgtagacagtggtgggaagggcctggctcacatgcccctccttagaggcagcctcaagatgaaccagggaatcaaactcaaccaggaggcatgattccttctctcctgcaattgcacaaaaacaagtggtggtgaaacattgttctgttttcacaagagatgagggagcaggctttccaatatgctggaagtaattgtgcttagacacctcatcctcccaagctgtctagaaaggccatttcgctgtgttgtctaaataatgagggttttttcacaccatttctcaaaaggagatttgctgtcaacatcattttggtggttcaggtgtcactttcacttacagaaacttatgcatccttaagagatctcaattcttaagggtctaacttgccagagaaatctcattccagggactgattgtttttatcaccttctgtctggtcctgagtgactcactgtgtcacccagaaaagagacgtgtcaggcagaatcgagcttaattcacctgctcttaaacaattgttactggacacactgccttttagggttttctttctaggcaccaggtaaaactctggaaattcaaaggcatggggatatggaggctccagtaggggaaactaagggttttgaggggaggaaagagttttgtccacttaggacctcttgggctggttaactggaaact

SEQ ID NO: 352278 - DNA, 1400 bp, Homo Sapiens
ggtctcggagaactgccagaactcccgttctccgccgctttccccatcacggaggttaagtaggggcctgacaaggaggcctgtgtttcatatggtgaatcctcctaactcatgggccttcttcaggacatcttccacggtggacccggccagaacagagatggactgtctgtacggcggcaagagactaagcacctgcagcgtgacactgatgatctcttgggtctgaggaatggtctcagcagctggttccaacatgactcgtggtgccagacagtctgggaagatcagatcaatgtaggttctggtggttcagaacgggcagcagctgggaaatcatgagaggcattctggaaggctccatcctgcagactggccagcaaaagcaaccctcaccttgagacatgctgttcccagttctgccccacgcatgggggaagtcatgaggaactgtaatgccaatggggtgctgtagacattcccaaagtggccctcgggggtctgggccttcaagatctcctctcggcactgttctgatggccatggtgatccgttgtctccgaccagggttgaagtttgagcgcttcagacaggtgaatgccaagcctgccatggctgctgtgtccacagaatggtggccctggtggaaaggttccacagcatacagaagtttgtccaccacgctgtcatggacccgcttctggtggagacacagggccagaatgcccaggccatactggtagtagctagtgtgggggtggcccttgtgatcatgcccaatggctctcttctcatcctccaggaaccatttgagctgtgagaccagcctgtcccccttgtggcccctgacaaactcacagttggctctgagagcgagcaggtagagggccagctggcccatggaaggcttgccctggcagtcaccgtcatcctcgctgaaggcagaccctaggaggcactgctggtaaccaagcttgaggctgtgcaggtagaggtcttccttggtcccagcctgcagactggagaggcgtaggcccacatagatgctggggttcaagtgctccagggaaagccggtccatccaaggtaagaggtgctggcccaacttctctaccagatggctgtccatctctggtatttcacacatctcagtgagggcccccaggacccccagaaggaagaggaaggccccaaggtgcctcatggcagcagcaggtgggtgagcagtgagcaagaatcgggaaagactcctggggctggccctgctgaggctctcctgaccacagctggtcaccgctccgagagacgcagcttcctgtcactgattaatcctccatgcctgcaatgcacggctaagtctgcagaggggtggggcgggggaaggtctgtggtggcgggga

SEQ ID NO: 352279 - DNA, 1288 bp, Homo Sapiens
  misc_feature (981)..(1044): n is a, c, g, or t
tgaggaacggctttgtgactctagtgacaggtaccaccaggactggttgccttggtgacagtggatcccaagtcaactgcttctgcataactagtgacatggatcttaccggtccccaggcctggaagatgttctgtttggtgacagttgggaaagggacgtcagaggacagggtgggtttgctctcccttcaaagaaatatctgaggggtgggacgtggcccccagtaagtgagccagctggctgtgtgtcagtctgaggtggcagatgggggtgctcgcccatgaaactagaggggttgtgccctgttacccagaaactgcaggggactctcagggagagggggagaatgggagtctccaggactcaggtcaccataagggaaaataagcgcctcggcccacaacctccatgtgaccacggggagtgaccctgaagttcctgtagtctctccaggtgaggaggagggggaggaggaggcgcccagtgtcccacgtgaccgcaagggactagtgttcagtctccagtgagatgcagaaggtgtacggccggtctctagtcaatcccgggggtccagccaccaggcgaccacgggggcagttggtctgtttccaagtggtctcaggaggcgtagccagtcttcaggagcctgcgggttctgctggcctcctgaggtcctcagggggcgtgaccctcatggagaaagttggggagttgggggaatcctctatccagaagaggtgagggctggccaggctccagggaactccaaagtactgttctgccaggactagccagtcttcagggaccccaggggcacagttagtttgtaagggaccacagggaatgtggccagtgtccaagggcttcaagggcgtggccaggctccaggggaccacagggctctagaccagtggtcaagcgcctggctgtccgcctactcccagcctagacgtgcagaggggtccaggcagcaggatnnnnnnnnnnnnnnnnnnnnnnnnnnnnnnnnnnnnnnnnnnnnnnnnnnnnnnnnnnnnnnnnggtccggtgctcctggagcgcggtagcagtagacgccgaagagccgtcgggtggcgtccgggaagccgaggctgcgcacaccaggcctgcggcctccgcagcgcgctcgcgggttcacgatggggtagcgcagcactgccatcggccagccaacccgcggtgcagcggtctagcagctgcagcttccacgcggcgaacagctgccccaccttggccacggccgcgcgcgcgcagcacacgcgcg

SEQ ID NO: 352280 - DNA, 370 bp, Homo Sapiens
  misc_feature (83)..(83): n is a, c, g, or t
  misc_feature (235)..(235): n is a, c, g, or t
catgaatcccctcctgagataccctggattccagcaggagtaggatgaggcctagaatctgcattttaatagcacttagtgcntctgatgctgtagtcaatggacacatgttgaatatcactgtaatactcatttgctgaatgagcggtatgtaccaatcctaactatagaaggccagttcattatacacagttcctggcatcaacatacagaaggtatgagctcctttgaaccntcttatggtgttacacaatgagtaataatggaccagtttctttctctgcatcatggcagaaatgtactcaatctttttctgtaacatttctggagagggcagggggaaaaaaaggtaaaatattttacaaattac

SEQ ID NO: 352281 - DNA, 1966 bp, Homo Sapiens
  misc_feature (1904)..(1916): n is a, c, g, or t
aggattctgataatcctgaccttcgagaccggggctatatttattggcgccttctctcaactgaccctgttacagctaaagaagtagtcttgtctgagaagccactgatctctgaggagacggaccttattgagccaactctgctggatgagctaatctgccacattggttctttggcctctgtgtatcataagcctcccaatgcttttgtggaaggaagtcatggaattcatcgtaaacacttgccaattcatcatgggagcactgatgcaggtgacagccctgttggcactaccactgcaacgaacctggaacagcctcaggttatcccctctcaaggtgatcttctaggggatcttttaaaccttgacctcggtcccccagtcaatgtgccacaggtgtcctccatgcagatgggagcagtggatctcctaggaggaggactagatagtctgcttggcagtgaccttggcgggggcattggaggaagtccggcagtgggacaatccttcatcccatcatcggtgcctgcaacctttgctccttcacctacacctgctgtggtcagcagtggactgaatgacctgtttgaactctccacagggataggcatggcacctggtggatatgtggctcctaaggctgtctggctacctgcagtaaaggctaaaggcttggagatttccggaacatttactcaccgccaagggcacatctatatggaaatgaacttcaccaataaagctctgcagcacatgacagattttgcaatccagtttaacaaaaatagctttggtgtcatccccagcactcctctggccatccatacaccactgatgccaaaccagagcattgatgtctccctgcctctcaataccttgggcccagtcatgaagatggaacctctgaataacctccaggtggctgtgaaaaacaatatcgatgtcttctacttcagctgcctcatcccactcaatgtgctttttgtagaagatggcaaaatggagcgccaggtcttccttgcaacatggaaggatattcccaatgaaaatgaacttcagtttcagattaaggaatgtcatttaaatgctgacactgtttccagcaagttgcaaaacaacaatgtttatactattgccaagaggaatgtggaagggcaggacatgctgtaccaatccctgaagctcactaatggcatttggattttggccgaactacgtatccagccaggaaaccccaattacacgctgtcactgaagtgtagagctcctgaagtctctcaatacatctatcaggtctacgacagcattttgaaaaactaacaagactggtccagtacccttcaaccatgctgtgatcggtgcaagtcaagaactcttaactggaagaaattgtattgctgcgtagaatctgaacacactgaggccacctagcaaggtagtaactagtctaacctgtgctaacattagggcacaacctgttggatagttttagcttcctgtgaacatttgtaaccactgcttcagtcacctcccacctcttgccacctgctgctgctatctgtccttacttgtgggcttctccatgctgtgccaatggctggctttttctacaccctcttttgagtgtagtttggtattttgtaattgagagctcatttcaaaagcagaaaaagacaacaaatattaaagcaaggaaaagtgtaactgaaacactgcactttactgttcttatacttttgtacatatgagaaatcaacgggattagtgcaaccagtagaaagcattgaaatgactgtcattaaccacacagtcctggaggcagagatgcagttacctaccctagctttgatgggttctcttacctgtagtagccttatccctggtcattggatttcagttgcnnnnnnnnnnnnncccctccaaactccttttccttgggcaagccttcatgcttccccctttcc

SEQ ID NO: 352282 - DNA, 2640 bp, Homo Sapiens
  misc_feature (2282)..(2282): n is a, c, g, or t
tagaaaagaatcgtgacgggcaggaaaccattacaccaccacctgggctgtgctctccggctcccgccgccacccccgccctcgccttcgcctccgcctccggtgcacattaaagatccaaagtcatgactgactccaagtatttcacaaccaataaaaaaggagaaatatttgaactaaaagctgaactcaacaatgaaaagaaagaaaagagaaaggaggctgtgaagaaagtgattgctgctatgaccgtggggaaggatgttagttctctctttccagacgtagtgaactgtatgcagactgacaatctggaactaaagaagcttgtgtatctctacttgatgaactacgccaagagtcagccagacatggccatcatggctgtaaacagctttgtgaaggactgtgaagatcctaatcctttgattcgagccttggcagtcagaaccatggggtgcatccgggtagacaaaattacagaatatctctgtgagccgctccgcaagtgcttgaaggatgaggatccctatgttcggaaaacagcagcagtctgcgtggcaaaactccatgatatcaatgcccaaatggtggaagatcagggatttctggattctctacgggatctcatagcagattcaaatccaatggtggtggctaatgccgtagcggcattatctgaaatcagtgagtctcacccaaacagcaacttacttgatctgaacccacagaacattaataagctgctgacagccctgaatgaatgcactgaatggggccagattttcatcctggactgcctgtctaattacaaccctaaagatgatcgggaggctcagagcatctgtgagcgggtaactccccggctatcccatgccaactcagcagtggtgctttcagcggtaaaagtcctaatgaagtttctagaattgttacctaaggattctgactactacaatatgctgctgaagaagttagcccctccacttgtcactttgctgtctggggagccagaagtgcagtatgtcgccctgaggaacatcaacttaattgtccagaaaaggcctgaaatcttgaagcaggaaatcaaagtcttctttgtgaagtacaatgatcccatctatgttaaactagagaagttggacatcatgattcgtttggcatctcaagccaacattgctcaggttctggcagaactgaaagaatatgctacagaggtggatgttgactttgttcgaaaagctgtgcgggccattggacggtgtgccatcaaggtggagcaatctgcagagcgctgtgtaagcacattgcttggatctaatccagaccaaagtgaattatgtggtccaagaagcaattgttgtcatcagggacatcttccgcaaataccccaacaagtatgaaagtatcatcgccactctgtgtgagaacttagactcgctggatgagccagatgctcgagcagctatgatttggattgtgggagaatatgctgaaagaattgacaatgcagatgagttactagaaagcttcctggagggttttcacgatgaaagcacccaggtgcagctcactctgcttactgccatagtgaagctgtttctcaagaaaccatcagaaacacaggagctagtccagcaggtcttgagtttggcaacacaggattctgataatcctgaccttcgagaccggggctatatttattggcgccttctctcaactgaccctgttacagctaaagaagtagtcttgtctgagaagccactgatctctgaggagacggaccttattgagccaactctgctggatgagctaatctgccacattggttctttggcctctgtgtatcataagcctcccaatgcttttgtggaaggaagtcatggaattcatcgtaaacacttgccaattcatcatgggagcactgatgcaggtgacagccctgttggcactaccactgcaacgaacctggaacagcctcaggttatcccctctcaaggtgatcttctaggggatcttttaaaccttgacctcggtcccccagtcaatgtgccacaggtgtcctccatgcagatgggagcagaggatctcctaagaggaggactagatagcctggtgggacaatccttcatcccatcatcggtgcctgcaacctttgctccttcacctacaactgctgtggtcagcactggactgaatgacctgtctgaactccccacagggataggcatcgcacctgcgtggatatgtggctcctaaggctgtctggctacctgcagtanaggctaaaggcttggagatttccggaacatttactcaccgccaagggcacatctatatggaaatgaacttcaccaataaagctctgcagcacatgacagattttgcaatccaggttaacaaaaatagctttggtgtcatccccagcactcctctgggcatccatacaccactgatgccaacccagagcattgatgtctccctgcctctcaataccttgggcccagtcctggagatgggacctcctgataccctccaaggggcctgtgaaaaacataatccatggcttcttactctagtggcctcatcccactcaaggggctttttggaaaaaaaggcaaaaggggacccccggtcttc

SEQ ID NO: 352283 - DNA, 2604 bp, Homo Sapiens
  misc_feature (428)..(453): n is a, c, g, or t
  misc_feature (2578)..(2578): n is a, c, g, or t
gggggcacaacctgttggatagttttagcttcctgtgaacatttgtaaccactgcttcagtcacctcccacttcttgccacctgctgctgctatctgtccttacttgtgggcttctccatgctgtgccaatggctggctttttctacaccctcttttgagtgtagtttggtattttgtaattgagagctcatttcaaaagcagaaaaagacaacaaatattaaagcaaggaaaagtgtaactgaaacactgcactttactgttttatacttttgtacatatgagaaatcaagggattagtgcaaccagtagaaagcattgaaatgactgtcattaaccacacagtcctggaggcagagatgcagttacctaccctagcttttgatgggttctcttacctgtagtagccttatccctggtcatttggannnnnnnnnnnnnnnnnnnnnnnnnncccctccaaactccttttccttggccaagccttcatgcttccccctttccatattataatctcatttgattgctctgcagttgggaacggtgatcttcttgaatgatgtttcagtgtgcaaaaactatagagcctgtcagcaccaaagctgacagaagttataccttactcctttcctttcccctgaacaaacctgctaatcccactaattcaggaatttgagtagagatggggaacaagaacccagatgctgtcccctcaccccctctcctgtatttctcaggtccagttcaaatctaaaattctacttttagagttgaaacagagtaataacttatctaaccctcttttcctacaaaggagaaagataaaaggcacaaaggttaccgccaaggcccgtcagctgtgtagtggcaaagccgagaccgagtctcctaagtccccgtcagtgtggttttcaccacaggactgtctcttgtcgttttcccctaatgccttctcctgccttttctgtgcctagtttttggctcttcacatattccatattgattttgacgctctgtatattggcatcaggtggcagctgaatatcttttgaattactcgaaggtaaagccagatgccagaatgaaggtgtagccagtgtttcccatatgcccctggagccccacttattgaggccagcagaataggtgcagagatgaagtgagcttagagatgttgcaaatgctctttatcccttcagctctctgatctgctctttcttcatgatacttagtctgcagggcatattaagatcatcccagaggttcaggcagttcctgtcatctctgaaaagactgggggatatgaaatcttccccctaccccacttaatgcgttggatatgatttttcaaagaatgcttcatgcccaaaataccagcctgtttagcagtgttacactgtttgatctgcgggcacttgttgcattgcctggcacccaatattcagggtccatgactaagactggtcttctcagatgccctgcttaaatcaggggcacttcaggctccacaggcgtcatgttggactgagacctaactcactggactcagaggaggaatcgtggaaaacaagagcaaaactaccccacacccctatttcatgtctgaaataaccctgtttcataccagttgcaaagcttgtggggagcggtcccacaaagcactttcttaaaccttgagaatctccaagagaaaaatatttggggaaggagggaggaaatatgtcccttgcacaccacccctgaagcacatggcagtaggaaacagcataggattgtatgtgggaggtggataggtcggtgatgtgtggagcggaaaagcaggttggtaaagttcccttcttgggacttattcctggagtcagtggatacaagtagtgcagaaggttcacactgcaaatagtgttctcatctcaaagcaaactatcattccagaaggaaaagtgtgtcagggcaagcagacaacacaatttcctatcagaatatgtccctcaacccccgaaacaaggcttctctcagcctccccaccagtgatggataacagctcctattctcagctgacctgactgagccaacccatgaactcttcactccttggggaagccacctcccatcacacccctgagcagagttagggaggaattctacttcccataaaaggacctctcctgagaggcaaaacctgttgcctccaccacggcttccctcttggctcattccaagcttggccaaattggggaagtgggatggaggttgccctgcatcccccctcctctgcctgagtgtgtctttgtaatgtcagctggcatcatacaaagagcaggagaagcaaacacccagaactcttttgctggtcagagattccctgagtgtctgtcctcacccaagcctgctctgtgtctgtgttgtgaagcttgagactctggaaagaaatggggagggggggcaggggaaatgttgccctaagaatgcttctcattcctctgttcttattgggtcctgtttttcgggagggtgggggttgggggaagcttgaccttgtgtcttcgtcaataaactcacatttacaccaaacaccatcntataaccaaaaaaacaattcttgtcg

SEQ ID NO: 352284 - DNA, 399 bp, Homo Sapiens
  misc_feature (365)..(365): n is a, c, g, or t
ggggacggggtcggggacggagagaagggtaacaccaggctgggtcggagaccggcggaggcgaggaaatcctaagagcgagaccgttgatgatgcagggaaccgtcgggtgtgaccattgagagggaaaaggtgcacattaaagatccaaagtcatgactgactccaagtatttcacaaccaataaaaaaggagaaatatttgaactaaaagctgaactcaacaatgaaaagaaagaaaagagaaaggaggctgtgaagaaagtgattgctgctatgaccgtggggaaggatgttaggtgctgctcttctgaggtgaatttttggtatttttcttttggttgttagcacataaagcacatttgngttttaaattgctgtcctgtgaccatccatctaa

SEQ ID NO: 352285 - DNA, 1221 bp, Homo Sapiens
  misc_feature (1145)..(1145): n is a, c, g, or t
  misc_feature (1148)..(1148): n is a, c, g, or t
  misc_feature (1156)..(1156): n is a, c, g, or t
  misc_feature (1219)..(1219): n is a, c, g, or t
agcgggccgctccggggtggagtcacggctcgcgactggcctaagtcgccgcagaactgccacgtggggatgagatttgctgggctggtagcggcggctgctgcgggaggtcccgcccacgtgaagccagcctaactgagctctcagacgtgcacaccatggatctgggaaaacaccagtgggacttagatacctgcaagggcctcttgccccggtatgaacatgctagcttcattccctcctgcacacctgaccgtatctgggtatttggaggtgccaaccaatcaggaaatcgaaattgtctacaagtcctgaatcctgaaaccaggacgtggaccacgcaagaagtgaccagccccccaccatccccaagaacattccacacatcatcggcagccattggaaaccagctatatgtctttgggggcggagagagaggtgcccagcccgtgcaggacacgaagctgcatgtgtttgacgcaaacactctgacctggtcacagccagagacacttggaaatcctccatctccccggcatggtcatgtgatggtggcagcagggacaaagctcttcatccacggaggcttggcgggggacagattctatgatgacctccactgcattgatataagtgacatgaaatggcagaagctaaatcccactggggctgctccagcaggctgtgctgcccactcagctgtggccatgggaaaacatgtgtacatctttggtggaatgactcctgcaggagcactggacacaatgtaccagtatcacacagaagagcagcattggaccttgcttaaatttgatactcttctaccccctggacgattggaccattccatgtgtatcattccatggccagtgacgtgtgcttctgagaaagaagattccaactctctcactctgaaccatgaagctgagaaagaggattcagctgacaaagtaatgagccacagtggtgactcacatgaggaaagccagactgctacactgctctgtttggtgtttggtgggatgaatacagaaggggaaatctatgacgattgtattgtgactgtagtggactaataaaacccacatttttattacctgtcagttactttcagaatagttaagtaaaacattagctgttttatnccnccaaaatntcttctgcattatatatctgtttttctcctactttggtaggtgaagaaagtaatgcaaataantc

SEQ ID NO: 352286 - DNA, 974 bp, Homo Sapiens
ccccagggccccacaggtggagtgggccagccccagcctggtgggagcaagcccccaggggggatttaggttttgccattttcagtccacttattccaatgcagtgagggtcatcatagaattcgtcccccgccaagcctccgtggatgaagagctttgtccctgctgccaccatcacatgaccatgccggggagatggaggatttccaagtgtctctggctgtgaccaggtcagagtgtttgcgtcaaacacatgcagcttcgtgtcctgcacgggctgggcacctctctctccgcccccaaagacatatagctggtttccaatggctgccgatgatgtgtggaatgttcttggggatggtggggggctggtcacttctggcgtggtccacgtcctggtttcaggattcaggacttgtagacaatttcgatttcctgattggttggcacctccaaatacccagatacggtcaggtgtgcaggagggaatgaagctagcatgttcataccggggcaagaggcccttgcaggtatctaagtcccactggtattttcccagatccatggtgtgcacgtctgagaagcttctgtttggatttgctcccccaacaatgaagaccttccctctcttggcattaccaactgggggtaaatatgaacagctgtggccaactcgagcacaggggctgtctccagggacagtcaaggtgtaccatgttgctttcctgggcttgtctccaggttccaagactggcagttgcttcatggtgtcctgcggcctaggccactgacagctgtccccaaagtccagagctcagttaggctggcttcacgtgggcgggacctcccgcagcagccgccgctaccagcccagcaaatctcatccccacgtggcagttctgcggcgacttaggccagtcgcgagccgtgactcccgctctcgacgaattcgagctcggccgatttggcctgat

SEQ ID NO: 352287 - DNA, 930 bp, Homo Sapiens
  misc_feature (852)..(852): n is a, c, g, or t
  misc_feature (902)..(902): n is a, c, g, or t
gggagtccggggctggagggtaggggcgagggtccccggataccgggtctatcacggtctcgggcagggagtctgaatcttttaggggagtgggcccaagccgggtgcaaagaacggggaagggccttccctggctccgtcccggccactttgaccgaatcagcctgttctttcccgaccccgtctcctatcccctagaactgccacgtggggatgagatttgctgggctggtagcggcggctgctgcgggaggtcccgcccacgtgaagccagcctaactgagctctggactttggggacagctgtcagtggcctaggccgcaggacaccatgaagcaactgccagtcttggaacctggagacaagcccaggaaagcaacatggtacaccttgactgtccctggagacagcccctgtgctcgagttggccacagctgttcatatttacccccagttggtaatgccaagagagggaaggtcttcattgttgggggagcaaatccaaacagaagcttctcagacgtgcacaccatggatctgggaaaacaccagtgggacttagatacctgcaagggcctcttgccccggtatgaacatgctagcttcattccctcctgcacacctgaccgtatctgggtatttggaggtgccaaccaatcaggaaatcgaaattgtctacaagtcctgaatcctgaaaccaggacgtggaccacgccagaagtgaccagccccccaccatccccaagaacattccacacatcatcggcagccattggaaaccagctatatgtcctttgggggcggaaaaaagagttgcccagcccggtgcagggacacgaagctgcatgtgntttgacgcaaaccactctggacctggtcacagcccagaggacacttgggnaaatcctcccatctcccccggggaatgg

SEQ ID NO: 352288 - DNA, 1673 bp, Homo Sapiens
  misc_feature (874)..(874): n is a, c, g, or t
  misc_feature (887)..(887): n is a, c, g, or t
  misc_feature (890)..(890): n is a, c, g, or t
  misc_feature (924)..(924): n is a, c, g, or t
  misc_feature (1004)..(1004): n is a, c, g, or t
  misc_feature (1064)..(1064): n is a, c, g, or t
  misc_feature (1103)..(1141): n is a, c, g, or t
  misc_feature (1179)..(1196): n is a, c, g, or t
  misc_feature (1206)..(1206): n is a, c, g, or t
  misc_feature (1227)..(1235): n is a, c, g, or t
  misc_feature (1288)..(1288): n is a, c, g, or t
  misc_feature (1293)..(1293): n is a, c, g, or t
  misc_feature (1298)..(1298): n is a, c, g, or t
  misc_feature (1300)..(1308): n is a, c, g, or t
  misc_feature (1312)..(1321): n is a, c, g, or t
  misc_feature (1335)..(1372): n is a, c, g, or t
  misc_feature (1416)..(1420): n is a, c, g, or t
  misc_feature (1422)..(1422): n is a, c, g, or t
  misc_feature (1479)..(1479): n is a, c, g, or t
  misc_feature (1564)..(1564): n is a, c, g, or t
ggtacccgggccccgtggagattttatcgggcattcgtcgacccacgcgtcgcccacgcgtccgctctcctcggccaggaggctgaggcctgcactgcagatgatcctgcggaccacgtcaaggtcccggcacacgctgctgtccacgtcgtccagaatcacgccctcctgggccatgttgtctttgatgacgatgatgccgttggggcggaggctgcccttgcagcgccgcaggaactcggccaggtgctgatcggtgaggtggcctggggagggcagaggcaaggttaccagggcaccatgcaagcggatgtcggcactggatgggatgtacttctcagccccgctgagcccctcatttgtgcccagcattttgtgtgcacacatggcctcattggctctcagtcccgagagatttactaaaccccaattcatagaataggaaactgtggctcagaggtcatctacctaaagacacattaagccagaatttgacttgacgggatggcttacaagtcctgcctgatacctacacaccatgatgccccacccctgccaggcttggatcggaggagtgaacctgggctaagagtttggcattgcaggagctcccagagagactgccttccctacactagaagtccccacaaaggcttctgagaccacaaaatacaaggccagacctagagtgtccacagcaggcctgtgctgcccgcctcaggaggtggccgactgctgctagcggcctgccgccacgtcagcagcccagggcacagcgctcgaggtgtgctgttaggctaagagggtgcagggctagacacgaagcttaaactattcatcttattaaaaataaaacccttatataatagcttcnccatggtggggcnggnttggaagggaacaaaccctagaaaaaatttggtnccttttgccgggcccggcctcggacccatccaaaaaacctttttctaagaaccattccgtttgggccccccgggcccccnaaagtaaacggcaaaatggggcataacccgtgtttttcctcttcaaggaaaacccccgcngccacacagaattttaaagggggggtggttggtttcctnnnnnnnnnnnnnnnnnnnnnnnnnnnnnnnnnnnnnnngggcggggggcggcgcccaaaaaacctaggtttgttcnnnnnnnnnnnnnnnnnncacggggccncccccccggccttcaggacannnnnnnnnctttaaaaaaaaccacgggccgcccccgcgcccggcccccgggcctccttttnctccntcctntnnnnnnnnntatnnnnnnnnnnccggaaaagtaccnnnnnnnnnnnnnnnnnnnnnnnnnnnnnnnnnnnnnnttagagggcgaagatagtcattccccctaccccaccaaaacacnnnnnanaggaggcggggaaaacactgtgcctttctaccccctattacattctaaaccccatanccccaacaatccacccactcggcaatgcccctacccgccgagacgtatcgtgtgggaaactccccggcagcggcggacgaaattnccccccgcaagagggccgagagcggaagacaacctcatcccgtttcgcgcccgcacattgacacccccacccttgtttctcctcgcccccatgggggcgggtgactcct

SEQ ID NO: 352289 - DNA, 1651 bp, Homo Sapiens
  misc_feature (1539)..(1600): n is a, c, g, or t
aagcggctggtacgtccgggggtatgggatccgcgagctgtcgcgtctggtcgtggtctggcggagctgcggttggcttgtggcgtctccgccgccgccgccctcccttcctcttccccatcttcttctctcggtcccgggagcccccgcccggagagagtcgcggttgctgatcgtggtgcttgagtagagccgtggttggtgacagcatgacgagcgaggtgatagaagacgagaagcaattctattccaaggccaagacctactggaaacaaatcccacccacggtggacggcatgcttggggggtatggccacatctccagcatcgacatcaacagctcccggaagtttctgcagaggtttttgagggaaggcccgaacaagacaggaacgtcctgtgccctggactgtggagctggcattgggaggatcaccaagcggctgctcctgccgctgttcagagaggtggatatggtcgacataacggaggacttcctggttcaagccaagacctacctgggggaggagggcaagagggtgaggaactacttctgttgtgggctccaggacttcaccccggagccggactcttacgacgtgatctggatccagtgggtgataggccacctcaccgatcagcacctggccgagttcctgcggcgctgcaagggcagcctccgccccaacggcatcatcgtcatcaaagacaacatggcccaggagggcgtgattctggacgacgtggacagcagcgtgtgccgggaccttgacgtggtccgcaggatcatctgcagtgcaggcctcagcctcctggccgaggagaggcaggagaacctccccgatgagatctaccatgtctatagctttgccctgagatgagccggggctggcaggagaaactgaggaaccacagtcctggtggggggagctggcagctgggcaagatccaggcgccacgctggcggttcgtgagtgtcgaggcaccactaaatatagctgtctgccgtccactcattatgcgggctcttcttcaaaaggcaaggtgggacccggcggggagggtgctgctgaaccagcggtgaggcaggagcccagaccctgctctcctgcgagatgggattgggtggaaggggctccagggctcctggtgctccccatgtgggaatagggtggccacatcagtaaccgattccctgggcctccagcccggccttccagccatgggcctggctgcctgaagaggaaggaaaccacccccaacttggttgctggggacttgaagacttcagtgtgatctttacctaggggagggacagagctgggctggtggagcccatgggtgctgcctgatggtgctgtggggtgggtgctcatgtgccaagtcctgcttggcagtggagacctggggcccttaaagtgttacaacagcctgcagcaagggaagttccccgtagcctcagtcttctctgggcttgaggctgctccttggcaggcatttaaagtaaaaaataaaatggggctgggcgcggtggctcannnnnnnnnnnnnnnnnnnnnnnnnnnnnnnnnnnnnnnnnnnnnnnnnnnnnnnnnnnnnnaccatcctggctaacaggtgaaaccccgtctctacttaaaatacaaaaaaa

SEQ ID NO: 352290 - DNA, 919 bp, Homo Sapiens
agcggagcgcgcgccgcgagctgtcgcgtctggtcgtggtctggcggagctgcggttggcttgtggcgtctccgccgccgccgccctcccttcctcttccccatcttcttctctcggtcccgggagcccccgcccggagagagtcgcggttgctgatcgtggtgcttgagtagagccgtggttggtgacagcatgacgagcgaggtgatagaagacgagaagcaattctattccaaggccaagacctactggaaacaaatcccacccacggtggacggcatgcttggggggtatggccacatctccagcatcgacatcaacagctcccggaagtttctgcagaggttttgagggtaggcaggtctggcgtgctctccaggagaggctgtggctctggtggcactgccgagtccatgtggggtgccaccttttacacatgtaacactgcaggatcgttggctatctcttggtacctaccccaaagccttgaggagctgggctgggtgggcacagtggggtaacttttagattgtggacttagcctcaaggttaccagacaggagctggctgttaggcagaattgaggtgcctgaattgggcaaacctctcttcaactgttgggtttcgccagggacgaaaaccttgctctcctgccatgtccacgggtgttttggactgagggtgttgggctattctggacggaagaactcctagttatgtgccatggttttccaccctctgctccaaccacaggccttttctgtaccaggcttgggacccccaattcctgggagcccccacttcttgttcatggcttgcccttggagcttctgttggcaccttggtccattccaggctcccctcctccatgttccctctctgaccttgttccctgttgccgttccttctcccattcttg

SEQ ID NO: 352291 - DNA, 962 bp, Homo Sapiens
ttctggatcagtttgatgtgccttctggaaccactgggaggacctgggctttcagggagcgaatccagccacagacctgagaggcgcaggcttccttgccctcctgcatctgctctacctggtgatggactcaaagaccttgccgatggcgcaagagattttccgcctgtctcgtcaccacatccagcaattccctttctgtttgatgtccgtgaacatcacccacattgccatccaggccttgagagaggagtgtctctccagagagtgtaatcggcagcagaaggtcatccccgtggtgaacagcttctatgccgccacattcctccacctcgcacatgtctggaggacacaggcggaagaccatctcagactcggggctttgtcctcaaagagtttggaagtattggccaagaagagcccacggcggctgctcaagaccctgggagctgtacttggccagggtgtcaaagggacaggcctccttgttgggagcacagaagtgctatgggccagaagcccctcccttcaaggatctcacctttcccagtggagagtgaacctgcaagtctcactccatcccaaaggccgtatggcctgattctgaccctccaagatgaattgggaggctttaaaggcttgacccgccaggggcttttccaggggggccagtgggaacccttgttcacggaaccctgggcccaggccgccatccccctttgctggtctccaccattatggtataaatcaggaaagccccctgggccttaagcttgtggggaaacccttatctttcccctccccgggccccgggagacaccggaaggaggcctgtttaatacatttcacccacccttgcccgtccgataactggcccctccccaaaccctaagggaaaaactcccgcaccttatattcttccgttgtgtgccccctattcccccgcggggtttgcaaggtcc

SEQ ID NO: 352292 - DNA, 552 bp, Homo Sapiens
  misc_feature (283)..(283): n is a, c, g, or t
  misc_feature (286)..(286): n is a, c, g, or t
ccagggtccaatagttggactattcaaagttgcaattgtgcagacaaggtagagtgtgtggtccctgtggctgtagctggctccctagcctacctctctggtgatctctccatctgaggctccttcactttctctccatgggataggggttgggggtactccctagagctgctaggcttgaggccttgactgttgtgtcacccagagccccctcaagccttctgctccccaattctctctgttgcagagttggaagtattgggccaagaagagcccacggcgnctngcttcaagaccctgggagctgtacttgggccagggtgtcaaagggacaggcctccttgttggggagcacagaagtgctatgggccagaagccccttccctttcaaggatctcacctttcacaggtgagagtgacctgcagtctcactcattccgaaggcgtatggctgatctgacctccgagatgaattgaggcttaaaggctgagctgcaggggcttttagggggtaagtgagccatgtaaggagcctggcagggcgaccccttt

SEQ ID NO: 352293 - DNA, 339 bp, Homo Sapiens
  misc_feature (306)..(306): n is a, c, g, or t
tggacatctcgttccctcccagctacccgtacagtgaggacgccccccagggtgagcagtacatgaacacccggtgcccagcctggtgtgaccgcatcctcatgtccccgtctgccaaggagctggtgctgcggtcggagagcgaggagaaggttgtcacctatgaccacattgggcccaacgtctgcatgggagaccacaagcccgtgttcctggccttccgaatcatgcccggggcagggaagagatgccagcgccacgagaggacacttcgtgagcctccctgtagccgtggaccgaatacgnactcttgaaagctgcatcgagaacccgcccaag

SEQ ID NO: 352294 - DNA, 1346 bp, Homo Sapiens
  misc_feature (1269)..(1269): n is a, c, g, or t
  misc_feature (1306)..(1306): n is a, c, g, or t
gcggccgccccgggcaccgcggtgctgctggtcacggccaacgtgggctcgctcttcgacgacccagaaaacctgcagaagaactggcttcgggaattttaccaggtcgtgcacacacacaagccgcacttcatggccttgcactgtcaggagtttggagggaagaactacgaggcctccatgtcccacgtggacaagttcgtcaaagaactattgtcgagtgatgcgatgaaagaatataacagggctcgagtctacctggatgaaaactacaaatcccaggagcacttcacggcactaggaagcttttattttcttcatgagtccttaaaaaacatctaccagtttgactttaaagctaagaagtatagaaaggtcgctggcaaagagatctactcggataccttagagagcacgcccatgctggagaaggagaagtttccgcaggactacttccccgagtgcaaatggtcaagaaaaggcttcatccggacgaggtggtgcattgcagactgtgcctttgacttggtgaatatccatcttttccatgatgcttccaatctggtcgcctgggaaacaagcccttccgtgtactcgggaatccggcacaaggcactgggctacgtgctggacagaatcattgatcagcgattcgagaaggtttcctactttgtatttggtgatttcaacttccggctggattccaagtccgtcgtggagacgctctgcacaaaagccaccatgcagacggtccgggccgccgacaccaatgaagtggtgaagctcatatttcgtgagtcggacaacgaccggaaggttatgctccagttagaaaagaaactcttcgactacttcaaccaggaggttttccgagacaacaacggcaccgcgctcttggagtttgacaaggagttgtctgtctttaaggacagactgtatgaactggacatctcgttccctcccagctacccgtacagtgaggacgcccgccagggtgagcagtacatgaacacccggtgcccagcctggtgtgaccgcatcctcatgtccccgtctgccaaggagctggtgctgcggtcggagagcgaggaaaaagttgtcacctatgaccacattgggcccaacgtctgcatgggagaccacaagcccgtgttcctggccttccgaatcatgcccggggcaggtaaaactcatgcccatgtgcacaagtgtttgtgtcctgcaatgacctggtggggaaaagatgccagcgccacgagaggacacttngtgagcctccctgtagccgtggaccgaatacgcactnttgaaagcttgcatcgaggaacccggccaagcggccacct

SEQ ID NO: 352295 - DNA, 866 bp, Homo Sapiens
tccccaggctttgctgttctacaccaacgccctggcagagaacgacgcaaggctccagcaggccagtgcctagcgctcaaacacctcaagggcattgaaagcatcgaccagactgccagcctgtgccagtctgacctggaggccgtgcgggcggcagcccgggaaaccacactgtcgttcggtgaaaaaggacggttagcttttgagaagatggacaagctctgctcagaacaaagagaagtcttttgccaggaggcagatgttgaaatcacaatattttaaaaaatcctggctgatgagcacaaatctcacatcgttttttttgctgctgcccagcctggacatagcctgcactctgggtaatggtgctgtgcactcctccaggagtgtgagctgcccagagctctacctgagactccggccattgacccagccccagggcatgggctggtcttttgtacagaggcagaaaaaagcaaggcaaaggtacagcattccaggggctgcacggcctcaacagagcgctcaacttctggctgagggtctgtgtgaccttccccgagatgcagagctgagccaaactaggtggccacctacaaaagggccaaggccaggcaagttgaggccctaaataaaaggctccaaggcaagtgtgtagaactccaggcctcgctgccggtcagctgctcggcacttctgcgtcaagaggcactggggatgcagcaggctggcaggtggctggccctgctaatgcaagactgctcaggccatttcagcagcagcccaggtgtcaccttgggtgagctgggggaaaggtgggaaaagggcacaaagcccgggggtttttctacaaaccaacacttctt

SEQ ID NO: 352296 - DNA, 1331 bp, Homo Sapiens
  misc_feature (1065)..(1105): n is a, c, g, or t
tgctggtacaggtccggaattcccgggatatcgtcgacccacgcgtcggtggtcgccgtgttcggcagcatgcagatggccgtctctcgagtcatcaggctacagcatcatcggatcgcccagtgtcgcacggtgaagatctccatccttggggatgagggcgtgcctgtgcaggtggacggagaggcctgggtccagccgccagggtacatttcggattgtccacaagaaccgggcacagacactgaccagagacagggcatttgagagcaccctgaagtcctgggaagacaagcagaagtgcgagctgccccgccctccatcctgttccctgcacccggagatgctgtccgaggaggaggccacccagatggaccagtttgggcaggcagcaggggtcctcattcacagtatccgagaaatagctcagtctcaccgggacatggagcaggaactggcccacgccgtcaatgccagctccaagtccatggaccgtgtgtatggcaagcccagaaccacagaggggctcaactgcagcttcgtcctggaaatggtgaataacttcagagctctgcgcagtgagacggagctgctgctgtctgggaagatggccctgcagctggatccgcctcagaaggagcagctggggagtgctcttgccgagatggaccgacagctcaggaggctggcagacaccccgtggctctgccagtccgcagagcccggcgacggaagagagtgtgatgctggatcttgcccaagcgcagtcgcagtggtaacattccgcctcgtggaccagtttaaaaaggagaaaaacaaccagaaccaagaaacttcacaggtaacctggggagccccggtttcccctctggggggaccgaaggaggctgtctgccctggcttggagccccctcaagtccccccggagtaataagcgaatttctccacaatgccccgaaccttttcccggtttttcacctccatgcccccctttacaccgcagagaaccttcagggccctttgctgcgtactctaccgtggttctcgcctcatacaagatttctnnnnnnnnnnnnnnnnnnnnnnnnnnnnnnnnnnnnnnnnngtctccccaatctaccgccctatcccttccatgtttaacctccttccaccgtaacctcctcttcctccgtgttaatcccgcatatgtcccccctccctaacaataccccctgctcctctccgccatattcccacacgtctcactctctgactccgtcacgactagttgtcgcttgcatctatctagtctcccaaccaccaccactgccccacctcaatatagctct

SEQ ID NO: 352297 - DNA, 1896 bp, Homo Sapiens
ggggattgtcatcttcctttctcctaaggagagaacactgggattttttgttttgagttctttgaattcagctggtagaatcagtgttctgtggctagaagtaatgattttcactgggccagtttggactctgaagagtaatgtatttaaggatctttcatgcaaagtgaatgattctagccacattcccacctagaaaactccaccacagtatcctcaggcccagggcactggcctctcaggggcactggatggtttgtgccaggatttaaaaagtgaaattttctttctctttaagcaacttattttcaactctctcaccaactgcctggggccccggaagctcttacacagtgggaaactatacaagaccaagagcaacaaggaactgcacggattcctcttcaatgacttcctgcttcttacctacatggtcaagcagtttgctgtttcctctggctctgagaaacttttcagctcgaagtccaatgctcaattcaaaatgtataaaacgcccattttcctgaatgaagtcttggtgaactgcccacagacccttccagcgatgagcctgtcttccacatttcccacattgatcgggtctacaccctccgaacagacaacattaatgagaggaccacctgggtgcagaagatcaaggcggcgtctgagcagtacatcgacaccgagaagaagaagcgtgagaaagcttaccaagcccgctcccaaaagacttcaggcattgggcgcctgatggtgcatgtcattgaagctacagaattaaaagcctgcaaaccaaatggaaagagcaacccatactgtgaaatcagcatgggctcccagagctacaccaccaggaccatccaggacacactcaatcccaagtggaattttaactgccagttctttattaaggatctctaccaagacgtgctgtgtctcaccctgtttgacagagaccagttttcaccagatgatttcctgggtcgtactgaaattccagtggcaaaaattcgaacagaacaggaaagcaaaggccctatgacccgccgactgctgctgcatgaggtccccaccggggaggtctgggtccgttttgacctgcagctttttgagcaaaaaactctcctgtaggggttctaaaggacagcaccagcgggacagcccacaaggctggggctggagaatgagagactgcgctctcttggggctgaaggagcaccatgcagcttcacccctcacaaagccatgcacgctgggggctctgttttcctgcacactaaatagctagcaatctatgcaaacaccttttcccataaagaaaccaaaaccccatagtacagtgccttgtcctagtgttcacatgttcagctctgtttgcttagatgccaaggtttccattttcagggctataaaaagtattacttggaaatgaggcatcagaccaccagatgttaccgctcggttgaatgtgtccaccgtggagtggtttggtgacgctgtaaccattccacgccagtgacctccgctgggtcacagccactcaggaggggaagggtcaggatgagaggctgcagcctcgacacttggcgcggcctgatactgaaatagcgtctactcgtgcactgaataaaaacagaaacttgatcattttattcctgattagattttatcactctctgctaagacaatatagtctggagtataagtgggaaagcttgatttaaatactgtgaactctaataatgtggaaaatatttttcaactttaattttctgaagtataaattatttatgtaaattcattgtttttgcatatttcttaggacatgcatctttaagctttatcattgcccatatgtacagaaagagaataaagacatatgtttatggatgg

SEQ ID NO: 352298 - DNA, 1431 bp, Homo Sapiens
  misc_feature (80)..(88): n is a, c, g, or t
gagtaatgctttaactttataaaaaatgtgataatacagcaagatattgttggggttttctttttttctgtcaagtaagnnnnnnnnncacctggaataaaaattagaaacataatctaagaaaaattggaaacaagcatttcaaggaaacaatttggaaagataaggaagagaaaacaacaagcagcatgagcagcaaaagcagcagcaacatggggggaaagctggctctgctgtgaggacagaacaatcaaagaccaacgtgcaccttgctttccataccaggctgagctgaggggtggggtaagggtgggcagtaaccatcagagaggcatgaaggtttcccaggtgggatcagctgatggctgctggctcactgtggggagagggtaggcaatggcctcctgcaaacgggcccagatccgccctcttataaggcctgccagccaagtggcagtgacggatttggcttagctggctccctcctctgtccacttgctccaatctgcagctctgcaggtcaccatcccacagtgatgagctcagcaagcagagactcatcagaacgtcagcctaagctagggtagcgaacttgccagggagaaccaagaaaactagatgtacagggctgtatacaaaacactttttggaatgtctgcaccatagccaaggcagagttaggaccactttggagaggcagctgggaatgctcccagcaacattccccagcctttccccctagggaagggacatccaaagaacactgggtgaattcttgactacattctgaggtagtctaactgtgacttggcacaggtagctaagaatgatcacaaaaaacagaagaagggaaggcagaaaagtcgccacagagagaaaaggctaacatctctaacagaagaagctacactacaagtgggctcagagatgaccagaatgcgtcctgggctcggggtggccagtggcagggcccacccctgggcacatacagctctcatagcacacttgatgctgcagcagtgtggcaggagatgagggaatccatagagagatttcctggcccagagcagcagcaactgaggtgaggagagtctgtcctaacacctagtcctctgctaccaactcacgtcatgatggggatgagccagacaccccagggaccatgcagtgaggagtcccaacattcccttcgactacaacttctctacctgaatttgtttgtgggggaaactaatactgccagactctacttggaaacactttagaggtgagggagcaatcagatcctaagacactgaaagagaagtaatgagaataaaaagcaatggtgttgttagactcccctatttttaaaatgctaattcacattctttttgtcttctgccccagcgctcagaattctaagtcagaaatcccgggaattccggaccc

SEQ ID NO: 352299 - DNA, 464 bp, Homo Sapiens
  misc_feature (30)..(30): n is a, c, g, or t
  misc_feature (34)..(34): n is a, c, g, or t
  misc_feature (128)..(146): n is a, c, g, or t
  misc_feature (422)..(422): n is a, c, g, or t
  misc_feature (433)..(433): n is a, c, g, or t
cgactggatggtggcacagacatcactttncctnatggggaccaggagctggatctgggatcagcaggtggacgttttcagctcatggcaaaactggcagaaggcgctggaatccaactgccaagcannnnnnnnnnnnnnnnnnncgccgccgccgcccaggctgctgccttgcaactaaatggagcagttcccttgggggccctgaatccagcagctctgactgctctgagtccagccctgaaccttgcctcccagtgtttgcagctctccagcctctttaccccccagaccatgtaaatcagtggcacagtatactgcctccttgtgcctctggatcctgccacttcacatctactcttccatgggcccatttctccattttgtggaccaaggcatcctgagggcatggacattgtctntgaggaaattngggggcaacctttaagataccaagaaaagtt

SEQ ID NO: 352300 - DNA, 755 bp, Homo Sapiens
ccgtcacaactgaaggaactgacctctctccttttcctgtacctttaacctttagtctgtcaaggaaaacccttaggacctctgaatcaagaggactgagtttgtgggtgaaccttgaaggtgctctttctgctacaagggccctgggagatagcatggacgtgcattgagaagccagcctcagaccttagcttgaagcagcttgaggccagacctactgtagcctcagcatcttgctaggaggcatggaagtgatctatcctgccaggaggcctcagagtgatctgtcctgccaggaggtgtgagagtgatctgtcctgtgaggcatttaggggctttcaggaatttagtaaaaggtggagtatgcctttccagtatcttccatcttcctttgtatacttgtccttcctcccatttcctccctttggcccgaggtaggaggatggagggaggctgctactctaccacttcctgtgtgcctctactgtggcctcaaccctggcaattatagctactcccatcccttacctgggcatgtgtgagcccttctcactggattttatacccttgtgtctgtgtacataaatatatatacatatatatatacataaaaactttgtacaaaaggcaagcctcctccttgtggcagctgttgcccatttgtgtgtggtctttgttgtgtgtctgacaacttctcattagcccaacttatgatgtttctagggatataaaacattagtaacatcaagagaaaa

SEQ ID NO: 352301 - DNA, 1087 bp, Homo Sapiens
tttgtggaggttcctttctattccaggggcccaatttatttaccaaatttttaccccaaaggggggctccaaaaaatgcccccgggaggcaatttttttcaagtgattattgaaagtgcccggggaacccccaataggagggcgcattggttccaccattgccccttttgcagggttgttgcccatggttcccagtccggtttttctttccctgtgaaccctgtacaatgatagccactcccagcaaccgctgcccagtcagcccaatggccagtggcacagactggatttcacagaattccacgtaggcaatgcccttagaacgacgtgagttccgatctgaaatgatacgtacatcgcgaaccttgcctacagcagagaaaaagtcctccagatctcgaggccgaattcgggcagctaactgcatacagaaaactgtgcgggcatcacgctcctcaggactcagattatcaactggctccctgactgggctcttctctctgaaatgaggactcttactgtgtccatatctataaccagtggcaagtggaggactcctgtaatgcacacgatcctcacgacgatggtcccgacttcgcgactcactaccatgtcgacgatcccagctacggctacggtgacgacactgccgacctggacttcggctccgactatttctccgtctataccgatcccgatctcgactacgattgcttgtctccccgatggtgctgcttccactggtctcattgccactgttgctggtgctgctggtggtattgctaggataatcctttttaacttctttcctttgttgctcatcctcttcttttttatagggagcttccagcatggcctcaatcactatgtcaaagtcatcagatgccatcctgtcagatcagttccgggtccccgcaggggggtcccggttctctccgttcctttgagtatgttgtggggagtggagctcggatagttcctagagtctaggcaagaaaagcagcactgcaggtacagcgcctcctcttcccgcaaaatggcggcagctctgccgatccgtacccccgaccgtaccagccggcctttt

SEQ ID NO: 352302 - DNA, 770 bp, Homo Sapiens
cggagcatgtcttcagtgatattgaaagtgcagggtactctacatagaggcgcattggtccaccatgtgccctgttgcaggttgttgcccatggctgccagtcggtttgtctctgcctgtgaagcctgtacaatgataggcactcccagcaaccgctgcccagtcagcccaatggccagtggcacagactggatttcacagaatgtccacgtaggcaatgcccttagaacgacgtgagttccgatctgaaatgatacgtacatcgcgaaccttgcctacagcagagaaaaagtcctccagatctcgaggccgaattcgggcagctaactgcatacagaaaactgtgcgggcatcacgctcctcaggactcagattactcaactggctccccagtgggcaagtggaggactcctgtaatgcacacgatcctcacgacgatggtcccgacttcgcgactcactaccatgtcgacgatcccagctacggctacggtgacgacactgccgacctggacttcggctccgactatttctccgtctataccgatcccgatctcgactacgactcttctttttatatagggagcttccagcatggcctgcaatcactatgtcaaagtgcatcagatgccatcctgtcagatcagttccgggtccccgcaggggggtcccggttctctccgttcctttgagtatgttgtggggacctggagctcggatagttacctagagtctaggcaagaaaagcagcactgcaggtacagcgccgtc

SEQ ID NO: 352303 - DNA, 761 bp, Homo Sapiens
ccccttagtacgacgtgaggttccgatctgaaatgatacgtacatcgcgaaccttgcctacagcagagaataagtcctccagatctcgaggccgaattcgggcagctaactgcatacagaaaactgtgcgggcatcacgctcctcaggactcagattatcaactggctccctgactgggctcttctctctgaaatgaggactcttactgtgtccatatctataaccagtggcaagtggaggactcctgtaatgcacacgatcctcacgacgatggtcccgacttcgcgactcactaccatgtcgacgatcccagctacggctacggtgacgacactgccgacctggacttcggctccgactatttctccgtctataccgatcccgatctcgactacgactgcgctgttctatccctgcttttattatggctccgactcctcttcttcttgcttgtctccccgatggtgctgcttccactggtctcattgccactgttgctggtgctgctggtggtattgctaggataatcctttttaacttcttacctttgttgctcatcctcttcttttttatagggagcttccagcatggcctcaatcactatgtcaaagtcatcagatgccaacctgtcagatcagttccgggtccccgcaggggggtcccggttctctccgttcctttgagtatgttgtggggagtggagctcggatagttcctagagtctaggcaagaaaagcagcactgcaggtacagcgcctcc

SEQ ID NO: 352304 - DNA, 1592 bp, Homo Sapiens
gggagattggggaaggttctggaagacggcagagctgccgccattttgcgggaagaggaggctctgtacctgcagtgctgcttttcttgcctagactctaggaactatccgagctccactccccacaacatactcaaaggaacggagagaaccgggacccccctgcggggacccggaactgatctgacaggatggcatctgatgactttgacatagtgattgaggccatgctggaagctccctataaaaaagaagagtcgtagtcgagatcgggatcggtatagacggagaaatagtcggagccgaagtccaggtcggcagtgtcgtcaccgtagccgtagctgggatcgtcgacatggtagtgagtcgcgaagtcgggaccatcgtcgtgaggatcgtgtgcattacaggagtcctccacttgccactggttataggtatggacacagtaagagtcctcatttcagagagaagagcccagtcagggagccagttgataatctgagtcctgaggagcgtgatgcccgcacagttttctgtatgcagttagctgcccgaattcggcctcgagatctggaggactttttctctgctgtaggcaaggttcgcgatgtacgtatcatctcagatcggaactcacgtcgttctaagggcattgcctacgtggaattctgtgaaatccagtctgtgccactggccattgggctgactgggcagcggttgctgggagtgcctatcattgtacaggcttcacaggcagagaaaaaccgactggcagccatggccaacaacctgcaaaagggcaatggtggaccaatgcgcctctatgtgggttccctgcacttcaatatcactgaagacatgctccggggcatctttgagccctttggtaaaattgataatattgtcctgatgaaggactcagatacaggccgctctaaaggttatggtttcatcacgttctctgattctgagtgtgcccggcgggccctggaacagttgaatgggtttgagcttgctggtcgacctatgagggttggccatgtgactgagcgactggatggtggcacagacatcacttttcctgatggggaccaggagctggatctgggatcagcaggtggacgttttcagctcatggcaaaactggcagaaggcgctggaatccaactgccaagcactgctgctgctgctgccgcccgccgccgcccaggctgctgccttgcaactgaatggagcagttccccttggggggccctgaaatccagcagctctgactgctctgagtccagccctgaacccttgcctcccagtggtttccagctctccagccctctttacccccccagacgatggtaaatccaggggcacaggaatacctgcctcccttgtggcctctgggatcctgccaccttcacatctacctctttcaagggccccattttctcccattttgggggaaccaagccatccctgaagggcatggaacattgtcctcctgaggaaaattgggggcccccccttaaaaatccccagaaaacgcttcctgccccatggtccccaccgggaaaaaggaattccggctgagccaa

SEQ ID NO: 352305 - DNA, 749 bp, Homo Sapiens
ggcacagactggattgcacagaatttccacgtaggcaatgcccttagaacgacgtgagttccgatatgaaatgatacgtacatcgcgaaccttgcctacagcagagaaaaagtcctccagatctcgaggccgaattcgggcagctaactgcatacagaaaactgtgcgggcatcacgctcctcaggactcagattatcaactggctccccagtggcaagtggaggactcctgtaatgcacacgatcctcacgacgatggtcccgacttcgcgactcactaccatgtcgacgatcccagctacggctacggtgacgacactgccgacctggacttcggctccgactatttctccgtctataccgatcccgatctcgactacgattgcttgtctccccgatggtgctgcttccactggtctcattgccactgttgctggtgctgctggtggtattgctaggataatcctttttaacttctttcctttgttgctcatcctcttcttttttatagggagcttccagcatggcctcaatcactatgtcaaagtcatcagatgccatcctgtcagatcagttccgggtccccgcaggggggtcccggttctctccgttcctttgagtatgttgtggggagtggagctcggatagttcctagagtctaagcaagaaaagcagcactgcaggtacagcgcctcctcttcccgcaaaatggcggcagctctgccgtcttccagaacctaccccccgct

SEQ ID NO: 352306 - DNA, 485 bp, Homo Sapiens
tcacccgtggcattcttccaattcccttcaaggtttctctcacttctactcacttgaccaaagggctcaaagatgccccggagcatgtcttcagtgatatcgaagtgcagaggaacccacatagaggcgcagtggtccaccattgcccttttgcaggttgttggccatggctgacagtcggtttttctctgcctggggaaggaggaaatgatgggtcatgtcccacattccctctccccttaaaatcttatgtctgtttctcagcctgctcacctgtgaagcctgtacaatgataggcactcccagcaaccgctgcccagtcagcccaatggccagtggcacagactggatttcacagaattccacgtaggcaatgcccttagaacgacgtgagttccgatctgagatgatacgtacatcgcgaacctatccaggacgcaaaagaaatcctgagttaggcataaagggagatacaagctaagcta

SEQ ID NO: 352307 - DNA, 738 bp, Homo Sapiens
  misc_feature (77)..(77): n is a, c, g, or t
  misc_feature (97)..(159): n is a, c, g, or t
ctgggacggcgatcaaggaccaagagcgacctgagcctgaagatgtaccaggaggagatccaggagtggtatgaggngcatgccagggagcaagagnnnnnnnnnnnnnnnnnnnnnnnnnnnnnnnnnnnnnnnnnnnnnnnnnnnnnnnnnnnnnnncgctcccagaccgttacctagcccagcgcccgaaagccgtctcttctatgcaataacacaatagtattactctactgcgatgtacggaactgcggtgtgtgtacacatactcacgtatatgcacatatttatatacaggaagaaaaaagacagacaagatggggcttggtttataaccaccttgccctgtcttccttaactccagaagccagtttggtgaggggtgggggtgcggccaccaggtctgagctcttcctactgtggaaggctccagaaggcccttcacaaggagacccctcacctggatccagtcgactgcggggcttgcccctcatgtgggctggcctccatcggccacgtccaaagctgtcactgctactgcttcaggctcacatccccccgacctgatggcgtgcccgccccctctccctgcggcccatgccacaggtttctgtgttttgctttagggacagaaccacttaggaaggaaagaactcccggtctccagggtggtatttcagtgtctgtgataatgtcacgcaacacctcttcagggaccagtgcccaggatctaatgga

SEQ ID NO: 352308 - DNA, 444 bp, Homo Sapiens
ccggtaatgagctctaccgggaggcacggggggctcctcggatgtcccaggctgctggagaccctctcccagatggagagataccagcaacattccatggtgtttctgggacggcgatcaaggaccaagagcgacctgagcctgaagatgtaccagcgaggagatccacggagtggtattgaggagcatgccagggcagcaagagcagcagagacaactcagcagcagtgcagcccccgccgcccagcagcccccaggcagccgccagcgctcccagaccgttacctagcccagcgcccgaaagccgtctcttctatgcaataacacaatagtattactctactgcgatgtacggaactgcggtgtgtgtacacatactcacgtatatgcacatatttatatacaggaagaaaaaagacagacaagatggggcttgggggtacc

SEQ ID NO: 352309 - DNA, 778 bp, Homo Sapiens
  misc_feature (29)..(29): n is a, c, g, or t
  misc_feature (31)..(31): n is a, c, g, or t
  misc_feature (34)..(34): n is a, c, g, or t
  misc_feature (85)..(85): n is a, c, g, or t
  misc_feature (89)..(89): n is a, c, g, or t
  misc_feature (763)..(763): n is a, c, g, or t
ggcagagatggccctgagcggcatggccntnggngccggggtagtctgacaccccacccggcagcctgtgacaaggatgggcagncagntagtgcggcagaggagagcagcagccaggagacaagcaaagacttaccagccaatggcttcagcggtggaaaccaaccagtgaagaagagtttcttggtataccgtaatgactgcagccttccccggagcagctcagactctgagtccagcagcagtagcagtagcagcgctgcttcagaccggaccagcacaacgccctcaaaacaaggccggggcaaaccctccttctctcggggcactttcccagaggacagcagtgaggatacctcaggcactgagaatgaggcctactccgtgggcactggccgcggcgtgggccacagcatggtaaggaagagtctgggccggggagctggctggctgtcagaggatgaggactccccgctggatgctctggacctcgtgtgggccaaatgccgaggctatccatcatacccagctctgatcattgatccaaagatgccccgagaaggtatgttccaccatggggttcccatccctgtgcccccactggaggtgctgaaacttgggggagcagatgacccaggaagcccgagagcatctctacctcgtcctcttctttgacaacaaacgaacctggcagtggctgcccaggaccaagctggttccctctggtgtgaaccaggacctagacaaggagaagatgctgganggccgcaagtccaac

SEQ ID NO: 352310 - DNA, 1354 bp, Homo Sapiens
tcagaggaactgtgaccaagttgggagagattctgaggataagaactgggcccttaaagaacagctcaagtcctggcagcggctccggcatgacttggagcgagctcggctgctcgtggaattgatccgcaagcgggaaaaactcaaaagggagacgatcaaggttcagcagattgccatggagatgcagctgactcctttcctcatcctccttcgcaaaaccttggagcagctccaagagaaggacacaggcaacatcttcagcgagccggtccctctgtctgaggtaaccgaattggacgaagtacctgactacctagaccacatcaaaaagcccatggactttttcaccatgaagcagaacttggaggcttaccgctacctgaattttgatgattttgaggaggacttcaacctcatcgtcagcaactgcctcaagtataacgccaaggacaccatcttctaccgggcagcagtgcggcttcgtgagcagggtggtgctgtgctccgccaggcccggcgccaggcagaaaaaatgggcattgactttgagacgggcatgcatatcccccacagcctggctggagatgaggccacacaccacactgaagatgccgaggaagagcggctggtcttgctggagaaccagaagcacctgccagtggaagaacagctaaagctgcttctggagcggctggacgaagtgaatgccagcaagcagagtgtgggccgctcacggcgtgcaaagatgatcaagaaagagatgacggcactgcggcggaagcttgcccatcagcgagagacgggacgtgatggccctgagcggcatggcccctccaagccgggggtagtctgacaccccacccggcagcctgtgacaaggatgggcagacagatagtgcggcagacgagagcagcagccaggagacaagcaaaggcctgggtcccaacatgtcctcaacccccgcacatgaggtgggcaggagaacctcagttctgttctccaaaaagaacccgaagacagctggaccgcccaagaggcccgggccggccccccaaaaaccgggagagccagatgacccccagccacggaggcagtcctgtggggcccccccagctccccatcatgagtttcctggcctaagtgcagctggactgtacagaacactccaagggccaatggcagttcagcgcaaggagagggagggcccacaagtcagaaaaagctccagagacctcacagcattgtagggcggggtggtgggccacagttaggacactgcgtaaaacagggcatcccaacaactctatctgctcatgccaggagaatccatagctgcctagaggcctgggg

SEQ ID NO: 352311 - DNA, 446 bp, Homo Sapiens
tctgcactgactcatttctggtcttggggccagtctcaggggaagctgggtgggggaggtccctcctgccctaagtgcagctggactgtacagaacactccaagggccaatggcagttcagcgcaaggagagggagggcccacaggtcagaaaaagctccagagacctcacagcattgtagggcggggtggtgggccaaagttaggacactgcgtaaaacaggccatcccaccacctctacctgctcatgccaggagaatccataactgcctagaggcctggggcccctaccggtcgtgaggtgagtgggcattctgtcccagcctggaagaggggcactaggtgactccctcccctgctgttgtaaatactgtaattatcggagaatttaaattattctcatttgtaactgcgtttccgggtcgcgccagagtcatttggtacta

SEQ ID NO: 352312 - DNA, 729 bp, Homo Sapiens
  misc_feature (522)..(550): n is a, c, g, or t
gattcacttattagtctgctgtttctctgaaaaattttagagctaggtatagtgaccgtgaactttctaacgcataatattctgtgatacagccattccgtacatgtgtgaagtcctgcataactttcgaactttgttaaatgttggcactaggagtcatcagatctaggcttcatcattttccagtgagaagcagagacccaaagggcctgttacttgtgcttggtcaggggactgtctgtcatgcctggaggctcttcggcacacttccccatctttcccttctgccactgtggcttcaagcacctctgttcatagagcgtctctgaaattgagtctcggtcatgacttatcccgaagtagagcaatgtgtttcctctcattgtagtttcaggactttgtcagtacaagctctgccctaggcttgttactttatactcatatcctgaaaagatgtgatttcatctatgaaggggtaaaatattggtttgtatttaattgtttgaaataaaagtgatcccnnnnnnnnnnnnnnnnnnnnnnnnnnnnnacatgtcggccgcctcggcctctagaatggtcgtgaggtgagtgggcatctgtccagcctggaagaggggcactaggtgactccctcccctgctgttgtaaatactgtaattatcggagaatttaaattattctcatttgtaactgcgtttccgggtcgcgcccaagtcatttggtact

SEQ ID NO: 352313 - DNA, 1264 bp, Homo Sapiens
gggatcgcgcctgcgcaccatgccacgcccggagcgggtactgagtgggggcgccgcgcctgcgcaaagcggacccgcggacggtggcgttaagggaacgctgaggtcccgcgctccccgaccgaggtatatctccatgaataacctaaatgatcccccaaattggaatatccggcctaattccagggcggatggtggtgatggaagcaggtggaattatgccctgttggttccaatgctgggattggctgcttttcgttggatttggtctagggagtcccagaaagaagtagaaaaagagagagaagcctaccgtcggagaactgctgcttttcaacaggatctggaagccaagtaccacgccatgatctcagaaaatcggcgtgctgtcgctcagttgtccttggaactcgaaaaggaacaaaacagaactgctagttaccgagaagcccttatctctcagggacgcaagttggtagaagaaaagaagcttctggaacaggaacgggcccaggtgatgcaagaaaaaagacaggtgcagcctttgagaagtgcgtatttgagctgcctgcaaagggaagaaaactggcaaaggagagccaggcttttgctgaaagaatttgaagctgttctcacagaaagacagaatatctactgcagtctgtttcttcctcgcagcaagcggctggagatagagaagagcttactggtgcgagcgtccgtcgaccccgtcgccgctgacctagagatggcagccggtctcaccgacatatttcagcatgatacatactgtggtgatgtctggaacaccaacaaacgccagaatggcagactcatgtggctctatctcaaatactgggaactcgttgtcgaactgaagaagtttaagagagtagaggaagccatactagaaaagtaagacaagagtgaaatcaaactgcttttagtgactcgaggccaggcagtcatgcgccttctgggtctccggcgtcttccgttcccgtgctgcccgtgtcatggccacaccgtcacccttcagcagcgacctccactcccgccaccgtctgagcagaagtgcaccgaagcctcagagacagagggtctcctcccgatgctctgccgctgttggggatatggtttcttgaagcatttttaggctgccagtattgtattaagcagaacagtataacctcgtattttagctccagggtaaaaatggttttttaaaaagtcaaatacaatactggtccttaccacaaaaaaa

SEQ ID NO: 352314 - DNA, 1459 bp, Homo Sapiens
  misc_feature (2)..(2): n is a, c, g, or t
  misc_feature (4)..(4): n is a, c, g, or t
  misc_feature (23)..(23): n is a, c, g, or t
  misc_feature (48)..(48): n is a, c, g, or t
gnanacaataaggcaacagaagnagaatcttcctgtgacaaggaacgnccacaaataatgcacaaatatttggtgctgacacaataagacaccatcaggacaagttctgaagatgctgcataaaaatttaacaagcatgatacaatgacaagaaaattatactcgctttgttacgaatcctttggcaagtagaaatgactctcgggtaattgttacatacaaactttctgaaataaatggaaatcatacaaatttttccattgcagtttcttctttctctacacctagaaatgtcccatggcactgctccctattctcacagtcaacgcataaatagtcattaaagcacttgaatccacagtagtcttgtccttagaaaggttgggagcttttgcatgattttctagcagtaatccagaaagggctggcaggcaacaggttggaatgtaaaagaccgctttgtgcttggactcctgaactccgcgctgttcccctcaggagtcgctcgcactgtggacaggcccagtgaggacagtcataccgtggagtctctgccagactttagctgtgcaatcttggtccggctaataaacggataagcgatgcagagacctccagctgccacaataaagcctaaactgcaccaggcgcaaaagatggaccagctgtaaccatgttccacatcagcaggcaggctataaattagctttgggagccggttcaaatcatacgagatactggcggcataagtacagagggaaatggtgcaaaatatccctgtcatgaggaacaggagtccagccacgtgctgggtcaagctctcctcccagaagaaactgactgtggccacaatgcagccgcagagaaggacggctacggccatgccgaggaagccagcagtgattcttcttaaatgaagcaggtgccactcatcttgctgtatggtcttggttaaattaaaaggaatgtttcgcaagcggatgggctgagaaaagtggtacttgatggccgtgcatcgctgcgcaatacctttcaggatgagggtgtcgatgtcccggtcgatgcccaggaagtagcacttcctccagaggcccgagtaggtggcgaagacgggccggccgcactcggcgtccagcccgccgagccccaggagcgagcgccaggactcggggtcggcgcgccccgggccgcccgggagcagccggcgccccagcgggggcgagtcccgcagcggcaggtgcgacagcggcatcaggcggttcttctggtccggggggtcggcgcccgcgcggctgcgctcgcagctctccttgtggcgccgggggtcggtctcgtaccagtggtcggtgaagatggccgtgacgagcagccccagggagcacaggctgaggccgaggctgagcgccgtgacgagcgcccgcggctccatggcttcccgccccgccgcagccaccccgct

SEQ ID NO: 352315 - DNA, 2280 bp, Homo Sapiens
  misc_feature (16)..(16): n is a, c, g, or t
  misc_feature (81)..(81): n is a, c, g, or t
  misc_feature (2146)..(2146): n is a, c, g, or t
  misc_feature (2219)..(2219): n is a, c, g, or t
cagagccacggcgcantggggcccttcgaggcgctcggggcgcacatctgggacctcgagcgggggccgtgccgcgcgcantggaccaggggaggggggcggcggctgcacagctggaccgaagggcgcggggtcggccctgggcgacccgctgaggggagggccgcgggccgccggggactggagcatgggacggcgcgcctgaaggagcaggaaggggaaggaggcctgggaccccgaaaagagaaggggagagcgaggggacgagagcggaggaggaagatgcaactgactcgctgctgcttcgtgttcctggtgcagggtagcctctatctggtcatctgtggccaggatgatggtcctcccggctcagaggaccctgagcgtgatgaccacgagggccagccccggccccgggtgcctcggaagcggggccacatctcacctaagtcccgccccatggccaattccactctcctagggctgctggccccgcctggggaggcttggggcattcttgggcagccccccaaccgcccgaaccacagccccccaccctcagccaaggtgaagaaaatctttggctggggcgacttctactccaacatcaagacggtggccctgaacctgctcgtcacagggaagattgtggaccatggcaatgggaccttcagcgtccacttccaacacaatgccacaggccagggaaacatctccatcagcctcgtgccccccagtaaagctgtagagttccaccaggaacagcagatcttcatcgaagccaaggcctccaaaatcttcaactgccggatggagtgggagaaggtagaacggggccgccggacctcgctttgcacccacgacccagccaagatctgctcccgagaccacgctcagagctcagccacctggagctgctcccagcccttcaaagtcgtctgtgtctacatcgccttctacagcacggactatcggctggtccagaaggtgtgcccagattacaactaccatagtgataccccctactacccatctgggtgacccggggcaggccacagaggccaggccagggctggaaggacaggcctgcccatgcaggagaccatctggacaccgggcagggaaggggttgggcctcaggcagggaggggggtggagacgaggagatgccaagtggggccagggccaagtctcaagtggcagagaaagggtcccaagtgctggtcccaacctgaagctgtggagtgactagatcacaggagcactggaggaggagtgggctctctgtgcagcctcacagggctttgccacggagccacagagagatgctgggtccccgaggcctgtgggcaggccgatcagtgtggccccagatcaagtcatgggaggaagctaagcccttggttcttgccatcctgaggaaagatagcaacagggagggggagatttcatcagtgtggacagcctgtcaacttaggatggatggctgagagggcttcctaggagccagtcagcagggtggggtggggccagaggagctctccagccctgcctagtgggcgccctgagccccttgtcgtgtgctgagcatggcatgaggctgaagtggcaaccctggggtctttgatgtcttgacagattgaccatctgtctccagccaggccacccctttccaaaattccctcttctgccagtactccccctgtaccacccattgctgatggcacacccatccttaagctaagacaggacgattgtggtcctcccacactaaggccacagcccatccgcgtgctgtgtgtccctcttccaccccaacccctgctggctcctctgggagcatccatgtcccggagaggggtccctcaacagtcagcctcacctgtcagaccggggttctcccggatctggatggcgccgccctctcagcagcgggcacgggtggggcggggccgggccgcagagcatgtgctggatctgttctgtgtgtctgtctgtgggtggggggaggggagggaagtcttgtgaaaccgctgattgctgacttttgtgtgaagaatcgtgttcttggagcaggaaataaagcttgccccggggcactggagtcagagttgtccaaggaaagggcctcaggcatcccttggtncaggaagaatttctctgatggccgcagacattttgcttgagacccaagtggcagggatccaaccgcccttggngcatgatgtttgctgagggctcagggcttccctttccagccccggttccaagctgtctgat

SEQ ID NO: 352316 - DNA, 901 bp, Homo Sapiens
  misc_feature (81)..(330): n is a, c, g, or t
  misc_feature (339)..(386): n is a, c, g, or t
tattaaagaaagggggggtgggagggccataaaagaaaaattctagtttttcgggctggggcagggtggttttcacggctnnnnnnnnnnnnnnnnnnnnnnnnnnnnnnnnnnnnnnnnnnnnnnnnnnnnnnnnnnnnnnnnnnnnnnnnnnnnnnnnnnnnnnnnnnnnnnnnnnnnnnnnnnnnnnnnnnnnnnnnnnnnnnnnnnnnnnnnnnnnnnnnnnnnnnnnnnnnnnnnnnnnnnnnnnnnnnnnnnnnnnnnnnnnnnnnnnnnnnnnnnnnnnnnnnnnnnnnnnnnnnnnnnnnnnnnnnnnnnnnnnnnnnnnnntctgtctcnnnnnnnnnnnnnnnnnnnnnnnnnnnnnnnnnnnnnnnnnnnnnnnnctttaggcattcccagacacaaagatctcagagacagacaacagagagcctccgtgttcatctgcccgaggctgtttgtcacagttcccttaaaagatgcctggaaatgctcccaacaacaagggactcaagtatggggctgagtttgttaaaaaagcagctaaatgtgtttaggaaacacacgaagtgaaaccagacagtgatggcccatgtacaagacttgtgcttgaagctttggtgtgcctccatggccaatttttcaggcaccaaaacccattcctgattaattattgatatacaatgcaaaccaaactatgaaaacacagactttttttcagaagagggaaataaaggcacagaaacctgccaaaatagatatttttttccataagaatagtatggttgattaaaatagtttatcactagtaaaacttgtatcactagagcagacaatacaattaagttttttaaaaatgacattcacggatttgtgctctgggcttcatgtgatatct

SEQ ID NO: 352317 - DNA, 481 bp, Homo Sapiens
  misc_feature (62)..(112): n is a, c, g, or t
aacttctgggtggatagcagctgcaccaaggtctaaagaagcttctgggtttcactccaggnnnnnnnnnnnnnnnnnnnnnnnnnnnnnnnnnnnnnnnnnnnnnnnnnnncaggatggagagggtgggaagggtctttcaggccagagactggcaggagggtcctctccaaccttaatttcttggtgggactcagctctgtcagacctgaaggtacccttaagaaacaagtatggcgtaggtatgtaagagacagagagagtaatgagcaagcaattgagcgcataagctgtctaacgttttatatcttgtatggccatttgacaccctttaagcagtgttttgtaagcattaaatcttctagctttccagctgcatgtttatactggctaaccctgctttcctttgtttgtaaatcaaactcattgtgggtgacggggaatcagggcttcgattccggagagggagcctgagaatcgg

SEQ ID NO: 352318 - DNA, 790 bp, Homo Sapiens
gcgggaccggaaaaagaaattcccgggccctggcttcttggcgcgatgaggttccggttctgtggtgatctggactgtcccgactgggtcctggcagaaatcagcacgctggccaagatggttgagtgcacagggtctagtctgggtggaggaggggtgttgggggtggggattgtgggtgtagaggatggtgaggtttctctggggctagggcctcagtgctctcagcctgtgctaccatgctttgtgaccttgatcagtggctggcctgctctgagccagtccccaggaaggaggggtgaggtttgccagcctggctgatgtaaggacttcccttccagtcctctgtgaagttgcggctgctctgcagccaggtactaaaggagctgctgggacaggggattgatgtgagtacaagatccagcaccccattgtcccatgaccttatgaccaccactgccctgaaactctgcactaggcccaggagacgggtgagccagcctctcaacctctctgggcacctcccttccttctttccagcctgtctgttccttatcgcaggatccaggctgggggtgaggggctggtgagcaggggcctggcaccccctgaaggtctcctttccccatagtatgagaagatcctgaagctcacggctgacgccaagtttggtgagtatcccgctgagtctataggccccaggcaatccctggggaaactttggtcttggtgcctgtacagagggggcccccaccccttccccagcaagatccttaactttaccttacct

SEQ ID NO: 352319 - DNA, 988 bp, Homo Sapiens
tcggacccgccaggcccatatccctctgatcacccacagcagacctcagtacaagaccctgggggattccagaagaccaggcacagttcccagctctaccgttgcttagttaaccatgtgacctggcttactcgttctccctggactctgccatggcactttgtgtatgcgtgcaccttctagatgagtcccggaccctggctggcctcatacgtacctgcgtaggcctccagaccctgcaagtgcttctgcaaggggctttgcttctcctcataacagcggcacaggctggccgcgtgctctgggggtagaatggagtagctctggagctagcatctcggggcctggcttgggctcctggcccagacagggcaggtacacctcagggtcacagggcctgtccccttctctagcagcccttggcccacaggctgcccagctgcccacccacaacccgtacctttgggcagccccagctgctgcagttcactggacaaggattcgccatcgacactgtgcttggccgcactggagaggatgaaactcagcactgccactgtggccttcacatcgcctgactcaaacttggcgtcagccgtgagcttcaggatcttctcataatcaatccgcctgtcccagcagctcctttagtacctggctgcagagcagccgcaacttcacagaggactggaagggaagtccttacatcagccaggctggcaaacctcacccctccttcctggggactggctcagagcaggccagccactgatcaaggtcacaaagcatggtagcacaggctgagagcactgaggccctagccccagagaaacctcaccatcctctacacccacaatccccacccccaacacccctcctccacccagactagacctgtgcactcaaccatcttggccagcgtgctgatttctgccaggacccagtcgggacagtccagatcaccacagaaccggaacctcatcgcgcc

SEQ ID NO: 352320 - DNA, 692 bp, Homo Sapiens
cgtgatcgtcgactcagctgaccctgcgggaccggaaaaagaaattcccgggccctggcttcttggcgcgatgaggttccggttctgtggtgatctggactgtcccgactgggtcctggcagaaatcagcacgctggccaagatgtcctctgtgaagttgcggctgctctgcagccaggtactaaaggagctgctgggacaggggattgattatgagaagatcctgaagctcacggctgacgccaagtttgagtcaggcgatgtgaaggccacagtggcagtgctgagtttcatcctctccagtgcggccaagcacagtgtcgatggcgaatccttgtccagtgaactgcagcagctggggctgcccaaagaactgaagcaggcccagaccctgatgagctccctgggctgaggagaagggtgttccaggcctgtgtggagccgccctgcccgtatggagtcacgccctctgaactgctcttcgggaggcagccctggttctaggatgctgaggccctggcccggactctggcctcccagatccccagctgcctcacttctctcttgagaacttggctcagggctcctgaggacctttcccagcattaccttcccttcccttgaaaggcaattgttggctgttttcataagcagcgcacaaaacttaaccaggaaggttattaagcgacacg

SEQ ID NO: 352321 - DNA, 1016 bp, Homo Sapiens
cccagaggcagttagtccaagtcacgtgatcgtcgactcagctgaccctgcgggaccggaaaaagaaattcccgggccctggcttcttggcgcgatgaggttccggttctgtggtgatctggactgtcccgactgggtcctggcagaaatcagcacgctggccaagatgtcctctgtgaagttgcggctgctctgcagccaggtactaaaggagctgctgggacaggggattgattatgagaagatcctgaagctcacggctgacgccaagtttgagtcaggcgatgtgaaggccacagtggcagtgctgagtttcatcctctccagtgcggccaagcacagtgtcgatggcgaatccttgtccagtgaactgcagcagctggggctgcccaaagagcacgcggccagcctgtgccgctgttatgaggagaagcaaagccccttgcagaagcacttgcgggtctgcagcctacgcatgaataggttggcaggtgtgggctggcgggtggactacaccctgagctccagcctgctgcaatccgtggaagagcccatggtgcacctgcggctggaggtggcagctgccccagggaccccagcccagcctgttgccatgtccctctcagcagacaagttccaggtcctcctggcagaactgaagcaggcccagaccctgatgagctccctgggctgaggagaagggtgttccaggcctgtgtggagccgccctgccccgtatggagtcacgccctctgaactgctcttcgggaggcagccctggttctaggatgctgaggccctggcccggactctggcctcccagatccccagctgcctcacttctctcttgagaacttgggctcagggctccctgaggacctttccagcaataccttcccttcccttgaataggcaatcggtgggatggtttcataagcaggacaaaattaacagaagtataacggacaatcaccacaacaatcacccaggcattactcaggtgcggggcacaaatg

SEQ ID NO: 352322 - DNA, 826 bp, Homo Sapiens
  misc_feature (41)..(41): n is a, c, g, or t
  misc_feature (55)..(55): n is a, c, g, or t
  misc_feature (79)..(79): n is a, c, g, or t
ctgaaccccagggcttcagaaaacagggccagggtgccccngataatcagtttcntgatcaccccacaggcagacctcnagtgacaagaaacccttggggggagtcaggagacccagggccaggtcccagctctacggctgctagtaaccatgtgaccgtggttaagtcgtctccctggactctccatgcactttgtgtgctgcgtgcaccttctagaatgagcccggaccctggctggcctcatacttactgcgtaggctgcagacccgcaagtgcttctgcaaggggctttgcttctcctcataacagcggcacaggctggccgcgtgctctgggggtagaatggagtagctctggaggtagcatgtcggggcctggcttgggctcctggcccagacagggcaggtacacctcagggtcacagggcctgtccccttctctagcagcccttggcccacaggctgcccagctgcccacccacaacccgtacctttgggcagccccagctgctgcagttcactggacaaggattcgccatcgacactgtgcttggccgcactggagaggatgaaactcagcactgccactgtggccttcacatcgcctgactcaaacttggcgtcagccgtgagcttcaggatcttctcataatcaatcccctgtcccagcagctcctttagtacctggctgcagagcagccgcaacttcacagaggacatcttggccagcgtgctgatttctgccaggacccagtcgggacagtccagatcaccacagaaccggactcatcgcgctagaagcctcggccgaatcgcatccaggccc

SEQ ID NO: 352323 - DNA, 768 bp, Homo Sapiens
cgacggcagtaaccctcgcgggtataaggtagcgaggcctgggtggccgaattcggcacgagggtgaactgcagcagctggggctgcccaaagagcacgcggcagcctgtgccgctgttatgaggagaagcaaagccccttgcagaagcacttgcgggtctgcagcctacgcatgaataggttggcaggtgtgggctggcgggtggactacaccctgagctccagcctgctgcaatccgtggaagagcccatggtgcacctgcggctggaggtggcagctgccccagggaccccagcccagcctgttgccatgtccctctcagcagacaagttccaggtcctcctggcagaactgaagcaggcccagaccctgatgagctccctgggctgaggagaagggtgttccaggcctgtgtggagccgccctgcccgtatggagtcacgccctctgaactgctcttcgggaggcagccctggttctaggatgctgaggccctggcccggactctggcctcccagatccccagctgcctcacttctctcttgagaacttggctcagggctcctgaggacctttcccagcattaccttcccttcccttgaaaggcaattgttggctgttttcataagcaggaaaaataaacagaagtataccaatcaatacacaaaaaacccgcagggcacatattccgggccggacaccacggtttgcatggccagtgccagctgtcctgcaccagttctgtcccaggggacctccggcccata

SEQ ID NO: 352324 - DNA, 1141 bp, Homo Sapiens
gctgggtggcgaattcggcacgagggcttcttggcgcgatgaggttccggttctgtggtgatctggactgtcccgactgggtcctggcagaaatcagcacgctggccaagatgtcctctgtgaagttgcggctgctctgcagccaggtactaaaggagctgctgggacaggggattgattatgagaagatcctgaagctcacggctgacgccaagtttgagtcaggcgatgtgaaggccacagtggcagtgctgagtttcatcctctccagtgcggccaagcacagtgtcgatggcgaatccttgtccagtgaactgcagcagctggggctgcccaaagagcacgcggccagcctgtgccgctgttatgaggagaagcaaagccccttgcagaagcacttgcgggtctgcagcctacgcatgaataggttggcaggtgtgggctggcgggtggactacaccctgagctccagcctgctgcaatccgcggaagagcccatggtgcacctgcggctggaggtggcagctgccccagggaccccagcccagcctgttgccatgtccctctcagcagacaagttccaggccctccctggcagaactgaagcaggcccagacccctgatgagctccctgggcttgaggagaagggtgttccaggcctgtgtggagccgccctgcccgtatggagtcacgccctctgaactgctcttcgggaagcagccctgggttctaaggatgctgagggccctgacccggactctggcctcccaaaacccccacctgcctcccttccccctttgacaacttggcctcagggcctccctgaggacccttttccagcattaccattccctttcccttgacaaaggcaattggttggcctggcactcctaacgcaggggaataacctacccaactttttgtggggacatttaatgatgctccgtctccttggtgctttcttctgcgctgggccgactaacgatagtaacggaaatgggcacctggcacactcccggccttacacgagcaaacacatctgtttatacacaattcgcctacatctcccccctactactcctcaagcgaatcccttctatctcctaccctgaccgtctttcacactctttttgtatcgtg

SEQ ID NO: 352325 - DNA, 1371 bp, Homo Sapiens
agggaggggaggggaatatcgtgaaacgcgattgtaggaatattttgggttggaaaaagtgcaatgtaaagctttcaggaaatttgggtcatggtaaggagttttaagggtcagcgaagcgttgttaaagtgtttgggaaaaaaattgttttccctgttggcctgtgtatttagccgttattcaaatttgcaatagaaattcccattattaaaaaaagaacctttaaaatttaggaaagaattccccacatgtggtttttaatagatctcatgctgacttcgaaatataatctgcactagtctttgttaaagtttaagggagtcataaaataatgtccctctcctctcctgacctctgaaccacttgagacacagacagatggagattcaatattttaagtttactgctgaaaaaggctaggttagaggatgtactttaagtttatgccaacaatagccaccagatattgaacttagaattagacagacctgcttactaaggcatgggcagttctgcacaagcacaaatctccctttgcagaggcaaagaactttcactgcaaggttcacaatgtagctggcaagagaccacaacatcggttctctgcagttatgacaaatccacaaaagggaaaaaagaggctagcatgcccagttctatatcttaaactccctcctttcctggtgaagtgagagaaagagattagaattccttggtaaatggatagcctaagaagcactgtgagaggaagccatccttacccgccgctgccttctgaccaaagtagttcatatatagtgcacattagggcatgattcatgttacagtagctttagggccacacttcttctcccgaagtaacccatatttaattgcaagtgactaaggtaaatgactttagggataacctcctttatttcattttatttctgttttataatttatatatttcaatatcttattattggtaagaaaaacttaactttctcagtcctaaaattctttattatcaaatacatcagtttaataataatctctaaggaagaaaaaaacacatttaagatatccattgatttgaagataattattatggaactatggttcttatgtcaactcacaactcatttagatattaatacatgtatcatgaaatcatagctcagaattgctggtccagagtcactttagaatggctctgattcaaggaaattaaaagaaatgattgttaattttcttagtgctgggaaaggcagtgaaacaagcttttgaatcattatgtaattttcaaacaactaaaagggctatactgttcagttataatcttaaaaattctagctgagacagagcttttaaaaaatctttatagtttt

SEQ ID NO: 352326 - DNA, 973 bp, Homo Sapiens
  misc_feature (487)..(503): n is a, c, g, or t
tttaaaggtcaaataattactgttttatattgggacagtacatttcagatttcaaccaaaagacaaaaatgcagtttaactcaaaggcacaacaattgaaacacagaaaataatggcatctcttggatgccttatttctaaattaaacaaagaagtacacaaattttgttcccttccctccgcccagtgcaagcccacaagctttttccaaagtcttgagcttttgatgctgtcccgcattgtggacttgtgaggcgcttggatgtagcaatgaaacaaaatgcttgagaggtctagtgaatggcattcaaaagggacctcaaagtgcagacatatctttttcaaatatgttacaggctgaactggctctttgaacactatcactctgcttaaatccaggaagcaggctttaaaaatgcaaaaggcatacaagttgtatttcagtgcaaatctttagctggttattggaaaagattccaaaaatttnnnnnnnnnnnnnnnnntcctttgtgtcacctgcccctccccccacccaaagccaaaatgaagaaaagacagaacaaaacaaaacagaagaattacagatgactttggaatcatttaggaatccactacttccaatcagaatgtttagaaaaatacatttaaagaatccattttttaaaaaaaacaaaagtaatcttgctttctgagactgctcttcgggtatagaatgagcttccgtgtggagtgcgtttgaactttgaccttagctgtgtgcgaggtgcaggcgctgggggagcttcaggctgtggtgtgcgagtgaccgcaggggagcgtggggtggctgcccgctgccgagtcagccgttgagcccttaggtcgcagtgcgtccgtggattttagtaatgttctcatcactttgtgacacactctgcttcagcatcacagattttacaaatggttcaaattcaatgaaaaagattcgcccgct

SEQ ID NO: 352327 - DNA, 841 bp, Homo Sapiens
ttctctcgctttcaggtttatgtgagggtccactgaagtgctttaggtgagagttccctataaactgtaaagcgcgctgccgtcgttttgcaaagctactcttttctgtcggcccagtgtagcatctggcggttttcttctctccaccctgctcctccgaagcgcggtgtccatcacaccaagcccgttactccctctgctctgaaatcttccccatcccgcagcctgcccttctccaggtcgctggagttagattaccacacttcctcctgcttccggggcaccatggtgaaggctgactgtcctgtccctatcacagacctgccagattcctctggtaaactgcaggttccctctgcctcagttgtggccaggattctgaccaggagatgatgggaactagatggagtaaattagtgtcacgcaggaaggcaggaccgtgcagcattcaccaacctggattttggagtcagcgttcaaatctgagctctgctgtcttattgaggcggtgaccttggtttggataagttatgtaacctctctggccctctcaaaataaggataatcacggttggcatcaagattaagtaaaataactgtgtgtacactcgtacggaataatcacatgatgacatgttaaaacacacacaacctccactcgacagaggactcacaagaaagggggcggcgcggctaaagaattatcccgggggcgccccaatttgagtctacccccgtttcttgtaacagggggggccccaaaggggcggcggttaaaaacggaggaggcggcagttaacaaggggaccggcaaagtcgggtcggggactttggaggccct

SEQ ID NO: 352328 - DNA, 2727 bp, Homo Sapiens
tctgaagacccaggcctcacctccgcctgcaggacctcctcttggccacttggcctgggcctgccaccaccacgtcctgcagaacgagccctgccttggctgtggagaagcactccaggccgctagcagatgggactggcattccagagggtcaagaagtgacttgttcagaacacattgtttttaacagaaaaaaaatctttttataaaatgaacttttaacacttggctcaaacctctaggtcatactgccaatctttacacaaatggccatggggcagaggacaggggagctgaggttggttcagaggccagcctgcatagcctctgtcctcaggacggaacttgggtgcagctcagtgggtcggaagagaaggcggtggcctgtgggtgaggggaacggagcaggctcaggcagaattgagtacggtgcgtctgcttttcaaacccaaccatatcagctgctgctctttatgaactgcccaacttcctgtccctttcaggggctagacacaggcttctcgtaagaacacagccttagaggcacctgaacaactcaaaggtttccggtccatttcctggggttcccgatggggaaggttcagtggccaaatggaagaaaaatgtgcagtttctagtgctggggaagtcttagccagcaccagagcgccaggcctctccctggcctcttacctgtcagtgatcggagcactgccctgggctggccggcgccgtactgcctgcgttgtgtcagagaataggaaaagcagctttgtttggggcattaatgcttggagtggggtcagctaaggttgctacttgccaatttgtgatttgtctaatcagcctgtgtgattggggctcattttgattctctgaattatcggtttgacggttacacttggctgctgggcccatccctggcccccggtgtggaaaaggctaaataaggtgacagtgcatcgatgctcccccgcgtggcctttggggcaggctggcatcccggtgcgcctctgcttcttaagctttcctgctgctcgctttgtttttaaaagtaacttgggttgcattcttccctctggactagagtagaaatgcaggggaaactgctgtggatttgagaggcaaagttggctcagctgtgtgcccagttcctcctgtgggcactttagcaggctccgagctttcctggcataggtcaatcaggtcccaggatgaataatccaggcttcagcaacactcctctttcccagccagcaaaggctgtgaatttgaattctttgttggtatgtatgtgcagggagtactgttaggcacattcttaacccatgtggttggccagaaatcagaagtggggctgtgtctctgactggctagaggccaggccttgtgggtttctatctgctaagcacccagcaggttggggcctgggactcagctctctctgcggtagaggcaggccctcctccacttcttggtactaaacgaagatctcgacaccttgcagttttacttcatttcctgcccctttcagggcctgtgaggatgcccatgagctaccgctgtacagttctcggccccggctttcttccaagagttgaccaggaaccctaaagcatccagagtagactgcgctgccactgcgcgcatgctggtgcccgtcttcctcctaaggggccaggccacatccaagtgggcctctgtcgggggcggggcggtaggtccgaaagaaaccgcagacactacgatgcactcctcaagctgtcttttgtgcttagatcatccataggtgtttcttctgcttgaagctgctatatcatcttttatttattcaggggtattttcatattggaagccttggctagtctgctctagctctgggttctgtttagagattggcttatttctgaatattcaagaaaggaaaatgactgggcctttctttcttttcttctcctctgggatgggtagtctccctttcctagaaaggttattataactttaaggacaggcttcaagtgggaaggcccctacttttgcacttctccaagtgcaggtcacaccaggggcagaccctgtcgctgcgtttctgaactgtgaaggagcccattcgggtgggagacttcagatgggctcagtacctgtcccagccacaggcttcttgtccacctcttctcccctgcccaccagctgctcagcgcataagaccttcccgacaggctctgcgtgtgcagctctctgcgtccctcctgggccctccagcgtcagacactaatgggagttcccgagatgctcgggtttgagcagggagcaggcagagctgcagtcagagacattagaaaaccagtctgaattgggtctgtctttgagatgcccaggccagcagaaagcagctcagaagtattgttgctcatggtgtggcaatggactgaactgtaatgaaaatgttatttaatctttgtctctgtattttgatacttgaatgactttcccttttgttttactgtatataaaattgttaatctgtctgattttgtctgaattataaacactttgaggtaccaaacataaccaatctgtgcaacaacatagactgacctcagtacccaagagagtgtaaatatttctgggcttccagctttggttttgttattttcataactgtacacaacttagaacagactgaattaataaatgagaagcgacatgaaaggccaaaaaaaaggc

SEQ ID NO: 352329 - DNA, 449 bp, Homo Sapiens
  misc_feature (224)..(224): n is a, c, g, or t
ggaagcccttcaaagacgagttccggcccaacctctcgcacacgggccgcggcatcctcagcatggccaactccgggcccaacagcaacaggtctcaattcttcatcacgtttcgctcctgtgcctacctggacaagaagcataccatctttggacgggttgttgggggctttgacgtactgacagccatggagaatgtggagagtgaccccaaaactgaccgncctaaggaggagatccgcattgatgccactacagtgttcgtggacccctatgaggaggccgatgcccagattgcgcaggagcggaagacacagctcaaggtagccccggagaccaaagtgaaaagcagccagccccaggcagggagccagggcccccagaccttccgccagggcgtgggcaagtacatcaacccagcagccagccaataaattgcttgcctgctt

SEQ ID NO: 352330 - DNA, 578 bp, Homo Sapiens
  misc_feature (481)..(481): n is a, c, g, or t
ggtttcccccacccacaggaaaaataggagtcacaaaacgtggcttgtgctctccccgctggtttggtaaacagagttccacttggccagaaccacatcacctgcgtccaccctgtttcgtgctgcttccacacagctgggtgggcgtcagagaccacgtggcccacaacgctggaaagacccctggactagagggtgaagggagctgggtgtggccaggcttgcgagtggcgcgccactgggtctgagacagggcagtgtccaggccacatgggcgagtttcctcctctcctgagcccggtgggtctagagagccagacttccctggcacatggagcaccctccatcgcagctctgcatagccctcaacccccagcagtgatggccagcatggcacatgactcaggtccacgaaaaaggcagtgaggaggcctcaggtggggaaggaacccacctagcccactgaccccccaggcttcanacagccgcttcccttaccgtccaaagatggtatgcttcttgtccaggtaggcacaggagcgaaacgtgatgaagctggggaggagggctggatggtt

SEQ ID NO: 352331 - DNA, 391 bp, Homo Sapiens
  misc_feature (88)..(137): n is a, c, g, or t
  misc_feature (365)..(365): n is a, c, g, or t
cctgtgcttgtccaagggcttctggggctatctcccgtgaggacagggtcccgctgagacaggggaaacgtgccaggacctagccttnnnnnnnnnnnnnnnnnnnnnnnnnnnnnnnnnnnnnnnnnnnnnnnnnnagccaggacacacatgtacatgtttatatctagaaaacgccaagtcaagtaatcagtacgtgaagcgggccgagtacccgatggcctggcccggggtgaaggctgtttagtgaccatggaagtgtgtgagatttcacgcacacgcattcatgtcaacaaggacatcaggagaagttaacattatactgaagtcttaagttaaaacatttctgaagtgtatggaatagnttcactagctgttacttttctaaagt

SEQ ID NO: 352332 - DNA, 431 bp, Homo Sapiens
gctggtactcggtccgggaattcctcgggattgaaaatccaattacattgaacaggaggtgtctctagaatcaaggttcagtatatggtggtctggctgtgtcctggaatgtagcccttattagttttattgagcattttcctatataaattgaaatcaagttgaagactcatttttccacagtaggacaaatagaacagtttaggactttggagagatagcaacttgctgcttgcctgtgcaacccacctcaaaagatacaactcctccaacttttgatttctggtgacttctccaaacaattagatgtgaattgaccttattcccttacattactacatgtcgatattctgcacctggccaaatacagtataaaactgatgagcatacatttcttttagtttcatattttctatttaaagctactctct

SEQ ID NO: 352333 - DNA, 686 bp, Homo Sapiens
  misc_feature (540)..(633): n is a, c, g, or t
aatgagtcttaacttgatttcaatttatatagaaaatgctcaataaaactataaggggtacattccaagacacagccagaccaccatatactgaaccttgattctagagacacctcctgttcaatgtaattggattttcaagacaacaaatatataaccttgacacaatattagagagccaaaaggaaaggacattttgggttgaaattttttcttttaaaaatgtgtccttgagttctattaacaatagctgaagcctgggaacagctcaaatgtctattgagaggaaattgataaattatatgcatattatggagtaatatttatcaataaatgggaataatcaactctatgaatcgacatcatgatcatggatcaatataatctttctaaccccgagtggggaaagctaagctaaaaagtgtcctataatataaataaatgtatacaaaattctagaacagacaaacctaatataagctaaaaaagttcagaaaagccaggtgcactgggtcatgcctgttatgtcagcactttgtnnnnnnnnnnnnnnnnnnnnnnnnnnnnnnnnnnnnnnnnnnnnnnnnnnnnnnnnnnnnnnnnnnnnnnnnnnnnnnnnnnnnnnnnnnnnnncagtgtggtgtggtacgcaggagcagaaaaccaaatattacatattctcatcc

SEQ ID NO: 352334 - DNA, 466 bp, Homo Sapiens
  misc_feature (417)..(417): n is a, c, g, or t
gcaccgcgctccagatcgagagcggcgcgcgcccttccgtggaggacagaggggcgcggagggggcgcctgtgtcccacccgctcgcgggcgctttacggggcgtcctctgcgccattcacttgtcagcttgtcgggaagttgaaatcgcgtttgggaggtaataggagaaagagatcggggacggcaggcggagaaagtgcggtttccatagcgccggggagagggcggacccgcgagccagcggtccctgagccgggagaccgcgcgggcgtctctccagcccccgcaggagcgccgccttccttccgcaggggcgtcctctccccccaccgctgcaggagcacccccttccttcctcggaagcgtcctctcaccacaccgcttcaagagcccccccttccttcccaggggcgtnctttccccttcgagcaggagcgccccttttcccccacaggagcgccctc

SEQ ID NO: 352335 - DNA, 1529 bp, Homo Sapiens
ggctggtacggtcggagttcccgggatatcgtcgaccacgcgtcgcgcagtgggacagcccagatcctctccggcccctggagttcctgaggacttccctggggggcaggttcctggtgcacgagtccttcctctacaggaaggagaaggcggctggggagaaggtgtactggatgtgccgggaccaggctcggctgggctgccgcagccgcgccataacccagggccaccgcatcatggtcatgcgcagccactgccatcagcctgacctggcaggcctggaggccttgaggcaacgggagcggctccccaccacggcccagcaggaggacccagaaaagattcaagttcagctgtgcttcaagacgtgttctcctgaaagccagcagatttatggggacatcaaagacgtcagactggatggcgagtcccagtgaggcgatgtgggcagaggagctccgagccgcccacccaaggtggcttcacatccacacaggcacttcccatccacctaggtttggcttagcagaaacttcttttcattcttccaaagcatcgatggtcttcgcgtctcctcaggaggtctcccaggaggaattcttggatggtgtcctcatgtcggcggagaacagtgctcagagctggcgcttgcagacgcagctgtcgtggggcagggcggtggcgccttcctgacctttggaagacatgacaaagctgcctggacacggacgcccctgctgtacggccacagcacccctgggtttgcagagcacgcagccttcctagggctttccacctggcgaggccccgctctgctcagcacggtgcaaagtgaatgctgctgtcttggagcctgggcacgtttggggaagttcctgcttcaaactgagctgccccgcataggccaggtcaacccacaccaatctcttctggacaggtgctgggtaggccttcctggtctctggccgcctgctgccagggtgtggccatccccagcaaccggagccggccaaaccagaggcctcgctccgcactccacactttcctttctgtgctccttccaagttaaattaaaccccctctccacgattcccacggcaggcgtcattcccgagatgggagccagtccaggggtcagcaggagccagcgctgggcacacgtgccctggctgaggccagcggcatcctgggtggcccaggtccatcctgggcagcaaaggcgtgtccccttctgtcagacagcttcacagagtgtggcttcaccagtcagagggagcagtccggagaggcaagatgaccccaccgggactgcagagcctcctccttactaacaaggacctgtccgcagccgcgaggtccttcactcccaccctgtaattgtggggggagtgccagcaacaggcctgtcccctggcaagttggccacggaacccaccatgcactgcaaggctgtgacagcctgggcacccctgcttctcctctgcttgtacggttcccccaataaatcctattttccatctcaaaaaaaa

SEQ ID NO: 352336 - DNA, 2206 bp, Homo Sapiens
  misc_feature (1606)..(1614): n is a, c, g, or t
gctgcttgcacactagggcacatgtgggctttctcttgatctttgtgtcatttcagaattcaaagactgtgctacgggagttctgaacatggctgggttcatgaaggcaaatgtatggatgagagtgtggtttaggaaagagggcactgatatcagattagacctatgtgtttgcacccatctttgttggcgatctgagtgcagtgtggcaagtgcacacctggcatccctgcgtcagatcgcgcaccttcaggtcgcgcaccttcgctgaaggaagatgacgcagagctttatctgaaatcagaggggagctatccaaaatgggagtttgggggcagctaaagttgacatgcgaataaattgatactgaaacttagcaacttcttaaaagtgtaaagaagcctcataagatcataaggaaaatgtatatatgcttttcacagctttctagaattttttgacatttgattttcttgagacttgtaaacctggatatgttgaagggtatttgttaattttacttttcaaagatactttaaaacagtagagctagcaatgacaccttgcatttcatttcaacactgcttcaaggtttcttttgtatataattcttagaatgctcatttcttttaaatggtttaatttgtacagcagaggaatgttattgtagtagtatgtaactattacctaatactgagtttttgcaaaaaacaatgaatgctcatatgtaattgaaatacttcagatcacatgaaaatgctgatttaacatttaagtatcacagcattaaaagaaaaagaaagtaaaccagtcctttgtattcagttacctaatggggtgccatcaataagctgcgatacagccctggagctcagtcagccacaccttcctgcatcctattggccttattcattttaaatgagttaatgaatctgccagatctgtgaatgatagagattatgctaaattaatgctgattctttgtgtgtgtgggaaatctctgtagagcaccttttctttcttagactaagtaacccagtacaatagttgtgaactgaataattaaaactttggcttctcttaggaaaagacgacttcctagtcataggtgtcctatggggaaatttattttttttaatgtcctgttccttaatgctgcaaattatcagtatttataaagtaactgattttgcaccacttttttgttactgtgaccacggcagaacaatgtcttctagactatatctatgtaaagttattagaatggtatctgttcattttagtgatatgaagatcacaactaacaactgacaaatcagagtttgccagttcaaattcagcatggctgcagctgattaagaaattgatatgattattctttgctagcctctcttactaatggaattatatactggccagtaaaatgggcctcccaattgctgtttcagcaggttttaaaccttcaggaacaccagttaggaaaatagctccagaaaatatagatatattttatttttattaaaatggcagtctacatcataattggcatttctcaagactgtctttaccagaatctgtgtgaaataaggcaatctagtctccttgnnnnnnnnntctcttggatgtttaggaaggaagacttggccgtgatgtggtgtcctggctttgtggtgtagtgctgtgtgtatggagttagtgtaaaaacatggattacaccaagtggaagaaacgtcttcttgccaagctcattcttagaacttacacatctagaacagcttccactttggcagtgaggtcgtagccttttaggtggaagaagtgagggtgcagcgtgtcagacacaacattcatgttactcttacattggaatctgaaggtagttcagacttcgtgggttttgtttttaagcaaaacaatgtgaaaacatttaagtttgaaatgttgcatttgaagttatgatcatttaatatattcatattaccaagactattatactggaagtggtttttgtgttataaaggtttaattttacataaggcagttacttaatgtgatttttaacccttaaaaaagtggagatgtatacatttgttaacaatgccatgaaagcattttctttctcctaaggaaaagtgaatttcttatcagaatatctggctggccctgtaatttaaattaaaataaaattttggagaaacaaaaaaaa

SEQ ID NO: 352337 - DNA, 918 bp, Homo Sapiens
ccggctgtccagcatttcagcaagcggcggcagcacccgcggggaggcagagggtgcggggccgtgggggccgcggagctgccctgcccaactcagcccagactaggcggcagcccggaccggcgggacccgagggcctggccccagcgcccggtagatcgcggcggtcagcggtgagggccagcggcccaggccagcggctccagggccagccacgatgtcctccaccgtgaacaacggggcggccagcatgcagtccacacccgacgccgcgaacggcttcccgcagcccagcgcctcctcggggacctggccgcgggcggaagaggagctgcgcgccgcggagccgggcctggtgaagcgcgcgcaccgcgagatcctggaccacgagcgcaagcggcgggtggagctcaagtgcatggagctgcaggagatgatggaggagcaggggtattcggaggaggagattcggcagaaagtggggacattccggcagatgctgatggagaaggagggagtgctcaccagggaggaccggcctgggggccacattgtggcggagaccccgcggctgaccgagggcgctgagccgggcctggagtacgcgccctttgacgatgacgacggcccagtggactgtgactgcccggcctcctgctaccgcggccaccgcgggtacaggaccaagcattggtctagcagctcggcatcgccccctcccaagaaaaagaagaaaaagaaaggcggccaccggagaagccgcaaaaagaggagactggagtccgaatgcagctgtgggagctcctcacccctccgcaagaagaagaagagtgtgaagaagcatcgccgagacaggtctgattctgggtcccggaggaagagacggcacagatctcgaagctaccaagtgcaaaaaaa

SEQ ID NO: 352338 - DNA, 1646 bp, Homo Sapiens
  misc_feature (1208)..(1218): n is a, c, g, or t
  misc_feature (1520)..(1521): n is a, c, g, or t
  misc_feature (1530)..(1534): n is a, c, g, or t
  misc_feature (1536)..(1536): n is a, c, g, or t
ctcatagacaccttcagggtgtggggtacagcctccttcccatcttatcccagaaggcctctcccttcttgtccagcccttcatgctacacctggctggcctctcacccctatttctagagccactgcgtctggccttctataattttctggtagtcacgatggaaacaaacaaaacaccttagaaccagagatcgaccccctcaagcaatacatcaattcccttcacaagaaacgtcggggctacatgagtatctgtgttgaatgcggtctgaaatgatcctatggattttcccggctggttgccactactgtacaacattcagtgcccacatccatctgtgccattaagcttttttgagacatgagagatgcctcttccctgctgtatgacatgcatttgggaagttggaaagaaatgacaaaatcagggagaaaacatccaagcttcttacctgtagatagaatcagccctcacttggtgcttattaccagttattcaagaacaataacaacaacaaaattagtagacatccaagaagcacatattaggaccaaagatagcatcaactgtatttgaaggaactgtagtttgcgcattttatgacatttttataaagtactgtaattctttcattgaggggctatgtgatggagacagactaactcattttgttatttgcattaaaattattttgggtctctgttcaaatgagtttggagaatgcttgacttgttggtctgtgtaaatgtgtatatatatatacctgaatacaggaacatcggagacctattcactcccacacactctgctatagtttgcgtgcttttgtggacacccctcatgaacaggctggcgctctaggacgctctgtgttcactgatgatgaagaaacctagaactccaagcctgtttgtaaacacactaaacacagtggcctagatagaaactgtatcgtagtttaaaatctgcctcgcgggatgttactaaactcgctaatagtttaaaggttacttacaatagagcaagttggacaattttgtggtgttggggaaatgttagggcaaggcctagaggttcattttgaatcttggtttgtgactctagggtagttagaaactttctacttaaagtacctttaaaatagtccattttctatgtttagcataatctgaaactgtacatggaaaataaagtttaaaaccagnnnnnnnnnnncaaaacctcgaggcatccatgcccggggcggaaaaatagcatttgttatgcccctagccctatcctgtctcctgacccccctttctagcaaacagtatcagacactgacgcccccccataaaccgctccacaccatttcctaaccacgcaccataccccggatctcaagaatacctcgctcacccccccagctaaataacccccagcaaacgctcgcattccttctcctctccacactgtatactaaaactcctcccacacccctccttcctctcccacaacggtaatcatcatcacccagnnccccacggnnnnncngcccctatttatcattctcgcccacctccattgcagcgtagatcacatcggctccccgccacatacacctatttctgctatatcgcaatcaaaaactgagatccccgccg

SEQ ID NO: 352339 - DNA, 476 bp, Homo Sapiens
  misc_feature (27)..(27): n is a, c, g, or t
  misc_feature (67)..(67): n is a, c, g, or t
  misc_feature (82)..(82): n is a, c, g, or t
  misc_feature (88)..(88): n is a, c, g, or t
  misc_feature (97)..(97): n is a, c, g, or t
  misc_feature (258)..(258): n is a, c, g, or t
  misc_feature (321)..(321): n is a, c, g, or t
  misc_feature (396)..(396): n is a, c, g, or t
aaaccgtggtgaaagcgggcctgaaanggaccccaaggaatttccccggccgggttgccccccaacngtacaaacattcagngccccnacaccccancggggcccattaagccttttggagaacatggagagatgccctcctccccggctgtatgaacatgccatttgggaagttggaaagaaatgacaaaatcagggagaaaacatcccaagcttccttacctgtagatagaatcagccctcacttggtgcttattnccagttattcaagaacaataacaacaacaaaattagtagacatccaagaagcacatattaggnccaaagatagcatcaactgtatttgaaggaactgtagtttgcgcattttatgacatttttataaagtactgtaantctttcattgaggggctatgtgatggagacagactaactcattttgttatttgcattaaaattattttgggtctctgttc

SEQ ID NO: 352340 - DNA, 1038 bp, Homo Sapiens
  misc_feature (49)..(49): n is a, c, g, or t
  misc_feature (742)..(742): n is a, c, g, or t
  misc_feature (863)..(863): n is a, c, g, or t
  misc_feature (936)..(936): n is a, c, g, or t
  misc_feature (948)..(948): n is a, c, g, or t
  misc_feature (952)..(952): n is a, c, g, or t
  misc_feature (955)..(955): n is a, c, g, or t
  misc_feature (973)..(973): n is a, c, g, or t
  misc_feature (979)..(979): n is a, c, g, or t
  misc_feature (990)..(990): n is a, c, g, or t
  misc_feature (994)..(995): n is a, c, g, or t
  misc_feature (1000)..(1000): n is a, c, g, or t
  misc_feature (1006)..(1006): n is a, c, g, or t
  misc_feature (1011)..(1011): n is a, c, g, or t
  misc_feature (1016)..(1016): n is a, c, g, or t
gggatgggccggcggcgggctgcgggcgcggccggacgggagttccccnggagaaggatcctgcagcccgagtcccgtcctcaggcttccccaatccaggggactcggcgccgggacgctgctatggacgacattttcactcagtgccgggagggcaacgcagtcgccgttcgcctgtggctggacaacacggagaacgacctcaaccagggctattgcagtacaaggcagacatcaatgcagtgaatgaacacgggaatgtgcccctgcactatgcctgtttttggggccaagatcaagtggcagaggacctggtggcaaatggggcccttgtcagcatctgtaacaagtatggagagatgcctgtggacaaagccaaggcacccctgagagagcttctccgagagcgggcagagaagatgggccagaatctcaaccgtattccatacaaggacacattctggaagggggaccacccgcactcggccccgaaaatggaaaccctgaacaaacactctggcattgacttcaaacagcttaacttccctgacgaagctcaaccgagaatcacttctggagagctatggaaggggccgctggcagggcaatgacattgtcgtgaaggtgctgaagggtccacactggagtacaagggaagaacagggacttcaatgaagagtgtccccggctcaggattttctccgcatccaaatgtgctcccagtgctaggtgcctgccagtntccacctgctcctcatcctactctcatcacacactggatgccgtatggatccctctacaatgtactacatgaaggcaccaatttcgtcgtggaccagagccaggctgtgaagtttgctttngacatggcaaggggcatggccttcctacacacactagagcccctcatcccacgacatgcactcaatagccgtngtgtaatgattnatgnagncatgactgcccgaattancatggntgaagttaagntctnntttcnatgtcnttgtngcatntttgccctgcctgggtagcccc

SEQ ID NO: 352341 - DNA, 1030 bp, Homo Sapiens
  misc_feature (17)..(17): n is a, c, g, or t
  misc_feature (27)..(27): n is a, c, g, or t
  misc_feature (32)..(32): n is a, c, g, or t
  misc_feature (34)..(34): n is a, c, g, or t
  misc_feature (58)..(58): n is a, c, g, or t
  misc_feature (899)..(935): n is a, c, g, or t
cctgagccgggacactntcattgaagnccctntnttccttgtactccagtctcgaccntcagcaccttcacgacaatgtcattgccctgccagcgcccttccatagctctccagagtgattctcgttgagcttcgtcaggaagttaagctgtttgaagtcaatgccagagtgtttgttcagggttccatttcggggccgagtgcgggtggtccccttccagaatgtgtccttgtatggaatacggttgagattctggcccatcttctctgcccgctctcggagaagctctctcaggggtgccttggctttgtccacaggcatctctccgtacttgttacagatgctgacaagggccccatttgccaccaggtcctctgccacttgatcttggccccaaaaacaggcatagtgcaggggcacattcccatgttcattcactgcattgatgtctgccttgtactgcaatagcttctgtacaatatcacggtgtccatgactggctgccagatgcaggggggtgtcatccccacggttcattacattgatccgtgccccccgcatgatcaacatctcaaccacagcagagcggccctctcggcaggcccagtgcaagggggagaagccatgatcgtccccctggttgaggtcgttctccgtgttgtccagccacaggcgaacggcgactgcgttgccctcccggcactgagtgaaaatgtcgtccatagcagcgtcccggcgccgagtccctggattggggaagcctgaggactgtggagtgatccagggaaggaggatgaaccccaagctttatcctcgggactcgggctgcaggatccttctccggggaactcccgtccccgctctcgacgaattcgagctcggccgatttggcctgatnnnnnnnnnnnnnnnnnnnnnnnnnnnnnnnnnnnnncggccgccaccgcggtgagcctccaggtcgccctatagtgatgtagtacattcggggggcgcgtgggcggagtgtgagcgggtggtgaggatgcg

SEQ ID NO: 352342 - DNA, 859 bp, Homo Sapiens
ctggtaccggtccggagttccgggatatcgtcgaccacgcgtacggcgagaggacccgcgccccctgtcacccctcacttctcctgagtcccaatcctcaggcttccccaatccaggtgactcggcgccgggacgctgctatggacgacattttcactcagtgccgggagggcaacgcagtcgccgttcgcctgtggctggacaacacggagaacgacctcaaccaggctattgcagtacaaggcagacatcaatgcagtgaatgaacatgggaatgtgcccctgcactatgcctgtttttggggccaagatcaagtggcagaggacctggtggcaaatggggcccttgtcagcatctgtaacaagtatggagagatgcctgtggacaaagccaaggcacccctgagagagcttctccgagagcgggcagagaagatgggccagaatctcaaccgtattccatacaaggacacattctggaaggggaccacccgcactcggccccgaaatggaaccctgaacaaacactctggcattgacttcaaacagcttaacttcctgacgaagctcaacgagaatcactctggagaagctatggaagggccgctggcagggcaatgacattgtcgtgaaggtgctgaaggttcgagactggagtacaaggacagagcagggacttcaatgacgagtgtcccggctcaggattttctcgcatccaaagtgtgctcccagtgctaggtgcctgccagtctccaacctgctccctaatcctactctcattcacaaactggattgccatatgggatccctcttaaaatgtacttacatgaacggcgccaattccgcggaggaacaagac

SEQ ID NO: 352343 - DNA, 885 bp, Homo Sapiens
ctgggagcacattgtggatgcgagaaaatcctgagccgggaacactcttcaagtgaagtccactgctctttccttgtactccagtctcgaaccttcagcacccttcacgacaatgtcattgccctgccagcggcccttccatagctctccagagtgattctcgttgagcttcgtcaggaagttaagctgtttgaagtcaatgccagagtgtttgttcagggttccatttcggggccgagtgcgggtggtccccttccagaatgtgtccttgtatggaatacggttgagattctggcccatcttctctgcccgctctcggagaagctctctcaggggtgccttggctttgtccacaggcatctctccatacttgttacagatgctgacaagggccccatttgccaccaggtcctctgccacttgatcttggccccaaaaacaggcatagtgcaggggcacattcccgtgttcattcactgcattgatgtctgccttgtactgcaatagcttctgtacaatatcacggtgtccatgactggctgccagatgcaggggggtgtcatccccacggttcattacattgatccgtgccccccgcatgatcaacatctcaaccacagcagagcggccctctcggcaggcccagtgcaagggggagaagccatgatcgtccccctggttgaggtcgttctccgtgttgtccagccacaggcgaacggcgactgcgttgccctcccggcactgagtgaaaatgtcgtccatagcagcgtcccggcgccgagtcccctggattggggaagcctgaggacgggactcgggctgcaggatccttctccggggaactcccgtccggccgcgcccgcagcccgccgccggccccccgct

SEQ ID NO: 352344 - DNA, 958 bp, Homo Sapiens
cgagtccgaggataagcttggggttcatcctccttccctggatcactccacagtcctcaggcttccccaatccagggactcggcgccgggacgctgctatggacgacattttcactcagtgccgggagggcaacgcagtcgccgttcgcctgtggctggacaacacggagaacgacctcaaccaggggacgatcatggcttctcccccttgcactgggcctgccgagagggccgctctgctgtggttgagatgttgatcatgcggggggcacggatcaatgtaatgaaccgtggggatgacacccccctgcatctggcagccagtcatggacaccgtgatattgtacagaagctattgcagtacaaggcagacatcaatgcagtgaatgaacacgggaatgtgcccctgcactatgcctgtttttggggccaagatcaagtggcagaggacctggtggcaaatggggcccttgtcagcatctgtaacaagtatggagagatgcctgtggacaaagccaaggcacccctgagagagcttctccgagagcgggcagagaagatgggccagaatctcaaccgtattccatacaaggacacattctggaagggggaccacccgcactcggccccgaaatggaaccctgaacaaacactctggcattgacttcaaacagcttaaactccctgacgaagctcaacgagaatcactctggaaaagctatggaagggcccgctggcagggcaatgacattgtcggtgaaggtgctgaaaggttcgagaactggagtaccaccgaacgagcaggggactttcaattgaagaagttgttcccccgctcaaggagtttctcgcaatcccaaatggtgctcccagtgcctagtggctgcagtctccaactgggtctcatactaatcttattcacactggaggccgatggatccctttcaaaggtctcccg

SEQ ID NO: 352345 - DNA, 1494 bp, Homo Sapiens
acaggcactgtaacatacagtagaaagcatgtgtgctcttcccccttttcccatgccctgacaccagtatctcatttggaactgactgtactttctgcctcttctttttgtctggccatggggtccagctattgcagtacaaggcagacatcaatgcagtgaatgaacacgggaatgtgcccctgcactatgcctgtttttggggccaagatcaagtggcagaggacctggtggcaaatggggcccttgtcagcatctgtaacaagtatggagagatgcctgtggacaaagccaaggcacccctgagagagcttctccgagagcgggcagagaagatgggccagaatctcaaccgtattccatacaaggacacattctggaaggggaccacccgcactcggccccgaaatggaaccctgaacaaacactctggcattgacttcaaacagcttaacttcctgacgaagctcaacgagaatcactctggagagctatggaagggccgctggcagggcaatgacattgtcgtgaaggtgctgaaggttcgagactggagtacaaggaagagcagggacttcaatgaagagtgtccccggctcaggattttctcgcatccaaatgtgctcccagtgctaggtgcctgccagtctccacctgctcctcatcctactctcatcacacactggatgccgtatggatccctctacaatgtactacatgaaggcaccaatttcgtcgtggaccagagccaggctgtgaagtttgctttggacatggcaaggggcatggccttcctacacacactagagcccctcatcccacgacatgcactcaatagccgtagtgtaatgattgatgaggacatgactgcccgaattagcatggctgatgtcaagttctctttccaatgtcctggtcgcatgtatgcacctgcctgggtagcccccgaagctctgcagaagaagcctgaagacacaaacagacgctcagcagacatgtggagttttgcagtgcttctgtgggaactggtgacacgggaggtaccctttgctgacctctccaatatggagattggaatgaaggtggcattggaaggccttcggcctaccatcccaccaggtatttcccctcatgtgtgtaagctcatgaagatctgcatgaatgaagaccctgcaaagcgacccaaatttgacatgattgtgcctatccttgagaagatgcaggacaagtaggactggaaggtccttgcctgaactccagaggtgtcgggacatggttgggggaatgcacctccccaaagcagcaggcctctggttgcctcccccgcctccagtcatggtactaccccagccatggggtccatccccttcccccatccctaccactgtggccccaagaggggcgggctcagagctttgtcacttgccacatggtgtctcccaacatgggagggatcagccccgcctgtcacaataaagtttattatgaaaaaaa

SEQ ID NO: 352346 - DNA, 946 bp, Homo Sapiens
gaggaaaagcttggggttcatcctccttccctggatcactccacagtcctcaggcttccccaatccaggggactcggcgccgggacgctgctatggacgacattttcactcagtgccgggagggcaacgcagtcgccgttcgcctgtggctggacaacacggagaacgacctcaaccagggggacgatcatggcttctcccccttgcactgggcctgccgagagggccgctctgctgtggttgagatgttgatcatgcggggggcacggatcaatgtaatgaaccgtggggatgacacccccctgcatctggcagccagtcatggacaccgtgatattgtacagaagctattgcagtacaaggcagtacatcaatgcagtgaatgaacacgggaatgtgcccctgcactatgcctgtttttggggccaagatcaagtggcagaggacctggtggcaaatggggcccttgtcagcatctgtaacaagtatggagagatgcctgtggacaaagccaaggcacccctgagagagcttctccgagagcgggcagagaagatgggccagaatctcaaccgtattccatacaaggacacatttctggaaagggacccacccgcactcggcccccgaaatggaacccctgaacaaacactctgggcattgacttcaaacagctttaacttccctgacgaagctcaacgagaatcactctgggagagctatggaaagggcccctgggcagggcaaatgacatttgtccgtgaagggggctgaaaagtttcaaaaactggattaccaggggaagaagccggggactttcaattgaaagaattgtcccccgggcttcagggaattttccccccccatcccaaatggtgccctccccactgtgctaaggggggcccgggcacatttcttcccaccctgggttccctccattccaaat

SEQ ID NO: 352347 - DNA, 351 bp, Homo Sapiens
gccatgagggtcagtcacaggcactgtaacatacagtagaaagcatgtgtgctcttcccccttttcccatgccctgacaccagtatctcatttggaactgactgtactttctgcctcttctttttgtctggccatggggtccagctattgcagtacaaggcagacatcaatgcagtgaatgaacacgggaatgtgcccctgcactatgcctgtttttggggccaagatcaagtggcagaggtgagtactcagcccttaattcctgagatgggtaggaagtaaagtctgagccttggtgggagattttggaaccctcaacccattctgtcagtactactgtgtgacacttac

SEQ ID NO: 352348 - DNA, 2351 bp, Homo Sapiens
ttttttttgaactttaaaactactatattatacaatagtaaagcagcagagtatcttacttttatataattatataaaaacttatttttatattgttacattgtgaatcacattacaatttagtctccttttcaatagaaagattttctaaggacatgatttggagccgtccacatttatcagatgccttttcattaattttttccatttttgcaattcttgatccaaactgcatggcccgtttgggcagaagagcagaggctgtaagaccaagttccacagctgcaaggcgtaaaagtaatttttcaccaattcctcggggtaaagtcaagtttgctttttcccaaatcggcagagaatttagaaaggagacaacattttcatccaggaaaggaaatcttgcttcttttccatgatcaccaataactctgtcatcacgaccaagatttctagaagaaattcgacccagttccatcattatttccttattcaatccttccagcccatgcgactgaaagcggacacgatgacgagaataacctgcaagttgctcatctgcaccaattccagtgagaactacctttgcattgctctgataggatttcactccttcctgggccactaaccaaccaattcctctagaagcaaaccagactgcacagccaatgctatcatccaaaactgtatccaatggccgaattaagtgacatattcgagttcttcttaatttctgcagttcttccatagaaacattaatttcaacaaaattccaaattcgggaagggctaacagcttgtagttcctttagtcccgcccttcctgtgattcgatctggtacactgacatgtttattaggactgtcagcagcagcagcagcaacatctttagagaattcttctgaaggtatttcacatttatttttctgtttattcccttctctgttaaaggtagttggcatggtcttttcttcagctatgaaagctacattaagaaggacgagtggttcatctaaaggaatatgacgggcagcaagggttgcaataaccatggaatcaatgcccccagaaaacaggattgcaacatttgctttcccatcacacgttttcaaaacttcatttgctgtcaggttttcatccctaggtaaacacaagacacgtttcttgactgctacactcaggacatcaatgaactgctgaattacttccttcatgtgtacatcagtaagaaagacttgaagtatctctcttgtaggtggcacattggaaatattactgcaatgagtctccaatgcagcttgtggcaacatcatatttaaaggaacaacaggtttttcaagatacagtttggcttcatttgctaccactgatacaaatgctggtaagtctgctgaaatttgactcaggctattaacattttcttcaataatattctccctagaaatatatttccaaggatacagttgtaaaataatgcatctggaaatgacagtagacttaagatcaattctgaaaagtccagatgctggaacttcttgccactgatttgccaatccagatgtttgggtgccaactgaagagaggcagaaactcttgcccaaattactaaaatgccaaagcaagctacggcgaccaaaaaaatccctaccaaaccataaataatgactagatgcttgataatatataaatgaccagggaccttgtacttctgagaagagtgacaaaatctcagattcattcttacaggaggaaagataattaaacaaaatttgagtgtcattctcttcagcttcaacctttattccactaaaaatttctccattccatagaaacacattgcctctttcatcttccacaggctgggtagtcaaaacacccctcaagtgtaggacgtgagcagaaaataaacactggtagttaacatcagactttaacaattgtttactactattgggtccccgctgtttaagattatatagtaagtcctcttttaaatcttgactgaaatgctcagcagaaaagtttacagaacaacaaatgccacacattgttatgtgaaatcaggttgactatttcttgattttggtcttgtctaagttttctatttcttggtattcttttttcagttcatccaatatattcttgctctcagacagcatttctgttcggtcctattcttcttaaggttagaaagttcatccaccacaattttttgttctttaatcttgctgcttagatcctccttgtgtggggtcgaattgtcggtggggatcagcacagagctgtcctctggtcgcgtccctcggctgggcatttccaccgagcgcaagacacgcaggatggctcagccctccc

SEQ ID NO: 352349 - DNA, 1179 bp, Homo Sapiens
  misc_feature (42)..(78): n is a, c, g, or t
ggataatcatataggcgaatggagctcacgcggggcggccgnnnnnnnnnnnnnnnnnnnnnnnnnnnnnnnnnnnnnatcaggccaaatcggccggagctcgaattcgtcgagagcggatgcgctgtggctaatgccgtaggctctttcagggctgagccatcctgcgtgtcttgcgctcggtggaaatgcccagccgagggacgcgaccagaggacagctctgtgctgatccccaccgacaattcgaccccacacaaggaggatctaagcagcaagattaaagaacaaaaaattgtggtggatgaactttctaaccttaagaagaataggaaagtatataggcaacaacagaacagcaatatattctttcttgcagaccgaacagaaatgctgtctgagagcaagaatatattggatgaactgaaaaaagaataccaagaaatagaaaacttagacaagaccaaaatcaagaaatagtcaacctgatttcacataacaatgtgtggcatttgttgttctgtaaacttttctgctgagcatttcagtcaagatttaaaagaggacttactatataatcttaaacagcggggacccaatagtagtaaacaattgttaaagtctgatgttaactaccagtgtttattttctgctcacgtcctacacttgaggggtgttttgactacccagcctgtggaagatgaaagaggcaatgtgtttctatggaatggagaaatttttagtggaataaaggttgaagctgaagagaatgacactcaaattttgtttaattatctttcctcctgtaagaatgaatctgagattttgtcactcttctcagaagtacaaggtccctggtcattcatatattatcaagcatctagtcattatttatggtttggtagggattttttttggtcgccgtagcttgctttggcattttagtaatttgggcaagagtttctgcctctcttcagttggcacccaaacatctggattggcaaatcagtgggcaagaagttccagccatctgggatttttccagaattgatcttaagtcctaactgtcattttcccagatgccataatttttacaactggaatccctggggaaattataatttcctaaggggagaataatttaattggaaggaaaaaatggttaaattaaaccctggat

SEQ ID NO: 352350 - DNA, 1521 bp, Homo Sapiens
  misc_feature (974)..(1109): n is a, c, g, or t
  misc_feature (1121)..(1191): n is a, c, g, or t
  misc_feature (1224)..(1279): n is a, c, g, or t
  misc_feature (1303)..(1352): n is a, c, g, or t
ggtttgggcggtgcccggcggggccggcggcggcgcaccccaagaaagcagctggtaccggtccggaattcccgggaaggcgattcatagctcgcggggtacgggcgcgcgtgcgcactccgcagcccgttcaggaccccggcgcgggcagggcgcccacgagctggctggctgcttgcacccacatccttctttctctgggacctggggtcgcggttacttgggctggccggcgaacccttgagtggcctggcggggagcgggcctcgcgcgcctggagggccctgtggaacgaagagaggcacacagcatggcagaaaaccgagagccccgcggtgctgtggaggctgaactggatccagtggaatacacccttaggaaaaggcttcccagccgcctgccccggagacccaatgacatttatgtcaacatgaagacggactttaaggcccagctggcccgctgccagaagctgctggacggaggggcccggggtcagaacgcgtgctctgagatctacattcacggcttgggcctggccatcaaccgcgccatcaacatcgcgctgcagctgcaggcgggcagcttcgggtccttgcaggtggctgccaatacctccaccgtggagcttgttgatgagctggagccagagaccgacacacgggagccactgactcggatccgcaacaactcagccatccacatccgagtcttcagggtcacacccaagtaattgaaaagacactcctccacttatcccctccgtgatatggctcttcgcatgctgagtactggacctcggaccagagccatgtaagaaaaggcctgttccctggaagcccaaaggactctgcattgagggtgggggtaattgtctcttggtgggcccagttagtgggccttcctgagtgtgtgtatgcggtctgtaactattgccatataaataaaaaatcctgttgcactagtaaaaaaannnnnnnnnnnnnnnnnnnnnnnnnnnnnnnnnnnnnnnnnnnnnnnnnnnnnnnnnnnnnnnnnnnnnnnnnnnnnnnnnnnnnnnnnnnnnnnnnnnnnnnnnnnnnnnnnnnnnnnnnnnnnnnnnnnnnnnnaaaaattggggnnnnnnnnnnnnnnnnnnnnnnnnnnnnnnnnnnnnnnnnnnnnnnnnnnnnnnnnnnnnnnnnnnnnnnnggggcaataatttttcccaaagaaacacccggnnnnnnnnnnnnnnnnnnnnnnnnnnnnnnnnnnnnnnnnnnnnnnnnnnnnnnnngaaggtttttaaaacaaaacccgnnnnnnnnnnnnnnnnnnnnnnnnnnnnnnnnnnnnnnnnnnnnnnnnnncccaacggggggcctttttattaaaaaaattagcccccccgccccgtgtgggctttttttggagagaggcggggggggaaatattctaaaaaaacaactccccccccgccggggtgggagccctccctccacaaccgggggtggtggaacaccccttgaatcccgccgc

SEQ ID NO: 352351 - DNA, 1304 bp, Homo Sapiens
  misc_feature (591)..(591): n is a, c, g, or t
  misc_feature (688)..(717): n is a, c, g, or t
gcggccgcagcggcctctcagggatgctgaccagggtcaggacggtggtgacgctcagggtgaccgcagtgaagaggtaaatgactcggagctgtccccccagggccctcccgaagcccgttttatcccagtggattccgccgaccacgtatccaaagcctcctccgagacctgccaggagggcgtggatgttcaggcctcggtcctggtctgcggggctgcacacgtccatcatgtaggcgtggctggggttgtccgccgagtcggcgctaaagtccatcagcaccacaccgcacacggtcagcagcaggccccacttgtggttcccggtcacgtcagccagggcgatgccaatgtcccggccattcagcaagagcgagaggcccagcagtgcccctatagccaggacaagaatgaaagggcgtctccttccaaaccttgaggtacaccggtcactccaagcacccaacagaggctgcagtaggaatccgaggatggggctgatgaaccacaccaggctgtagagctggtcgggcaggcccatctgcaggagcaccggggtcacgtacgccgtctccatggcgtagctgnaactcgatgccaaagagaatgcagccgtggaaaagcagctcccggaaggacctctgggggtgcaggtccccgaagtccaccagctcaagcgggcacnnnnnnnnnnnnnnnnnnnnnnnnnnnnnncgaatgcacttcctcctcttggggtgtcgtttgaagttgttggcccggtgactgaggtgtcgtgtcacggaccccgagtagcccgtgacctgggacctccagaagtcctgtggggccacgctggggaagagggcatctcccggcggggtgctgctggctgcggggatcatcgtggggagggctggtgggcgtccctgtgggtggagacggcaggcatccctgtccccgctgggctgctgcctgcccggccgcggtcccggctgctgcagcatcacccggggcggggcgctgacgtcacggccgcagcctccgcatccgcgcggggcccggagccttaaagcggcgccgcgtctggggccccgcgggcgggaggggagcccggtgtcctcctgggcccttcccgcgggaggcccgtcccggtgcttcgcgcacgacggcgcggtctgcaggatctgccaggatcccggaggaaaacgtccccccggcctcacagttctcaccgttttcttctgattttaaaagaaataaatacattttcgtgtcttcatgtataaaatcccagggaattccggaccccggtaccagcc

SEQ ID NO: 352352 - DNA, 1526 bp, Homo Sapiens
  misc_feature (146)..(164): n is a, c, g, or t
  misc_feature (374)..(383): n is a, c, g, or t
  misc_feature (1311)..(1311): n is a, c, g, or t
  misc_feature (1384)..(1384): n is a, c, g, or t
ctcgtgccgttaagatctaaattacatcaggacaaagagacagactattaactccacagttaattaaggacgtatgttccatgtttatttgttaaagcagtgtgaatagccttcaagcatgtgaataatcttccatcttccccgcnnnnnnnnnnnnnnnnnnntttttgtttctttcaggtagacaccttttaaaatgcagaactaactgaggcatttcagtaactttgctttcaaatcaataaagtcaaatgtatggaaacattttgtgccctactctccataccccgtgtactcaaattctctactgaatgaattatgctttaagtagaattcagtgccaaggagaacttggtgaaataaattattttaannnnnnnnnnatcctttacaaagccatggattttatttggttgatgtgtgctctgtacacaagccatttcaataggatggagctgttaattattttccaaagagtaatagacatgcaaaagtttcaataaaaactgggccattaacaaataaattaataaactaataagcattcccttctaggtttttgccaaactgcctatccaataacaaatttgagaatcgttgaaaaagctagctatatttcagagaaatgattttcattaatgaaactggtctccctagcaggccattttccctttttcctggggagtttagcaagtttaggagagaatagtcatgaaaagaaagggaagaaaggggagaagggaagaggttaaaaagtaagtgcttcagacctatggaacgtaatccctttactacaaatatttaagagcagctcagcttggttgaaactgagttttgtcatcttccatatttgcaggaaggtattttctgacttgcaatgcagctagatgtaaaattttattttatcatactagaaagccttgactagaaaaatgaataaatattgagggtttcctgtccatatctggcttgcatgtgccagaaagcagagaatagaaaatgtaatctccaacatccaagcatcgaaacccaaggggtaggcaattctatgtaggttttggacatgaagtttggtgcatcttggtttatgctggctcaactgctattaaacctctctggcttatagtctcttcattctattagacaagcacgtatcgaacacttgcttcgcacaaggctctttagttaacaatttagcagctactgtttgtgttaaacacacttttcaccaaataggttctgaggcaaacgagagcaatgactatttaaagaaaggctttcccagcatcacttacacatcccaaaactaanaagatcaactcttccaactgagaacaacaacgacaacaaccaacatttggaatattattctcaactcacgttntaataatacatcttattacttttctagtagagaaactatcaatcaggctcttcaacacttatatacaggttaataaagccttttgcaagttactcggtctctcacccgagggaatttttttcttccacacttgccctcgtct

SEQ ID NO: 352353 - DNA, 1830 bp, Homo Sapiens
  misc_feature (1209)..(1426): n is a, c, g, or t
  misc_feature (1531)..(1539): n is a, c, g, or t
ggcttgcaatgcagctagatgtaaaattttattttatcatcctagaaagccttgactagaaaaatgaataaatattgagggtttcctgtccatatctggcttgcatgtgccagaaagcagagaatagaaaatgtaatctccaacatccaagcatcgaaacccaaggggtaggcaattctatgtaggttttggacatgaagtttggtgcatcttggtttatgctggctcaactgctattaaacctctctggcttatagtctcttcattctattagacaagcacgtatcgaacacttgcttcgcacaaggctctttagttaacaatttagcagctactgtttgtgttaaacacacttttcaccaaataggttctgaggcaaacgagagcaatgactatttaaaggaaaggctttcccagcatcacttacacatcccaaaactaaaaagatcaactcttccaactgagaaaagactcctggctttgaatggaaacttacagcagagagtcacaggccacggcaacaacaacgacaacaacaaacatttggaatattattctcaactcacgttttaataatacatcttattatttttctagtagagaaactacaaatcagcctcttcaacatttatatacagtttaataagcctcttgcaagttacttgttctctcacctgaggtatttttttcctccccaccttgcccctgttcctcccttcctcttctccctttgcaagaggaaatatttaacatatttgggtccaacttcaataatgtaataattaatacattaaaagcatttaacttcctttctagaaaaatgcacaggctaaggcatagacaaaacaaagagaaatgctgagaaatttgccactggagacaagcaatctgaataaatatttgccaaaagttctttttatgtcatatagtgtcaggatttgaaggagctattttttttaatgttgcaactagcaactcatcttcggaagacacagccaggagaatgaagtagaagtgaaaggtttataaatccatttgtaagcatttatcccatatattttaaattcaagaaaaattgtgtttatctttagaattttgtattcaatactttatgtactatgtgactcatgcttctggataaataaagcaccaaatatgtatctgtaaccacaatcacacatattatattaaatatatatctatataacnnnnnnnnnnnnnnnnnnnnnnnnnnnnnnnnnnnnnnnnnnnnnnnnnnnnnnnnnnnnnnnnnnnnnnnnnnnnnnnnnnnnnnnnnnnnnnnnnnnnnnnnnnnnnnnnnnnnnnnnnnnnnnnnnnnnnnnnnnnnnnnnnnnnnnnnnnnnnnnnnnnnnnnnnnnnnnnnnnnnnnnnnnnnnnnnnnnnnnnnnnnnnnnnnnnnnnnnnncacccggtcggggccgccgccccctaaaaagatacaccaataacaaacctgcggtcctaaaaagaaacccgtgaaaagcaactctggctggataccttcaaaccnnnnnnnnncccgcgggggaacgcaaccactcatacgcgacaaccccccgggaggggccaaagttccttaactatagaccaccccaccaaggagagccctgaaccaaaccccgaatttataatccggtccaccccccccggcctaaacctattactaagggaaagatgtatcaacacttattacacacccgccgccatcaacacaacactattccataaagagagactgttgaaaatactccccccacgaccaggatcgtcctacccaaccaatttgtgcacccaaattaaatatatttt

SEQ ID NO: 352354 - DNA, 689 bp, Homo Sapiens
  misc_feature (102)..(123): n is a, c, g, or t
cggcacgaggaagacaagtatcaacaccactggcatcatttccaaactgatcttatgttgaataatttccaccacattgaagtacctttcgactctatccannnnnnnnnnnnnnnnnnnnnnaattcatcaagcctttcgttttcaaaccaccatttgtcagccttgaggtagagagacatatagatttgaaaatactttcttaagagatcatgtaactatataactctgaatttaaaaattgaggggggagggataatttcaacccactgcctcttaccagaaacatttttttaaatctgtaactgctttagtgttaacagggtgcaaggtggtttttgtcccgtattgttcttaaaaggttctcatttattgtgattgtattgtactgtatgagaacaaatcataaattgccttgtattgtttataatagaccataccacgtactacttcagtttttatgttccaagtttttcagtgatgcatgttaacagttaggtcctaaaattctgtggtgctaattctcccatacccaatggtgcttttgtggatgctaactgcacacatgctgaacaaagcttgaagtttaaaactttcctcccttcctctgtttatatgaagtaaaatgaaataacttgaatttgtctcaaagtatcactgacaatctaataaacttgtttatatgtgtg

SEQ ID NO: 352355 - DNA, 458 bp, Homo Sapiens
tgagctgaaggagtgggaaactttgcccaagcaatggcacgggcagcgggctctttctggcgccctgtgctggagcagggccaagtcttagggcatcacaaacagcccatttgatggagggagcagggacatagcacatttttgtctgtctttgtgaggctgctttgctaactctctgaggagaggaagcctctcgggctttccgtcggctggggctagtgccagagaatcccttctcagtggccagcaggttcctgggaggccggcacaaggcaccgctccccactcatgacaccttggtgcagagtgacctcctgcccagtcaccactccggccagccccagccaaacacacaaaagcccatggttgcggttgcatctacaccgttagttggcaaaggatcctgcttgagctctgcgtggtggccaaggagtagcatggaggagggccctgatttt

SEQ ID NO: 352356 - DNA, 983 bp, Homo Sapiens
tcggctctgcctgtctcagatctctatgtgactagcagcactggcgaggccttgcgtaataaagctgaaacagggaatcgtgcggctggaatggtatctcggtgggtagcaccagcaattatcatgaaaccttagaaccactgaacgagtggcttacaaccatagaaaagaggctggtgaattgtgaacccataggaacccaagcatctaaacttgaggaacaaatagcacagcacaaagccttagaagatgacatcatcaatcacaataaacatttacaccaggctgttagcattggccagtccttaaaggttttgagctccagggaggataaagatatggtgcagagtaaattagacttctctcaagtatggtacattgagattcaagagaaaagtcacagcaagtctgagctcctccagcaggccttatgtaatgctaagaatttaggggaagatgaagttgaactgatgaactggctgaatgaagtgcatgacaaactgagcaagctctcagtccaggattacagcactgaggggctatggaagcagcagtctgaactacgggttctgcaagaggacatcttactcaggaaacaaaatgtagatcaggctttactaaatggtttagaactacttaaacaaaccacaggtgatgaagttttaataattcaagataaattggaagccattaaagcaaggtacaaagacattactaaactgagcactgatgtggccaagactctggaacaggcgctgcagcttgcaaggcggctgcactccacacacgaagagctgtgtacctggctggacaaagtggaggtggaattactttcatatgaaactcaggttctgaaaggagaagaagcaagtcaagcacaaatgagaccaaaggaactgaaaaaggaagctaagaacaacaaagccttactggactcccttaatgaagtgagcagtgctttgctggaactggtaccatggagc

SEQ ID NO: 352357 - DNA, 1514 bp, Homo Sapiens
  misc_feature (446)..(511): n is a, c, g, or t
  misc_feature (1329)..(1329): n is a, c, g, or t
  misc_feature (1333)..(1333): n is a, c, g, or t
  misc_feature (1351)..(1351): n is a, c, g, or t
  misc_feature (1423)..(1423): n is a, c, g, or t
  misc_feature (1463)..(1463): n is a, c, g, or t
cacctgacaatgagtgagttcacattgtggaagcccagggatttctggtgaggaggaagagccctggagctgcggcatcttgggggcctctcaagaaaccaaggttcctgaccagactgcttagaggagaaagattcagccctcgactcaagagaggagggcaggcgtcagcagcttttcctggcaatgtggagaagcagcaagagggcagagggcgaggaagacttcacagcaagtcccctccacccagggtcaccaggtgcaccgagaggtctcagcctacagaaaggttttttgctcgttgcttcttaaccactaatgatggcataaaggtcttccggtgggggcggcactgaggcctttcagggaggtccctggactcgatcctgtggaatgaaaagaagacattaggctagaagggggaaataaaactaacaatggccctnnnnnnnnnnnnnnnnnnnnnnnnnnnnnnnnnnnnnnnnnnnnnnnnnnnnnnnnnnnnnnnnnncgccggccggccccaaattatcccaaaaaggggcccacacggacaaaggaggccccctctccatgcccctacttgtcccgcctcttaccctctctccgtacatcttgaccgagcccctgtgaccttcgggtcttactatcttcgctagtggctgtcttttctccattctaactcactgggaattcttacggttgacggaaacatctcactcactcttgtctgctcttcactgtcatcgtaccacacttctcgactggcccttcacttgcgacagtccgtcccgcccgcctggttttgatccgtatttctctggcatgtgtcttatgttgttttgctcgcaactgctatcgattcgcgccctctcctctatcatctccatcctttttgccccgtcccgctccgataccccctctccctcccccttatcctctcatccgtacacgaccaccgttctccacctcccctcagcactggttataacctaccttctgcatcacccgcatactcaaaattgtacgagcgaacttccacccactctcttatactaacacgctctgtctctaccgcccctctacccccccgctaccatactagcgattatcgacactacagagccctcgcccacctctatcgcgctgcgtaccccactacctatctccctttcctcccgttgcaccacgccaccactcccctcatactccactcgagtctttctcacgaacatcaacatacatcactcatccatacacagttagcactctctcttatcgctctctcactcctcgtctatgacactacacactcgtctcactcatgcnctgntgatcgtattcacaactntcccgtaagacatagctcacacgctctcgcctcttcttgattgcaccttaccgacttctcactctgatctcntgtctgcacccctcaccaccgagtatatccgcacacctcncgcgccacctcaatacactcacatctcgcgcacacctgacgtgacatataa

SEQ ID NO: 352358 - DNA, 1519 bp, Homo Sapiens
  misc_feature (49)..(85): n is a, c, g, or t
cgaatgtatagactactatgggcgaatggagcttacgcggtggcggcgnnnnnnnnnnnnnnnnnnnnnnnnnnnnnnnnnnnnnatcaggccaaatcggccgagctcgaattcgtcgagagcgggggggccgcgcccagctgggtcgggacgcgctccctgagctgcccgagctccgcggggactcgggccgggatcctcgggcggctgcagcggccggggccggggccgggagctgggccatgatgggccggcggcgcgccttcgccgtggacggccgggatggggctggcgagggcctggcacggggctgcatagtgcctggagtcaccagcacctacagacggatccccgacgctgcccacgggtgctcatcctgggagagaggtgacaagttcagaggtgtcggcagggaggcactctttctcaaactggcctcccgggactcaggagtggagatggcagttggggacagccccctggccgccttaccgggcctttctcaggactccctggactttgaatcctcagggagttctgagccccccgcccaggtaggccgactcctggccagccagaagctgggggaggtgttggagcggtcccgccggctcccaacagctcccaccagcttgtcaggacaacaccgctccctgcggctggcaagcaagcctgagcgtgaagtgccccttggagcagggcaacaggagtccatggaggcagacacagacctagaggcaggcctggaagaagaggcggtggggggcctggggcctggagcctgggcctgcctccccgggcagggtcttcgctatctggaacacctgtgcctggtgctggagcagatggcaaggctccagcagctctacctgcagctgcggatccagaaggcccccaggggatcccggcgaagaggaagtcgacccgagcccctttaccgtccccgttacacaccccaggcaatcgggggcaggggccatgggagctgctaagccagacagagcacacaggagcaaaggctgcttcacccccaaaggtggaggtgcccagtgccaaccctcccaggctgccagaaaccccagtggagccaacgtaccacttgccatcctcccagggacacaaggatcgagtccagggacctccctgaaaggcctcagtgccgcccccaccggaagacctttatgccatcattagtggttaagaagcaacgagcaaaaaacctttctgtaggctgagacctctcggtgcacctggtgaccctgggtggaggggacttgctgtgaagtcttcctcgccctctgccctcttgctgcttctccacattgccaggaaaagctgctgacgcctgccctcctctcttgagtcgagggctgaatctttctcctctaagcagtctggtcaggaaccttggtttcttgagaggccccccagatgccgcagctccagggctcttcctcctcaacagaaatccctgggcttccacaatgtggaactcacttcattggtcagggtgtcccct

SEQ ID NO: 352359 - DNA, 1837 bp, Homo Sapiens
cctataaatcctaggtagcgaggcctgggtggcgaattcggcacgaggcggcagcgggagcggtggcgtctcctcgccttccctccctcccgggcctgggcgcccagccggacaggtgagcggcagccaggtatggcgttgacggtggatgtggccgggccagcgccctggggcttccgtatcacagggggcagggatttccacacgcccatcatggtgactaaggtggccgagcggggcaaagccaaggacgctgacctccggcctggagacataatcgtggccatcaacggggaaagcgcggagggcatgctgcatgccgaggcccagagcaagatccgccagagcccctcgcccctgcggctgcagctggaccggtctcaggctacgtctccagggcagaccaatggggacagctccttggaagtgctggcgactcgcttccagggctccgtgaggacatacactgagagtcagtcctccttaaggtcctcctactccagcccaacctccctcagcccgagggccggcagccccttctcaccaccaccctctagcagctccctcactggagaggcggccatcagccgcagcttccagagtctggcatgttccccgggcctcccccgctgctgaccgcctgtcctactcaggccgccctggaagccgacaggccggcctcggccgcgctggcgactcggcggtgctggtgctgccgccttccccgggccctcgttcctccaggcccagcatggactcggaagggggaagcctcctcctggacgaggactcggaagtcttcaagatgctgcaggaaaatcgcgagggacgggcggccccccgacagtccagctcctttcggctcttgcaggaagccctggaggctgaggagagaggtggcacgccagccttcttgcccagctcactgagcccccagtcctccctgcccgcctccagggccctggccacccctcccaagctccacacttgtgagaagtgcagtaccagcatcgcgaaccaggctgtgcgcatccaggagggccggtaccgccaccccggctgctacacctgtgccgactgtgggctgaacctgaagatgcgcgggcacttctgggtgggtgacgagctgtactgtgagaagcatgcccgccagcgctactccgcacctgccaccctcagctctcgggcctgagcccgccatgccctcagcctgcctcactgctgggccagggtcatgcctatataagttggcatggcagggacaatggtgggcagttgctcttacatgagctaagtttggagacctgaggcccctttgtcctcgctgggtgggccaaggtctgggacctgtcttggactgtgggagactcaccctcaccttgccaggcctctcccctgcaggactggcattgcactagtctgaggtggccactgcctttgatcaacctttgtgtgcgagggtctaagtagggtcgaacacagaagtgggaaggagaggggtgggccaggggctaatggtgtcactgtgtaaagtttttgacatactagctctataaatatatgaatatggacaaaattttaagatgaaacccagtcaacctgcatagcatctaaaagagggcgggccgcctccttaaaagtatccccttcgaggggggcccaaggcttatgcgcgtaccccggctttttcttgagacaagaggggggcgccccccaaagggaagtcgagatatattaaaaccttaaggcacctgggacccgcacctcttttaaaaaacttctcagtgagattgagcgaaaaacctgggctcatcgtatgggggataatattttgggg

SEQ ID NO: 352360 - DNA, 993 bp, Homo Sapiens
  misc_feature (802)..(802): n is a, c, g, or t
  misc_feature (866)..(866): n is a, c, g, or t
  misc_feature (942)..(942): n is a, c, g, or t
  misc_feature (977)..(977): n is a, c, g, or t
ttataaggtagcgaggcctgggtggcgaattcggcacgagggtgccaaccctcccaggctgccagaaaccccagtggagccaacgtaccacttgccatcctcccagggacacaagcgggatatctcccactgggacaaggtcaaggtcctgctcaaccggatctgccggagaagccaccaccaccctgagccccctgcccctcctgatggctctgaccccaggatcgagtccaggacctccctgaaaggcctcagtgccgcccccaccggaagacctttatgccatcattagtggttaagaagcaacgagcaaaaaacctttctgtaggctgagacctctcggtgcacctggtgaccctgggtggaggggacttgctgtgaagtcttcctcgccctctgccctcttgctgcttctccacattgccaggaaaagctgctgacgcctgccctcctctcttgagtcgagggctgaatctttctcctctaagcagtctggtcaggaaccttggtttcttgagaggcccccaagatgccgcagctccagggctcttcctcctcaccagaaatccctgggcttccacaatgtgaactcactcattgtcaggtgtccgtggagtgtttttggcatggtgacctgtctgggcccagcatgttgcagatgtgtatttatgcgcaatggtatgcatatctctgtgtgactgtcagtgttgcaagctggctggatccaaccatctcttctgaaataatgcatccaaagggttgatattctgggggaaggtcactgcagaaggatggaactganctttattccccagtgggcagttactgagctttcctcctcagagccatgctggcagccctgggancagagaacgtgtggctttggctgctctgcatggaatcttgcccggactcctgaagactcacaaggaatgggaagtnaggacaactggaacgaataatttcaaagcagtgtnagttggggggcgtaaa

SEQ ID NO: 352361 - DNA, 789 bp, Homo Sapiens
agcgggggctcggtcgcgctggcgactcggcggtgctggtgctgccgccttccccgggccctcgttcctccaggcccagcatggactcggaagggggaagcctcctcctggacgaggactcggaagtcttcaagatgctgcaggaaaatcgcgagggacgggcggccccccgacagtccagctcctttcggctcttgcaggaagccctggaggctgaggagagaggaaccaggctgtgcgcatccaggagggccggtaccgccaccccggctgctacacctgtgccgactgtgggctgaacctgaagatgcgcgggcacttctgggtgggtgacgagctgtactgtgagaagcatgcccgccagcgctactccgcacctgccaccctcagctctcgggcctgagcccgccatgccctcagcctgcctcactgctgggccagggtcatgcctatataagttggcatggcagggacaatggtgggcagttgctcttacatgagctaagtttggagacctgaggcccatttgtcctcgctgggtgggccaaggtctgggacctgtcttggactgtgggagactcaccctcaccttgccaggcctctcccctgcaggactggcattgcactagtctgaggtggccactgcctttgatcaacctttgtgtgcgagggtctaagtagggtcgaacacagaagtgggaaggagaggggtgggccagggctaatggtgtcactgtgtaaagttttgacatactagctctataaatatctgactattggaccaaaata

SEQ ID NO: 352362 - DNA, 725 bp, Homo Sapiens
  misc_feature (706)..(706): n is a, c, g, or t
gggagacccggagagacggcgaaggagctggaaaccgagccagggctgagccggctgacaacaggcatcgatcgaaggtttccggtaaccagcatacaccatctcatccgaaacagcggggttcggcttctcctatggcaggatctggggcgaaaagatcaagagatggtgaactggagaccagtctaaacacccaaggttgtaccacagagggagacctgctgtttgcccagaagtgtaaagaactccaaggatttatacctcctctcacagacctactcaatgggctgaagatgggtcgttttgagagaggattaagcagttttcagcagagtgtggcaatggacaggatccagcgtattgtaggtgttttgcagaagccacagatgggggaacgttacctaggaaccttgctacaggtagaagggatgttaaagacttggtttccacaaatagctgcccagaagtcatcattgggtggtggcaagcatcagctgaccaagcattttccaagccaccacagtgattcagctgcttcctctcctgcatctcctatggaaaagatggaccagacacagctaggacatctagctttaaaaccaaagcagccttggcacatcacaccaatggcccagctatgaaccctcacccgggatccacaccactccaaattgaccccatcagaatctacgctgcgagtggttcnggcccccaccgaaggcccc

SEQ ID NO: 352363 - DNA, 862 bp, Homo Sapiens
  misc_feature (743)..(785): n is a, c, g, or t
ggaattcccgggatggagagacggcgaaggagctggaaaccgagccagggctgagccggctgacacagcggggttcggcttctcctatggcaggatctggggcgaaaagatcaagagatggtgaactggagaccagtctaaacacccaaggttgtaccacagagggagacctgctgtttgcccagaagtgtaaagaactccaaggatttatacctcctctcacagacctactcaatgggctgaagatgggtcgttttgagagaggattaagcagttttcagcagagtgtggcaatggacaggatccagcgtattgtaggtgttttgcagaagccacagatgggggaacgttacctaggaaccttgctacaggtagaagggatgttaaagacttggtttccacaaatagctgcccagaagtcatcattgggtggtggcaagcatcagctgaccaagcattttccaagccaccacagtgattcagctgcttcctctcctgcatctcctatggaaaagatggaccagacacagctaggacatctagctttaaaaccaaagcagccttggcacctcacacaatggccagctatgaacctcacctggatccacaccactccaatttgcaacccccctctcagctcccccagggactatctccctttagccatggtccctttaggcactggaaaccggcatttggcgtcattcttttccctcccaccattggaagtgcaaacccctttnnnnnnnnnnnnnnnnnnnnnnnnnnnnnnnnnnnnnnnnnnnttattctacagccattcttcccgggtgccattcccctgggggaaacgcccccggtttgaaaaaccttattttgtggg

SEQ ID NO: 352364 - DNA, 1892 bp, Homo Sapiens
  misc_feature (504)..(512): n is a, c, g, or t
  misc_feature (1660)..(1662): n is a, c, g, or t
  misc_feature (1666)..(1666): n is a, c, g, or t
tgctggtacggtccggaagtcctgggatatcgtcgacccacgcgctcgggaagagcggaaggaggaggctgccgccgccgctgccgccgccgcagcagccactgggccccagggccttcacctgctgtttgagaggccccggccgcccccgtttctgggccctagcccaccagatcgctgtgctggcttcctggagccaacctggttggcagcacccccacgcctggcaaggccaccccgcttctatgaggcgggtgaggagctaactggacccggggccgtggccgctgcccgcctctacggtctggaacctgctcaccccttgctctacagccgcttggctcctccaccaccacctgctgcggccccgggaacccctcaccttctcagcaagaccccaccgggagcccttttgggggcaccacctccgcttgtgcccgccccccggcccagttccccacctaggggccctggcccagctcgggctgacaggtgaggggaacnnnnnnnnnctcgggcaaagctccatctccccttcctttaaccaggtcctagggctgaggttttaagccagggctggagggcaaaggtcataacctcaccagccacctctgaggtcatggaacctgggaacagaagcctcaacccccacaagaccaagcatcacatggagtgtagggtcactgggagagcagaggtcacagcctctagagaagggagaggggcgtgtgcatgggagtgtggctcatctcgggggccatggggcctcctgaggtacacctttgcccctgtaagggcctctaggccctgggcctgcctccccaagggctcactaagccagaggccaaagtgccccctcccgttcacctaccacccaagtcctcatgccctccgagggctgggggaggaggggctcaaggaaggggggttccatgtacatatttatcacccctttcacatagccccaagaccttttgtacatttttacaggggtgcccctcccaacagttcccttcctggttaattaaaccctcagactggtgctgtgttcctagcctctggcctctctgtggggaaaggggactgcagggggaagagccgggaagggacagtcaggcttctccctgggaaggtggggccagcaggagatgaccaacagggggcaggacctggggacctgggctggagggaagggcagaagcttcctacttggctgacagccccggttcccccaacatgttcccgttcactctgcccccacccccaaaggctcagcctctaaatctcagactccaccacctcttaatgggtcagtccccttcaccccatttccaagtgcccccaggactcatggaccctgcttccctgaaccctgttctccaaaaccctgccccaggctaagggtggccagagaaggtcaccatgtaccacacaccaaagaagggggtcggcccaggggtgggcgacacaggcagcttcttcggcagcctcacggcagcaaccccagccttcccaaagcagcaggcgcctccaggctggggcccaacctagaaggcaggggtcaatctaacaaaaccctaacgttgacttttttccctggtggggcttcttctgtaacatgacttgcgaatatttatataaaaacgagtgttacaatgcnnncccnttcccccgcccacccgaaaacaccatggtcggcccgccttcggccccctcaaaaagcttttctaaaaccattccgtttggcggcccgggcccccagtaagtaaaatgaacctgggcccaaaactggtttcccaaggaaaaacccggggccattgaacaaagggctttgggattccccccccaattaaaaaaccgccccggggcgggaaaccccgggcgggttcttg

SEQ ID NO: 352365 - DNA, 248 bp, Homo Sapiens
atataacacttattgatatattttatcatataataatattgtataatgcatccatttaaagtgtgcaattcagtgattttgagtatattcacagaattgtgcaatcattaccgctatagaattctgtaacattttcatcatcccccaaagaaacttcatatgcattaagcagtcattctccattccctgctatcacccccagcccataggcaaccacaaactgacttattctctctctacatttggcc

SEQ ID NO: 352366 - DNA, 371 bp, Homo Sapiens
  misc_feature (50)..(50): n is a, c, g, or t
  misc_feature (310)..(310): n is a, c, g, or t
  misc_feature (356)..(356): n is a, c, g, or t
cattctccatcctccttaaattatcattatccagaaccctagacctctantcatccccaggtgactataatgaataatcaggcgtttgctcatcgcacaccatgagatgctttccagtctagaatataagtcttattcgccccatctcatccaaaaagcaactcccaatacctgatttttccaaagattctaatgcccattacccaatcttcgtaccaaattctgtatgattgtttctttacttgcaagcaactgaccaacaggaggcaaaaatcaagtaccggaaagacaatgggtagtttgaggaatnacagacttggaaagtacaaaaaccagggtggttccaaggaccaatnaaaagaataactgca

SEQ ID NO: 352367 - DNA, 523 bp, Homo Sapiens
  misc_feature (460)..(460): n is a, c, g, or t
  misc_feature (490)..(490): n is a, c, g, or t
caggctctgccctgaacttccaagaactaacaattgactggctcacttttcaggtcatctgcaattttaaattttctcatcataaactgcttcaagctgtttgatcacttccactgattactacacaagaaataatttgcacaatttcccttacttttatatcatttacatttaaatacagccaaaaaatacccatgaaaatctaagaaatgttcatttctaaaactaacaaacaaaatcaaactacaagtattaaagtgcccacaaaaacattttggaataccatggagttgaggcagggagtaacaactctcaaactacttttatttaatcttactcatatttaagaataagttatctccaacagacctaatctaattgtggaatcatttcaaggtattttgaataatcatatcatttatagatatcagagcagaacaaattttggattaagtaaagnactataattatactcttaggacatctgctnatgacagaggtttctctgacaccagtgacaaag

SEQ ID NO: 352368 - DNA, 1153 bp, Homo Sapiens
aaaaactctgcgcggccagcacatcatccacagcggccacttcatggtgtcgtcgccgcaccgagagcacccgcccaagaagggctacgatttcgacacggtcaaacaaacagacgtgccagacctacagcttcggcaagactagctcctgccacctgtccatcgacgcctcgctcaccaagctcttcgagtgcatgactttggtctacagtgggaagttggtgtctccaaagtggaagaatttcaagggcctgaagctacagtggagagacaagatccggctcaataatgccatctggcgggcctggtacatgcagtatctggagaagcgcaagaatcctgtgtgccactttgtgacacccctggacggctctgtggacgtagacgagcaccgccggccggaggccatcaccacggaagggaagtactggaagagccgcatcgagattgtgatccgggagtatcacaagtggagaacctacttcaagaaaaggctacagcagcacaaggatgaggacctctccagcctggtccaggacgatgacatgctgtattggcacaagcacggggatggatggaagacccccgtccccatggaggaggatcccctgctggacacagacatgctcatgtcggaattcagcgacaccctcttctccacactttcttcacaccagccggtggcctggcccaatccccgggaaatagcacatctgggaaatgcagacatgatccagccgggactgattcctttgcagcctaacctggacttcatggacacctttgagcctttccaggacctcttctcttctagccgctccatttttggctccatgctacctgcatctgcctcagcacctgtaccagatcccaacaacccacctgcacaggagagcatcctgccgaccacagccctccccactgtgagccttcctgacagcctcatcgcgccccctaccgccccatccctggctcacatggatgagcagggctgtgaacacacctcccggactgaggacccgtttatccagcccacggacttcggtccctcagagccgcactgagtgtcccgcagcccttcctccctgtcttcaccatgcccctgtgtctcccaggccccgccacgccatttccgtgtaccagaggctctccg

SEQ ID NO: 352369 - DNA, 425 bp, Homo Sapiens
agcgcctacatcacctccctctacttcgcactcagcagcctcaccagcgtgggcttcggcaacgtgtccgccaacacggacaccgagaagatcttctccatctgcaccatgctcatcggcgccctgatgcacgcggtggtgtttgggaacgtgacggccatcatccagcgcatgtacgcccgccgctttctgtaccacagccgcacgcgcgacctgcgcaactacatccgcatccaccgtatccccaagcccctcaagcagcgcatgctggtagtacttccaggccacctgggcggtgaacaatggcatcgacaccaccgagctgctgcagagcctccctgacgagctgcgcgcagacatcgccatgcacctgcacaaggaggtcctgcagctgccactgtttgaggcggccagccgcggctgcc

SEQ ID NO: 352370 - DNA, 2395 bp, Homo Sapiens
  misc_feature (2158)..(2158): n is a, c, g, or t
  misc_feature (2180)..(2180): n is a, c, g, or t
cttcgcccgacgccggaactgcgagctctcagcgggagccgagacggtgcaggccggaggaagcaccttcactcccatgcctgcgccccgatgctgcgcgttctgtgcctcctgcgcccctggaggccccttcgggcccgcggctgcgcttccgacggggcggccgggggctcagagatccaagtgcgcgccctggcgggtccggaccaagggatcactgagattctgatgaagcagaccttctgcccgcaatgccttggggaatgtcttcgtcagtgagctgctggaaagctcatggcccagctgcgggaggaccggcaagtgcgtgtcctgctcttcagcaagtggagtgaagggcgtgttctgtgcaggtgcagacctgacaggagcgggaacagatgagctgaaggcagcaggtgggggtgttcgtccagcgactccggggcctgatgaatgacatcgcagccttccctgcacccaccattgcggctatggatgggtttgccttgggcggaggcctagagcttgccctggcctgtgacctccgagtggcaggtactgggccaggactgggggcagggggtggggctagggagtcaggggtgagtgaaacagggtgagtctggacattctgcagtcagccactgttcttggcttccaaccaaaagcaaaactaaggcaaggcagagcacagagggtgctcaggcagaagctgttaccctcctggtgcagcattagctgctgtagtatctgtgacctgtcagaacctgcttccttcatttgggaatatttgaccaacctcagagcatatgctgttacgagccaaggaggtcaaagagcaatgtccagtcttcccattctgtccaagtcagatttatcgaccatgtttcggaaaaaggtgagcctcagggatagtttgtcaatggctgagctaatcacaaaggtgcctgggcaggaatactggcaccagccaaatttgcattacttgttctgagcaattgagctttgtttgaagaatgggaggggataaagaagataactgatcattttctcaggtgactgacctggtgattaggagcagccttcttggatgcagttaggcaaagtctgaatgtcttcccttctccccccaccgctctctcctgccaccccaggagcaacatataaaaatgtgtagctccaggcatgaaagtagcttctgtctacacaatgcaggtcaaagagaaggaactgaccaggtgtccaggcaccaaaataccaggctggtctagccccaactctccttctcacatgcccacgttcacgcaactaactcacagggttttggggaagactaagacggagtgaatgtaaaacccactcccttctgcccacgttcacatggtccatgctgagggaattcagaaaaggagacagacccgggggggtgcgtcagtcaaggcaagtttttcgaaggaaggaagcagaactcaggaggacatggactggaacagtaagggcaatttcaggctgtgacaaagctggaacggacgacggtagcaggagcaggagtcactgacattcctaggccaggccaggctaagccagagaacctattaatagtaatccacaaatagatatggggcacctcctaggaactctccttgttccaagcgtcgtacctcgtgtgatccttagcggctctctgaagcagacagaagagggccagccatctttcttccacctttgaggcttgggaagggtgagacttgctggtgacttacaactccatcaaaggggcatggtgaaataagggcctgggctcctgacttctgggctagggctcttccaaaggcagagtctggagaggcctggctgtggccagaccatggggcaagtggctagaggggcgagtagacagcagaggcagctgtggcccccgggattagcactgggggaccggatgggggagggaggcctcactttgttctatctgagcagcttcctcggcagtcatgggactgattgagaccacgcgagggctcctcccgggggcaggagggactcagaggctgcccgttgtctgggggtggccctggcgaaggagctcatcttcacgggccgacgacttgagtggaactgaggcccacgtactggggctggtgaatcacgctgtggnccagaacgaggaggggggacgnccgctaccagcgggcacgagcactgggccagagagatccttgcccaggccccccattgccgtgcggctgggcaaagtaagccattgacccgaggaacgggacgttggaccttgcatctctggggattggccattgaacggaatttgcctatgcccaagaatttttgcaacccgggaccggtaaaaggcatggagccttagggaaaacggctccca

SEQ ID NO: 352371 - DNA, 1237 bp, Homo Sapiens
agcgggggagccgagacggtgcaggcgggagaagcaccttcactcccagcctgcgccccgatgctgcgcgttctgtgcctcctgcgcccctggaggccccttcgggcccgcggctgcgcttccgacggggcggccgggggctcagagatccaagtgcgcgccctggcgggtccggaccaagggatcactgagattctgatgaacagaccttctgcccgcaatgccttggggaatgtcttcgtcagtgagctgctggaaactctggcccagctgcgggaggaccggcaagtgcgtgtcctgctcttcagaagtggagtgaagggcgtgttctgtgcaggtgcagacctgaaggagcgggaacagatgagtgaagcagaggtgggggtgtttgtccagcgactccggggcctgatgaatgacatcgcagccttccatgcacccaccattgcggctatggatgggtttgccttgggcggaggcctagagcttgccctggcctgtgacctccgagtggcagcttcctcggcagtcatgggactgattgagaccacgcgagggctcctcccgggggcaggagggactcagaggctgccccgttgtctgggggtggccctggcgaaggagctcatcttcacgggccgacgactgagtggaactgaggcccacgtactggggctggtgaatcacgctgtggcccagaacgaggaggggggacgccgcctaccagcgggcacgagcactggcccaggagatcctgccccaggcccccattgccgtgcggctgggcaaagtagccattgaccgaggaacggaggtggacattgcatctgggatggccattgaagggatgtgctatgcccagaatattccaacccgggaccggctagagggcatggcagccttcagggagaagcggactcccaaatttgttggcaaatgacccccattttaaccttcagcatgggagatgcatgccctgaagagcaggatccagaaggaagatttgtggccagattgccttcatcatttcacctctcccagacttccatttcttcacaaggatgatgatggaaataaaatgactggcgtgatgcctggaaccaaggtgctgatcctaccacctactgctaccttccttagcttcaccctggctagaaataatcacgagggttgggtttgctttggaaaatgcctgtctctctacttgaatgataaagaattaaattagatctctctg

SEQ ID NO: 352372 - DNA, 471 bp, Homo Sapiens
  misc_feature (55)..(56): n is a, c, g, or t
gaaacacttggaccctggccttgtcttgggctggacaagcttaagcaactctttnnttgctgtggccctgctcccccaaaactaatattttgtaccttgttgcagaatattccaacccgggaccggctagagggcatggcagccttcagggagaagcggactcccaaatttgttggcaaatgacccccattttaaccttcagcatgggagatgcatgccctgaagagcaggatccagaaggaagatttgtggccagattgccttcatcatttcacctctccagacttccatttcttcacaaggatgatgatggaaataaaatgactggcgtgatgcctggaaccaaggtgctgatcctaccacctactgctaccttccttagcttcaccctggctagaaataatcacgagggttgggtttgctttggaaaatgcctgtctctctacttgaatgataaagaattaaattaga

SEQ ID NO: 352373 - DNA, 1423 bp, Homo Sapiens
  misc_feature (1380)..(1380): n is a, c, g, or t
  misc_feature (1389)..(1389): n is a, c, g, or t
taggtagcgaggcctgggtggcgaattcggcacgaggcacaaagtgtcctgtgcctgtgtgtcgaggcaggtcatttactgctctccgcagctctcctctcacagttacgatggactggcagtcaatcaaaatccaggaattgatgtctgatgatcagagagaagcaggtcggattccacgaacaatagaatgtgagcttgttcatgatcttgtggatagctgtgtcccgggagacacagtgactattactggaattgtcaaagtctcaaatgcggaagaaggttctcgaaataagaatgacaagtgtatgttccttttgtatattgaagcaaattctattagtaatagcaaaggacagaaaacaaagagttctgaggatgggtgtaagcatggaatgttgatggagttctcacttaaagacctttatgccatccaagagattcaagctgaagaaaacctgtttaaactcattgtcaactcgctttgccctgtcatttttggtcatgaacttgttaaagcaggtttggcattagcactctttggaggaagccagaaatacgcagatgacaaaaacagaattccaattcggggagacccccacatccttgttgttggagatccaggcctaggaaaaagtcaaatgctacaggcagcgtgcaatgttgccccacgtggcgtgtatgtttgtggtaacaccacgaccacctctggtctgacggtaactctttcaaaagatagttcctctggagattttgctttggaagctggtgccctggtacttggtgatcaaggtatttgtggaatcgatgaatttgataagatggggaatcaacatcaagccttgttggaagccatggagcagcaaagtattagtcttgctaaagctggtgtggtttgtagcccttcctggcaagaactttccattattgctggctgcaaatcccagttggaaggacatttacaataaagcccaaaacagtttctggagaatttaaaaatggggagtgcactactatccagatttgatttggtctttatcctgttagatactccaaatgagcatcatgatcacttactctctgaacatgtgattgcaataagagctggaaagcagagaaccattagcagtgccacagtagctcgtatgaatagtcaagattcaaatacttccgtacttgaagtagtttctgagaagccattatcagaaagactaaaggtggttcctggagaaacaatagatcccattccccacccagctattgagaaagtacattggcgtatgctcggcagtatgtgtacccaaggctatccacagaagctgctcgagttcttcaagatttttaccttgagctccggaaacagagccagaggttaaaatngctcaccantcactaccagggcagctggaatcttttgattcgt

SEQ ID NO: 352374 - DNA, 2315 bp, Homo Sapiens
ccgcacgcctcgcctgagggggtccgctcagcccaggcgcccgcccccgcccccgccgattaaatgggccggcggggctcagcccccggaaacggtcgtacacttcggggctgcgagcgcggagggcgacgacgacgaagcgcagacagcgtcatggcagagcaggtggccctgagccggacccaggtgtgcgggatcctgcgggaagagcttttccagggcgatgccttccatcagtcggatacacacatattcatcatcatgggtgcatcgggtgacctggccaagaagaagatctaccccaccatctggtggctgttccgggatggccttctgcccgaaaacaccttcatcgtgggctatgcccgttcccgcctcacagtggctgacatccgcaaacagagtgagcccttcttcaaggccaccccagaggagaagctcaagctggaggacttctttgcccgcaactcctatgtggctggccagtacgatgatgcagcctcctaccagcgcctcaacagccacatgaatgccctccacctggggtcacaggccaaccgcctcttctacctggccttgcccccgaccgtctacgaggccgtcaccaagaacattcacgagtcctgcatgagccagataggctggaaccgcatcatcgtggagaagcccttcgggagggacctgcagagctctgaccggctgtccaaccacatctcctccctgttccgtgaggaccagatctaccgcatcgaccactacctgggcaaggagatggtgcagaacctcatggtgctgagatttgccaacaggatcttcggccccatctggaaccgggacaacatcgcctgcgttatcctcaccttcaaggagccctttggcactgagggtcgcgggggctatttcgatgaatttgggatcatccgggacgtgatgcagaaccacctactgcagatgctgtgtctggtggccatggagaagcccgcctccaccaactcagatgacgtccgtgatgagaaggtcaaggtgttgaaatgcatctcagaggtgcaggccaacaatgtggtcctgggccagtacgtggggaaccccgatggagagggcgaggccaccaaagggtacctggacgaccccacggtgccccgcgggtccaccaccgccacttttgcagccgtcgtcctctatgtggagaatgagaggtgggatggggtgcccttcatcctgcgctgcggcaaggccctgaacgagcgcaaggccgaggtgaggctgcagttccatgatgtggccggcgacatcttccaccagcagtgcaagcgcaacgagctggtgatccgcgtgcagcccaacgaggccgtgtacaccaagatgatgaccaagaagccgggcatgttcttcaaccccgaggagtcggagctggacctgacctacggcaacagatacaagaacgtgaagctccctgacgcctacgagcgcctcatcctggacgtcttctgcgggagccagatgcacttcgtgcgcagcgacgagctccgtgaggcctggcgtattttcaccccactgctgcaccagattgagctggagaagcccaagcccatcccctatatttatggcagccgaggccccacggaggcagacgagctgatgaagagagtgggtttccagtatgagggcacctacaagtgggtgaacccccacaagctctgagccctgggcacccacctccacccccgccacggccaccctccttcccgccgcccgaccccgagtcggaaggactccgggaccattgacctcagctgcacattcctggccccgggctctggccaccctggcccgcccctcgctgctgctactacccgagcccagctacattcctcagctgccaagcactcgagaccatcctggcccctccagaccctgcctgagcccaggagctgagtcacctcctccactcactccagcccaacagaaggaaggaggagggcgcccattcgtctgtcccagagcttattggccactgggtctcactcctgagtggggccagggtgggagggagggacaagggggaggaaaggggcgagcacccacgtgagagaatctgcctgtggccttgcccgccagcctcagtgccacttgacattccttgtcaccagcaacatctcgagccccctggatgtcccctgtcccaccaactctgcactccatggccaccccgtgccacccgtaggcagcctctctgctataagaaaagcagacgcagcagctgggacccctcccaacctcaatgccctgccattaaatccgcaaacagccaaaaa

SEQ ID NO: 352375 - DNA, 441 bp, Homo Sapiens
  misc_feature (11)..(11): n is a, c, g, or t
aatcgaaaacnatcctggccctttccaaaaccctgcctgaaaccccaggagctgagtcacctccttccactcacttccaacccaacagaaggaaggaggagggcgccccattcgtctgtcccagagcttattggccactgggtctcactcctgagtggggcccagggtgggagggagggacaagggggaggaaaggggcgagcacccacgtgagagaattctgcctgtggccttgcccgccagcctcagtgccacttgacattccttgtcaccagcaaaatctcgagccccctggatgtcccctgtcccaccaactctgcactccatggccaccccgtgccacccgtaggcagcctctctgctataagaaaagcagacgcagcagctgggacccctcccaacctcaatgccctgccattaaatccgcaaacagccaaaaaa

SEQ ID NO: 352376 - DNA, 1229 bp, Homo Sapiens
gctgggtggcgaattcggcacgaggcagcgttgctcacagaacagagtagaggcggcggcggcggcggccggacccagactggtagtgaggcgttggaccccgagccgctgcaatgccgctggagctggagctgtgtcccgggcgctgggtgggcgggcaacacccgtgcttcatcattgccgagatcggccagaaccaccagggcgacctggacgtagccaagcgcatgatccgcatggccaaggagtgtggggctgattgtgccaagttccagaagagtgagctagaattcaagtttaatcggaaagccttggagaggccatacacctcgaagcattcctgggggaagacgtacggggagcacaaacgacatctggagttcagccatgaccagtacagggagctgcagaggtacgccgaggaggttgggatcttcttcactgcctctggcatggatgagatggcagttgaattcctgcatgaactgaatgttccatttttcaaagttggatctggagacactaataattttccttatctggaaaagacagccaaaaaaggtcgcccaatggtgatctccagtgggatgcagtcaatggacaccatgaagcaagtttatcagatcgtgaagcccctcaaccccaacttctgcttcttgcagtgtaccagcgcatacccgctccagcctgaggacgtcaacctgcgggtcatctcggaatatcagaagctctttcctgacattcccatagggtattctgggcatgaaacaggcatagcgatatctgtggccgcagtggctctgggggccaaggtgttggaacgtcacataactttggacaagacctggaaggggagtgaccactcggcctcgctggagcctggagaactggccgagctggtgcggtcagtgcgtcttgtggagcgtgccctgggctccccaaccaagcagctgctgccctgtgagatggcctgcaatgagaagctgggcaagtctgtggtggccaaagtgaaaattccggaaggcaccattctaacaatggacatgctcaccgtgaaggtgggtgagcccaaaggctatcctcctgaagacatctttaatctagtgggcaagaaggtcctggtcactgttgaagaggatgacaccatcatggaagaattggtagataatcatggcaaaaaaatcaagtcttaaaaataaagtgccattctctgaattctcagttaactt

SEQ ID NO: 352377 - DNA, 985 bp, Homo Sapiens
gctggtaccggtccggaattcccgggatcgggggcatcatccacgtggaccagatcgtgcagatggccagtcagctgttcttgcaggaccaggtgtcaattggtgccatggacaccctggagaaagaccaagccacaggaatctgccacttcttttatgacagcgctccgagtggggcttatgggacgatgacctacctaacaagagcagtggcttcttatttgcaggaattgttgcccaattcgggctgccagatgcaatagggtctcacctggaaacatgatcacactctcaatctgtcacgtgccccctagccttactgggaaccttctgtcccccaagatcccctgtgctatcaggaaagcatgtcccatcagaaacactctcggggggcaatggtagcactcaccctgaaactgatgtatgttaaagccacagagatagagctgaggagtcctgtgttcccccgcaaggagcaccccgggatcattttctaggttcattttctctggaacatttgctgtagcatctggtctcacggactctgaggaggaattggaaattggtctcttttgagtgcagagggaactgagacgccagcttaaattggctcttgcagagagttacagaaatagtttcgatgagctagtgacacatcctaaagatgcaaagatcctcctggcggcagtagccttgacaagggccacctcttcacaggatgcagtctgtctgtgcaccaaactcttcaccaaatagaacacttgtgtctctctgtggaatgggggttttcttgtgccttgcttgctttcatagccttccattttattgcatggctgccttgatgtaacataattctctgtccccaagatttagaaaattcctcttcgttcaccttggctcatggtcttccagggtttttatcctggctgtctatgaactagggttttctcctgccttaggaaaaatactgcatcttctggaatct

SEQ ID NO: 352378 - DNA, 1131 bp, Homo Sapiens
  misc_feature (956)..(956): n is a, c, g, or t
  misc_feature (980)..(983): n is a, c, g, or t
  misc_feature (985)..(985): n is a, c, g, or t
  misc_feature (987)..(987): n is a, c, g, or t
  misc_feature (992)..(992): n is a, c, g, or t
  misc_feature (995)..(995): n is a, c, g, or t
  misc_feature (999)..(999): n is a, c, g, or t
  misc_feature (1001)..(1001): n is a, c, g, or t
  misc_feature (1003)..(1005): n is a, c, g, or t
  misc_feature (1008)..(1008): n is a, c, g, or t
  misc_feature (1010)..(1010): n is a, c, g, or t
  misc_feature (1012)..(1012): n is a, c, g, or t
  misc_feature (1053)..(1053): n is a, c, g, or t
  misc_feature (1061)..(1061): n is a, c, g, or t
  misc_feature (1067)..(1067): n is a, c, g, or t
  misc_feature (1069)..(1069): n is a, c, g, or t
  misc_feature (1073)..(1074): n is a, c, g, or t
  misc_feature (1080)..(1080): n is a, c, g, or t
  misc_feature (1085)..(1085): n is a, c, g, or t
  misc_feature (1088)..(1088): n is a, c, g, or t
  misc_feature (1093)..(1093): n is a, c, g, or t
  misc_feature (1111)..(1111): n is a, c, g, or t
agcgggcaggcctggcgaggcggcggcgggcggaggctgggccggaggggtggggacggcgaggaggtggaggccggcgctccgctccgctccagctcggtttcatgtcccgccaggcgaaggatgacttcctgcggcactacacagtgtcggaccccaggactcaccccaagggctacaccgagtacaaagtaaccgcgcagttcatctcaaagaaggacccagaggatgtcaaagaggtggtggtctggaagcggtacagcgacttccgcaagctgcatggagacctggcctacacccaccgcaacctcttccgccgcctcgaggagttccctgctttcccccgggcccaggtgtttggccggtttgaagcctcagtgatcgaggagcggcgaaagggggcagaggacctgcttcgcttcactgtgcacatacctgcgctcaacaacagcccccagctcaaggagttcttccggggtggggaggtgacccgacccttggaggtgtccagggacctacacatcctgccaccccctctgatccccaccccgccccctgatgacccccggctatcccaactgctccctgcagaaaggaggggcctcgaggaattggaggtgccagtggaccccccaccatccagccctgcccaggaggccctggatctcctctttaactgtgagagcaccgaggaggcatctggttcccctgcccgaggccccctcaccgaggctgagcttgccctcttcgaccccttctccaaggaagaaggcgcacccccagccccacccatgtggctgagctggcaacgatggaggtggagtctgcaaggctggaccaggaaccctgggagccaggagggcaggaggaggaagaggatggggaaggagggcccaccctgcctacctaagccaggccacagagctcatcacccaggccctgcgggatgagaaggnaggcgcttacgctgctgcactccnnnncnancgagncgnggtnangnnntgntnanggagtccaagtgaccggtgcctgccgccacgaaggtgtaanaaaagganctgagncntganngggagnggganctngcctnacatgtttactccaccgnacaggagtggcaatccgtgg

SEQ ID NO: 352379 - DNA, 702 bp, Homo Sapiens
  misc_feature (8)..(11): n is a, c, g, or t
  misc_feature (31)..(31): n is a, c, g, or t
  misc_feature (41)..(41): n is a, c, g, or t
  misc_feature (60)..(60): n is a, c, g, or t
  misc_feature (68)..(68): n is a, c, g, or t
  misc_feature (78)..(78): n is a, c, g, or t
  misc_feature (95)..(95): n is a, c, g, or t
  misc_feature (105)..(105): n is a, c, g, or t
  misc_feature (110)..(111): n is a, c, g, or t
  misc_feature (113)..(113): n is a, c, g, or t
  misc_feature (118)..(118): n is a, c, g, or t
  misc_feature (120)..(121): n is a, c, g, or t
  misc_feature (124)..(124): n is a, c, g, or t
  misc_feature (128)..(128): n is a, c, g, or t
  misc_feature (168)..(168): n is a, c, g, or t
  misc_feature (177)..(178): n is a, c, g, or t
  misc_feature (180)..(180): n is a, c, g, or t
  misc_feature (186)..(190): n is a, c, g, or t
tcggccannnnaaccacatccctcctcggtnctctcacagntaaagaggagatccaggancctcatgntatgggttgnattgtggtgtgttctantggaacctcnaattnntngaggncnntcntttntgcagggagcagttgggatagccggggttttttatggttnggttttttnntnagaggnnnnngcaggatgtgtaggtccctggacacctccaagggtcgggtcacctccccaccccggaagaactccttgagctgggggctgttgttgagcgcaggtatgtgcacagtgaagcgaagcaggtcctctgccccctttcgccgctcctcgatcactgaggcttcaaaccggccaaacacctgggcccgggggaaagcagggaactcctcgaggcggcggaagaggttgcggtgggtgtaggccaggtctccatgcagcttgcggaagtcgctgtaccgcttccagaccaccacctgcgcggttactttgtactcggtgtagcccttggggtgagtcctggggtccgacactgtgtagtgccgcaggaagtcatccttcgcctggcgggacatgaaaccgagctggagcggagcggagcgccggcctccacctcctcgccgtccatcccgggaattccggaccggtaccaccccatgtgttctgcggactcgcggcgctctgtctgtggtcttcctc

SEQ ID NO: 352380 - DNA, 710 bp, Homo Sapiens
agcggggagtcctggcgaggcggcggcgggcggaggctgggccggaggggtggggacggcgaggaggtggaggccggcgctccgctccgctccagctcggtttcatgtcccgccaggcgaaggatgacttcctgcggcactacacagtgtcggaccccaggactcaccccaagggctacaccgagtacaaagtaaccgcgcagttcatctcaaagaaggacccagaggatgtcaaagaggtggtggtctggaagcggtacagcgacttccacaagctgcatggagacctggcctacacccaccgcaacctcttccgccgcctcgaggagttccctgctttcccccgggcccaggtgtttggccggtttgaagcctcagtgatcgaggagcggcgaaagggggcagaggacctgcttcgcttcactgtgcacatacctgcgctcaacaacagcccccagctcaaggagttcttccggggtggggaggtgacccgacccttggaggtgcccagggacctacacatcctggccaccccctcttgatccacgaaaacaggagacggcaggaagaccacccgcgcgactcccaaatgtggcaccaggtgacagaacatgaggcaggacagcagccacgcaaatgaaggagcacacagacgaacaaacaaccagagacccgagaccagaaagagcagaggacctaaaacaggcaac

SEQ ID NO: 352381 - DNA, 705 bp, Homo Sapiens
catggcttaggtcgaggccgggggttaatcggcacgaggcggcgaggaggtggaggccggcgctccgctccgctccagctcggtttcatgtcccgccaggcgaaggatgacttcctgcggcactacacagtgtcggaccccaggactcaccccaagggctacaccgagtacaaagtaaccgcgcagttcatctcaaagaaggacccagaggatgtcaaagaggtggtggtctggaagcggtacagcgacttccgcaagctgcatggagacctggcctacacccaccgcaacctcttccgccgcctcgaggagttccccgctttcccccgggcccaggtgtttggccggtttgaagcctcagtgatcgaggagcggcgaaagggggcagaggacctgcttcgcttcactgtgcacatacctgcgctcaacaacagcccccagctcaaggagttcttccggggtggggaggtgacccgaccctttggaagggtggtccaagggcaacctacacatcctggcccaccccctcctggaatcccccaaaccagcaacggctgattgaacaccgtgcaaatcccaaccgagcacggcaaaaaggacggggcagtcatgacaagaaggtgacagtggaacccgaaaaagcgccagccaggggccgagtcactacaggtgacaaaacgaaacagacggccacagcagagccca

SEQ ID NO: 352382 - DNA, 991 bp, Homo Sapiens
ggagcggagcctggccccaacatttgtcccaccagtttcccggaagtgctaaaaattggggttctcccaacgcaaggctcagaaaaggcaaccagaagttccctcctcttgctcaaaaggacacactccctcctccccaggtcctccaagtggccaaaacactcagtggcctggaggggcaggagaggcaacaggactcctccaggagggcccaagtcactggggagccagggtgtccccggacccacctttcggccggcagatagtcatcggggtcgggctgctggacaggggtgagaagaggggccgcagcgtccccgagaaggggatctcgggaaagatgaatagcagtgacccatcggtggcactgtagaaagagagatgtccagcctcgtagtccagaaagatccccacgcgcctgggtgggtcccggagtggagccaaggcccgttccgaggaattgtaatagctccccaggaagaccaggatccagaagccgttgcccgcggacagctcgcccttctccttcctgttcacgttctccctgcacacccccagggcccagctggtgcggtccccaacctccacctcccagtagtggcggcctgaggtgaagcgctcctggcccagcacgcaggggccggggtcaaagcgctctgggctgtccggcagggcctgccgtaggtccccccgctgcacgctccgcctgtcttcagacaggatcagctcagggttggcggtgtccgggtccaaggtcacgtcccctcgaaacctccgcagtgtctctaccagtcccgggaccctgcacacggtcctcagctccataggcacaacttctgggggctgcagcttcacatcctggaccctgcgcagggcgtccttgatgtcctgcagcagccccagcgcaggcagctggcagcggccctcgagcctcggcgatgagcttcagctaggtgggcgctctgctgcctaggtggctgcgccctcccgc

SEQ ID NO: 352383 - DNA, 1282 bp, Homo Sapiens
  misc_feature (46)..(46): n is a, c, g, or t
  misc_feature (52)..(52): n is a, c, g, or t
  misc_feature (57)..(57): n is a, c, g, or t
  misc_feature (76)..(76): n is a, c, g, or t
  misc_feature (89)..(89): n is a, c, g, or t
agggaaccctggcaacccagcccatgggacctcctgatccccatgnagtcanagctntccctctgtcttttaagantgactgttttatnacctttacatgggtaccctgggaaattgctgacttgcagctgaaatgtatgaataccaaagaatttctatcacaatattcacagatctctgtatcagctctacttggaggtcaagcaggcttgggagagtatagactgctctgcctgccctagagtggaagcattgaacaaagccacaaaaaccccagagatcacagatctaacttttcaatggcccacaggaccaggttcaggacaggtaggacaccaggcaaaccacttgttcccttgcgcttcattgtgcaaaagctggtctgttcctctggccagaccctccttagtacaggatctcggaccacaaaccaaggagtctcgtggccttggattcccagaccctaggatggtatccctctgacagctggaaccaggcaagggggaacacacctcagcctcagagcagcctctggacactctccaggtaacatgaaaataacttgtgcaaacacagcccccatgccagaaagtccagtgccctaggaagggctatcctgaattctgaccctgatgtttgccaaaggagaatgcagcaagacagtgtcaggtttggccaaatgtgaccctgctcagagctataccacttgaatactggcacaaaagaaaggaccaaggtaaagcaaatttatttgggaggaacaattcccttcaaaagtagatccctatctttaggagacaaaaggcaacactgtgatgaacccacaccccctagtttggggggccacaggcccaaccccattctgctgtgggctctagcctcagtagccagatccaggtaaacctcagtttcaagaataaaggtgagccacagacatgcagcaccaccagagacaacaacaccccgtggcaagaagaccatgttctggactgtctccgtactgccacggtaaggcaggaggcatgctgtgaccccttgtgctccatgcccattgcacaggccagttcaattccctaccatctgccacccatgctcttctttgggactacaactctggccaaacgtgaatatggaaagcagaggcccagggccctcttgcagtacagacattttgaggtgggtaggcagcatatgttacattctaagtaaaacagctagagggtaaaacactccaatgccaatttattttcaaaaagggctctgtgttatcctatagtttgcc

SEQ ID NO: 352384 - DNA, 2933 bp, Homo Sapiens
  misc_feature (19)..(20): n is a, c, g, or t
  misc_feature (253)..(253): n is a, c, g, or t
  misc_feature (1522)..(1522): n is a, c, g, or t
aagtgcaggaaaaatattnntcctgaacaggtggcctgtcccctgaggccagatcattctctcgcctctcccttaagccctgggtcatttgggacctcactggccagcacccagaggctgaagacatccacagccagagcctggaagccagacccagagaccaggagagggaatgtctacagcgtggctcctgaggtcagggccaaggtcagcgtgggaccctcatcggtcaagggccagcgcctcttggatnactgtccggagtccgatggaaaacagctcccccatggttcccggatccaggcaagcagggctgtcagctgctcctgacacaccacacggagtgcccaaaagctctccagccgggacacctggcagaccgagcagttagcaaggcgaggctcatggggaccacaccagggtgggtacaagggaggtctctgggaaggcctcactgtctccaccttggctcagtgcctctccccttccccaggcccgtgtcactccccataaaagatcctgactctgagctttgtaaacagaatccagccgacgtttactgaaagcctccagaggacctgtctttttcatcttccctgttgtacagaagatgcgggctcaatttcagggaactgtggattcaattcccggctccaccactttggactgggcaaactgggttaaaatccccaaggcctcagcttcctcacctgtaaataggaccagtaaacgtatctcctcaggtggtggtcacaaaggccaaacggctggcatacaaacggcccaatcctgccaactcaaagctgccggaaacctcactgaaagcctcgtggcccagctaaatggctgggctcccagtccaggtgtctcccctgcctacagctgcctccctctctgacttgatattcatccaagcctagagtcccccagttcctccaaccctagttctctcatctgtaagtgccatcctgccaccaatgcccagggttcctagacccatttcccaccctgccctcatggccccaacctgtgctcaccatctcccctccctccctctcactggagatacacatacacacctcatcgtagaagagcagccgcaagtcctcaggggctgagcggtagagcagcacggagctcaggctgctgagtggctgctgctccctgacacgcacagcagggcccggccccgagggaggcaccttctcaagaagcttcgccagatgctgctggaggagagggctctgccggggaccctgcagcatcctcatctaacaggaacagggtggacggagtcagcaacagggatacgaggcaggtggaagggcctgcagggaaagaggcatccagtgtggaaggtcatggaggggcccagatccctggggccagcgtcccagtgctgctggggagaagaggtgtgaaccacactctgaggtgggtcacaaagcagcctgtgcccctggggccaagaccctccctttcccaagctccatgaatctctactctggaatacctctgaggncctaccgccccccactgccccacaaccaccctactcagaaacaagggctccaccctctccttctgtgactgatgaggcagggccgactcagccacgctgctccacttaattagaaagcctggggcccaagagcaaaggctctgggtaactgaggatcctgggtgcctcctaaccccacccagagggtcagggcacactgaggcctgttactcagctatgccctcaagtgagaggttctccaggttccaggaactgacagttgctgtcaagggccactgttacaggtgcttgcgcgtgggccagtgccttgtgacaaggtggggtacagagaccagggaagcatcagctgcacagatggcttcaccttcaaccaggacgcccgaaggtagaagaactggcgagcctccaaggatgaggctttttccagcaatggcccaagagcccggtgctggggggtgacctcctccttcgggggcactgacacagttcctccaggcaggggccagagactgcaagacatcaaggagcttcctctaggaaggcccggcaatgcctggcatctcggggcagcagcacacagcggcccgccccagctgcccactctagccgcaggctctggcctgccaggcccagctctatgccactcagatcctgcaggggaacagccagggtcagctgcagccagctagctggaggctcacgcatctccccagtcaccttcaacaggtacagcctgcggtcagacacaaccacaaggcacatgaactccccagtgtggcctgccaatgccactggcaccttgaggcagcactggaactcctcctgggcatcgctgaacacctcaacatccaggaagagccggagtcggtggtccacagagcggaggccacagcgctcaggggggggactgaggctccaactaccatggtcacgggtgctcggtgcctgaggtgggctgttcttggccctgtcaaggtggtcaccatggccaggagggtggcagacagggctggcaaacggagaaggagccagagactgctctccctgtttccgctccctgttgggggttccccgagacacagcgaggagaaccacgtggtcactaccacagttaggacacacagcaggagattctgtcttttggaacagaggcctccagccttcctcactgtctaatcccatcctgggctcctctggcttgaactcatggccacagcgtagacactggaatctacccagcaggaggtccctggcctccccaagatgttcccgagccacattggtgactggggtcaacacggcaagcagctcctggacagctgcgtgggcatcaggctccagcaccaaatagcgacgcaactgccggtcagggcagatgtaggagcctcgtgccgaattcgccacccaggcc

SEQ ID NO: 352385 - DNA, 881 bp, Homo Sapiens
gggggccgctgtgtgctgctgccccgagatgccaggcattgccgggccttcctagaggagctccttgatgtcttgcagtctctgccccctgcctggaggaactgtgtcagtgccacagaggaggaggtcaccccccagcaccggctctggccattgctggaaaaagactcatccttggaggctcgccagttcttctaccttcgggcgttcctggttgaaggcccttccacctgcctcgtatccctgttgctgactccgtccaccctgttcctgttagatgaggatgctgcagggtccccggcagagccctctcctccagcagcatctggcgaagcctctgagaaggtgcctccctcggggccgggccctgctgtgcgtgtcagggagcagcagccactcagcagcctgagctccgtgctgctctaccgctcagcccctgaggacttgcggctgctcttctacgatgaggtgtcccggctggagagcttttgggcactccgtgtggtgtgtcaggagcagctgacagccctgcttgcctggatccgggaaccatgggaggagctgttttccatcggactccggacagtgatccaagaggcgctggcccttgaccgatgagggtcccacgctgaccttggccctgacctcaggagccacgctgtagacattccctctcctggtctctgggtctggcttccaggctctggctgtggatgtcttcagcctctgggtgctggccagtgaggtcccaaatgacccagggcttaagggagaggcgagagaatgatctggcctcaggggacaggccacctggtcaggaggaatatttttcctgcactttttctcaggtatcaataaagttgtttccaactcataaaaaa

SEQ ID NO: 352386 - DNA, 2449 bp, Homo Sapiens
agatggcggcgctgaggggtcttgggggctctaggccggccacctactggtttgcagcggagacgacgcatggggcctgcgcaataggagtacgctgcctgggaggcgtgactagaagcggaagtagttgtgggcgcctttgcaaccgcctgggacgccgccgagtggtctgtgcaggttcgcgggtcgctggcgggggtcgtgagggagtgcgccgggagcggagatatggagggagatggttcagacccagagcctccagatgccggggaggacagcaagtccgagaatggggagaatgcgcccatctactgcatctgccgcaaaccggacatcaactgcttcatgatcgggtgtgacaactgcaatgagtggttccatggggactgcatccggatcactgagaagatggccaaggccatccgggagtggtactgtcgggagtgcagagagaaagaccccaagctagagattcgctatcggcacaagaagtcacgggagcgggatggcaatgagcgggacagcagtgagccccgggatgagggtggagggcgcaagaggcctgtccctgatccagacctgcagcgccgggcagggtcagggacaggggttggggccatgcttgctcggggctctgcttcgccccacaaatcctctccgcagcccttggtggccacacccagccagcatcaccagcagcagcagcagcagatcaaacggtcagcccgcatgtgtggtgagtgtgaggcatgtcggcgcactgaggactgtggtcactgtgatttctgtcgggacatgaagaagttcgggggccccaacaagatccggcagaagtgccggctgcgccagtgccagctgcgggcccgggaatcgtacaagtacttcccttcctcgctctcaccagtgacgccctcagagtccctgccaaggccccgccggccactgcccacccaacagcagccacagccatcacagaagttagggcgcatccgtgaagatgagggggcagtggcgtcatcaacagtcaaggagcctcctgaggctacagccacacctgagccactctcagatgaggacctacctctggatcctgacctgtatcaggacttctgtgcaggggcctttgatgaccatggcctgccctggatgagcgacacagaagagtccccattcctggaccccgcgctgcggaagagggcagtgaaagtgaagcatgtgaagcgtcgggagaagaagtctgagaagaagaaggaggagcgatacaagcggcatcggcagaagcagaagcacaaggataaatggaaacacccagagagggctgatgccaaggaccctgcgtcactgccccagtgcctggggcccggctgtgtgcgccccgcccagcccagctccaagtattgctcagatgactgtggcatgaagctggcagccaaccgcatctacgagatcctcccccagcgcatccagcagtggcagcagagcccttgcattgctgaagagcacggcaagaagctgctcgaacgcattcgccgagagcagcagagtgcccgcacccgccttcaggaaatggaacgccgattccatgagcttgaggccatcattctacgtgccaagcagcaggctgtgcgcgacgatgaggagcagcaacgagggtgacagtgatgacacagacctgcagatcttctgtgtttcctgtgggcaccccatcaacccacgtgttgccttgcgccacatggagcgctgctacgccaagtatgagagccagacgtcctttgggtccatgtaccccacacgcattgaaggggccacacgactcttctgtgatgtgtataatcctcagagcaaaacatactgtaagcggctccaggtgctgtgccccgagcactcacgggaccccaaagtgccagctgacgaggtatgcgggtgcccccttgtacgtgatgtctttgagctcacgggtgacttctgccgcctgcccaagcgccagtgcaatcgccattactgctgggagaagctgcggcgtgcggaagtggacttggagcgcgtgcgtgtgtggtacaagctggacgagctgtttgagcaggagcgcaatgtgcgcacagccatgacaaaccgcgcgggattgctggccctgatgctgcaccagacgatccagcacgatcccctcactaccgacctgcgctccagtgccgaccgctgagcctcctggcccggaccccttacaccctgcattccagatgggggagccgcccggtgcccgtgtgtccgttcctccactcatctgtttctccggttctccctgtgcccatccaccggttgaccgcccatctgcctttatcagagggactgtccccgtcgacatgttcagtgcctggtggggctgcggagtccactcatccttgcctcctctccctgggttttgttaataaaattttgaagaaaccaagga

SEQ ID NO: 352387 - DNA, 1398 bp, Homo Sapiens
  misc_feature (1247)..(1248): n is a, c, g, or t
tgcaaccgcctgggacgccgccgagtggtctgtgcaggttcgcgggtcgctggcgggggtggtgagggagtgcgccgggagcggagatatggggtctgtggtgagccataaccggagtctgtggactgaacggcgggagtctatgggcagaatgatgaaccatctgggagttctatggagggagatggttcagacccagagcctccagatgccggggaggacagcaagtccgagaatggggagaatgcgcccatctactgcatctgccgcaaaccggacatcaactgcttcatgatcgggtgtgacaactgcaatgagtggttccatggggactgcatccggatcactgagaagatggccaaggccatccgggagtggtactgtcgggagtgcagagagaaagaccccaagctagagattcgctatcggcacaagaagtcacgggagcgggatggcaatgagcgggacagcagtgagccccgggatgagggtggagggcgcaagcaggcctgtccctgatccagacctgcagcgccgggcagggtcagggacaggggttggggccatgcttgctcggggctctgcttacgccccacaaatcctctccgcagcccttggtggccacaaccagccacgcatcaccagcagcaggcagcagcagatctaaaccggtcagcgccgcatgtgtggtgacgtgtgagggcatgtccggcgccactgagcgactgtggtccactgtgatttctgtcgggacatgaagaagttcgggggccccaacaagatccggcagaagtgccggctgcgccagtgccagctgcgggcccggctctcaccagtgacgccctcagagtccctgccaaggccccgccggccactgcccacccaacagcagccacagccatcacagaagttagggcgcatccgtgaagatgagggggcagtggcgtcatcaacagtcaaggagcctcctgaggctacagccacacctgagccactctcagatgaggacctacctctggatcctgacctgtatcaggacttctgtgcaggggcctttgatgaccatggcctgccctggatgagcgacacagaagagtccccattcctggaccccgcgctgcggaagagggcagtgaaagtgaaacatgtgaagcgtccgggagaagaagtctgagaagaagaaggaggagcgatacaagcgggcatcgggcagaacagaagcaccagggataaatggaaacaccccnnagagggctgatgccaagggaccctgggttactgccccagtggcctgggggcccggctgtggggcgccccgggcccaacccaagctccaagtaattggccccaaatgacggtgggcatgaaacttgggaagccaaccgggattttaacaaa

SEQ ID NO: 352388 - DNA, 712 bp, Homo Sapiens
  misc_feature (322)..(322): n is a, c, g, or t
ggctgggtaggtagaactgtgctgcctgcctgccatgggggctgctctccctccttacccccacgcccacagcccccttggttctgtggtgggcacaggatgtgtttgggtgtgagtaaagtcaaactctgaatgtataatctcttggtagtaatatctgagtggtgttgctactcctgctttttaaaaagacttttcttgccatctataaaaagcttttttctttttcccagcattgctcctgtgctgccacgcttgccctttttccttaccttcctttcagttttctatcaacaactcctctaaacttcagtttaaaatnaaaaaacagcccaaaaaggctctttgccaccagggggcatggttaggacaagttgccagtggtctggatagggggagcagaaattttgaattttaaaaaagaacaaaaagaaatgtcatctaagccccagtgaacctcctgggaggagagctagccctggccagctgtctccaaagtgactggatgctacagaagaactgggactgtcttctgcacactcgtgcctcctggagttgtcagaacactgagcagtctcctagttctgcgtccgtctagccatggggtctgccatgaaagcctgtggatctgctattgggttggtattttaaactttcacttgggtgaaacttgttcatcattttaaataaagcaacatgatttggagttgtg

SEQ ID NO: 352389 - DNA, 461 bp, Homo Sapiens
cagaatattcttctgtagaggaagagaaaggagtgaaagtttagcccactgagacctagagctttgtgatttcctaaccttgaaactctgtaatccctaaagttaaaatctccgcaagtggcacaacttcagaactaatagtatcactttgatttttctttttcctcccttagaaagtttctctagttctatagtttatttgttgaaggtactatgaccaaagaatcagctgctctacaggaatagcatggttccagtgaattagagaaaacctgctgtaaagccatggtagtgtctaagtggtatgttattatgatgtactagcatttatttacagaattatttattaacgtttacttccttcccctctgtaaatgtccatgactattgcccagagaaggcttacccctctctagggttgcagttgctttctttgtaataagtattttgccacacctgta

SEQ ID NO: 352390 - DNA, 1001 bp, Homo Sapiens
tgggtggcaattcggacgaggcttcaaccatgattggaatcagcctgtgttggatttgtgattcagggtcatggtgaccctgatccagtttgggtggaaatccttcctaagtatcataagaagcatcttggcagagatgctttggtggcagccatgagctttgctggaggccttgcttcccatagccttggctgtggggcaaggaactctgccaggcgagggggatgctgccctggatcaacagaagcctggtggctttgctcgtgttagagtgtcctgccttcttactgacaactcttctcggtgatagcctctcttccctggattgtgacatatggaatgacagtgcaggtaccaccgaggctagcacagttcaagcctccagctaagctggatccctgaagcctgctatcatgcagacaggctatgcggctgcctcggaccatgctaggccacttgctggggtgtcaacctaccaccaaaggggccttttagccaacctcatggcgaacaggaacattcctgttcctcccctggccacaggctgcagacccagcactggcccttgcgtgagtcccagcccgggggtggccccaacccattcctactgatttcctcattaacgcccattacctcagcttccctcgaatccgggagggagggaaaaaacttatacagggcccccaccagcgggctatttttccccgcaacggccccctggcgggccgacaataacccccgccccccttctggcgcgccgcccgcaatggcatgcttggcacttctcccccagcattcctttacaatcttaccggtcgccacggaagcgtaacccatgaccgcaaattccgccccctcctacatggccaacggagcccacacctttcgcgctttctggcctaacggggacaaatcccccccgcccggcctttctagtaaatacgggaaattaacgcccccgactcgggggtgactttaaacgcccccataacactctcgcg

SEQ ID NO: 352391 - DNA, 527 bp, Homo Sapiens
  misc_feature (38)..(38): n is a, c, g, or t
  misc_feature (291)..(291): n is a, c, g, or t
  misc_feature (293)..(293): n is a, c, g, or t
  misc_feature (414)..(414): n is a, c, g, or t
  misc_feature (435)..(487): n is a, c, g, or t
cccccagcagtacctatggactttcactttaaccccantttttggtctagcctctcacccacccctccccagtacgcctaagacccgaagcttctctggttccatttatccttcaaataatcctcacgtcacaccaccccacccagaggtgtagctgctggctgcatgatgtgggtggggtgtgggtgggatgtgggggagcggcaccccactgaaccttacatagactttccatcggtccccattgttggccgaagcctcacctcaccctccatggtcctggtggagttncnctgacctccggggctctggcaggtaattccacttgccttttggccccaccttttgggaacacataatttcagctcttaattctccatccactttccatctttgaaaatgtcagccaggcgnccgggcacggtggctcacacnnnnnnnnnnnnnnnnnnnnnnnnnnnnnnnnnnnnnnnnnnnnnnnnnnnnnatcaagaccatgctggccggccaggagcggtggctcacac

SEQ ID NO: 352392 - DNA, 2141 bp, Homo Sapiens
  misc_feature (1390)..(1429): n is a, c, g, or t
ctgggtgacagtgtgacctgcgataaagatgtgtcagggagaggtttgttcttggtgagcttaggtccagcaaaatacttgtttttatttcatctggtctctcattcctgttttgtaccctcttttgcactcatctgttgagactgtcagatcgcatcaagtcctatgaggaatcataaacagatgtcagttaatcgagcaagagaatatcccatggcgtgtgtcatcctagactgtccatgtgggtgtgagctcacatctatttatcaagaaaccttttctaggccatgagctcggctcagcactgtttatacagtattggcttctccgtcatggtcatcattcaagaatattattactttcaccttatagatgagaacatgaaggctcagagaagccagtttcctggtccaaggtcatggaaacagccctgaattaccccactccaaagctgttgtgctgtcctttgccatctgcttgtgggtgccattatcaagtcattcattcactagccattcaatcattcgcttgggccttcatcatgcatgaccctcggctcttgcgggttctcacgctgctcttgtcttcttccaggagtatgagttcattgtgctgcccaacgcctacatgatccacatgcctcatgcccccagcttcgacattaccaagttccgttccaacaagcaataccgcatctgtctcaaaaccctcaaggaagagtttcagcaggacatgtcccgccgctacggctttgctgccctgaaatatctcacagccgagaacaacagctagcaccaagaagcccaccactagggggagacatgctgtaggggaagtgccactcgctgtttggggcccggccttcaaattcaaaattgagccatgctttttcggtttgtttttatttatctctttggcccagccaagctgccctcactacagagaccttggacaaggatccagccagtccctctctgccccacaaccctgcattcccagaggttagctatgcagcccacctagatgagtctcttcagaatgggaaatcaggggtgacagggagtaaagggttatcatcttactgcaagccacaagatcagggcagggctttagggatgttctggatgctttttaataattatgcttcccatcataactggggagaaagggaagtcagggttctaggggttattcgtcccaggaaatagaagtgaaattgtctttattaagtgaaaactttcccctttgccctgcaatgtagctgggcattcaaacggagggcaaaccgatgatctaaaccaaccacttggaaaaacccaatggggacattgtaaccagagggtcctggaggtggggttgatgggtttccttatccccaaagtcactcctnnnnnnnnnnnnnnnnnnnnnnnnnnnnnnnnnnnnnnnngggctgccaatcaaaaataaaaaatctgatcctttaaggctctaaaggaaaatcaactgcctcttaccaaccaccctctatcagcagtggcccaggaaggaggtcaagcatcttcggccgatatttaaacatgggcagctttccttcaggatgatcaccgaggctcccgtgactttgaactccctactctccagaatccaggggctatagcgatggggactgcggaattacgagggctggctgttttacaccggtcacattttctattggcagtgactgattcatgggaaagggctttgaaggaactacttcagtgcacacacaaggtacgaacctctcaggcctttcgaagaactttcataattcatgaaagcccagttctgaagattcacgtatccatctggagacctacaggaagaaagtgattgggttcctctggttcttgcctgcttcactgtggatgggaagaggtgacaacctcagtctccctttgggacctgtccaagggtaggcaaccaccttcaccttcacacagattgaggagacactggactttttacccattttctttaatcttcaatattaatattgtgtttacattgatgagaacaagagttaatgccctaccctctgctgggctgtttgtattgagttgcaatgtgaccagcgaaagctgcatttaataaatgaaagtacagactgtttcttcccc

SEQ ID NO: 352393 - DNA, 441 bp, Homo Sapiens
  misc_feature (310)..(310): n is a, c, g, or t
  misc_feature (393)..(393): n is a, c, g, or t
  misc_feature (395)..(395): n is a, c, g, or t
cagcgaagtggcacttcccctacagcatgtctccccctaagtggtgggcttccttggtgctagctgttgttctcggctgtgagatatttcagggcagcaaagccgtagcggcgggacatgtcctgctgaaactcttccttgagggttttgagacagatgcggtattgcttgttggaacggaacttggtaatgtcgaagctgggggcatgaggcatgtggatcatgtaggcattgggcagcacaatgaactcatactcctgcacatccagctccatgatatgagccactttgttccagccaaagcctacanaactccggtcgtactccgggcagtcacgtctcacaacaacatacggctcaaaatcggcctcccactcaacccggtaaggcgtngngcggtccgccacttggcgaagtttgtgggtgcgtggcctttcgtcc

SEQ ID NO: 352394 - DNA, 466 bp, Homo Sapiens
atgattcctcataaatttcccagcctacaggtgtttcttgatagcaacagtaaaggagctaagacactgtggcgttcagttgtatcaggacagacctgggtgtgggctggccctcatacgtcctgccgggagctctgggggctttccagtctgcaggtcgggacgtccatctactctgagatgttctagtatcatcaaaccgccccacagaccatgcctggagactctgcctcacacatccgttcccagcggtcaccagccccgcatccctccctcgtcaccgcatctgtgcgtctcctctgtgacggaggctgttccttggcaatgactatcctcagcttcagccccctgctgacagttttctagctcagaacctggccatgtctgcgccctccctgtcttctcggaaggggtgctgtcattccctgggctacacacctgctttgtcctcctctctcgatcttat

SEQ ID NO: 352395 - DNA, 1076 bp, Homo Sapiens
aaaatcagtataaagtaacacctcttctagaaataaaaaaagatcccttacacactgtttcagtcctattcctatagtctcattctagcagttcctttaccaaacgctactcagtaagatgctgcaactttgccaacaaacgtccaatgaagactaattgagatctctggcgagaacatccccaacaaggtccaggtacatgacttgctactaaagactttattcatgcatttaccaagaaatatccagcatactacagggaatcaagtatgaagatttcctctttacctcttttaaaatactgtattcatttcctattcctacataacaaattgccacaaatttagcagcttaaaacaccactgatttattatctcatagttctgtaggtcagaagtccaagcaggcttaagtgagttctcggcttagggtctcacaaggctggattcaaagtgttggccaggctgggtcttatctggagactggagatgaatgcctttccaagcctatgaatgagcttatgggctgaattcagttcccgtggctgtaggaactgcagttcccagctccttttgctgttagccaaggcctctctcagctcctcaaagccatgtgcattccttctcatgcagccccctctaccttaaaacagcaatggtgcctgaggtccttctgctttgtctcttgacttctgccaccagcccgagaaaactctctgcttttaaaggagtcacaagatttgattagccacccccagacagtcttccttttgctacataacatgatataatcatggatcaaacagggtccacccatgctcaaagtgggaggatattatacaagggcattggtggggggtgtcaagtaggggtcattcttagaaatttgcctaccacaaatatacactggtattcactagaataatctctccaaacgtgccggttccacataaccagtcttttctttgagggacagcactgcttgggagacaacctctttttcattattatgatagattttttaaagccttcatattttgcctacgagtcgtggcaagaaaaagatcggctagatcg

SEQ ID NO: 352396 - DNA, 438 bp, Homo Sapiens
  misc_feature (411)..(411): n is a, c, g, or t
  misc_feature (428)..(428): n is a, c, g, or t
ccacaacaaagaaagaaaatccagttctggtaaagtccagaaccccccttgagccaatgagaaaatatctgccagaggctgttggcgttgatatcagtggccaggtttatgacctcaggaaagaagaaagctgtggtgattcgtcacttgtataatgaagataatgttgacatttctgaggatacattaagtcccaataacagatgttaatgaagcagttgatgtgtctgacttaaatgctactgaaataaagatgcctgaagtaaaggttcctgaaatcaaggctgagcaacaggatgtaaatgttaatcctgagattactgcactacaaactatgcttgctgaatgccaagaaaatcttaagaaactgacttcgatagaggaaaaggttagactgtttgggacaaaaantgaaaggaaaagtgatngtagatgaaa

SEQ ID NO: 352397 - DNA, 2252 bp, Homo Sapiens
  misc_feature (18)..(18): n is a, c, g, or t
  misc_feature (91)..(260): n is a, c, g, or t
  misc_feature (2149)..(2157): n is a, c, g, or t
ttgtagtggagaaacctnttggtcggcgggctgaatagacactggcactatcactatctcagttcatttgcaacctctgcttcccgggctnnnnnnnnnnnnnnnnnnnnnnnnnnnnnnnnnnnnnnnnnnnnnnnnnnnnnnnnnnnnnnnnnnnnnnnnnnnnnnnnnnnnnnnnnnnnnnnnnnnnnnnnnnnnnnnnnnnnnnnnnnnnnnnnnnnnnnnnnnnnnnnnnnnnnnnnnnnnnnnnnnnnnnnnnntgagccactgtgcctggcctacaattgtcacttttgtccccacgaagggagttgttgggagaggagcgagtagtgtggctgcagatgggacagggctggcattggcagctcaggttccaaggcctccccttatgccggcctcaggctttcccttccctctctgtagccaaaagccaggtggaaaccccaccaagggcaactgggagagttctcactgaagccccaaagaaagctgccccaccctgtgcatggcctcctcatttcccagccttggctgcccctgcccaggcgagggtggttaccccatggagaaggtagagcctgcagcaacctgcattcaccatggagccccacccctcagcccctcagttgactttgaaactgggcctctgttggtgggtccccgctgggaaacatggccccctacctggagctgctcttccagtctggcctcattccacagtcctaaaggattaggagccaacaggagccccaaggaggccactagctaatggaaacgagggcccaacatggtcctcctgggcccagggcacatggtccagcttttgcctgcagccctggcttcccgtcagtgccctggaaagcacagtcatcccctttaacaggcccctccaagttccaggaactcatcgtcacctccagcctaatggctgctctgggctgggagcagggaaggagcacaaccgtgccaggccaaggccctcctgagggagcgctgtcagcacaggaaagccctccctccccaccaggtcctctctgaagccactgccaggccaagcactgggcaggtggacagcggccccctcctctacccctgcccacccactcccttctctctggggaccctcacatgtgcctcctgcctccccccagggactggcaggtgggagccctttcgtctcctctccccagggcccacacgtcccagagcatggcaggtttctcggatggaagagagtgggtcactcttggtgcagggtgggagatacgaagtcgggggttcaggaggccccaggtggcccctggggtcctaggtcacgggaagcacaccaagagcgagcaggcagggtcactgtacagggcggagaggggaggagacgggacacgggaggctgcagggccggccacccactacttggcgccatcatccgggttgccttcaccgtccgtcttgccctcctcctcggtcttcaggtcatctgtgctcagcttctgctctttttttctcctcacacacttgaccaccatcagcaccaagatgaccacagccaggaagcccccgacggaggcacccacaatcacggccaccgtggagtcccgctcagggggctcttccatgaggacctgcagatggatcttgccatggccacggtggcggtcaggggggttcatgatgtagcagttgtaaatcccctcatcctccggctgcacgtttctcagcatcaccgacacatcgtacttgctggggttccctgagaactccacgcggtcttgaaaccgctccagcttcaggttaatgatcttcatgcggaactggaggaacatctcctcagagcagttgttgcactcctggtaagtccagttcagggagaactgtttgtggttcactgtgtagcaggagttgaaggtgcagggcaggcgggcgtcagagccattgaggacgttgagggtggcaggtactgtgacctccatgctccgtcctggtggcaccaaagagaaaaagagactgagccccgtgaggctgaaggcagggcgaggtagccaggcatctctgtgcattttcagagactgagatgttagtcgggtgggctacgggagagggtgatttgagggggcgagaactacaagggaggaatggttggatgctnnnnnnnnntgcacggatgtacttcaaagacatatacaacattaaggaagctttatttccatctctctaatatggccggcttgtatgttgctgctaaaaagaga

SEQ ID NO: 352398 - DNA, 646 bp, Homo Sapiens
  misc_feature (51)..(51): n is a, c, g, or t
  misc_feature (134)..(134): n is a, c, g, or t
tgcctcaagctcctcctttgcccatgctgctggccagcttgttaaaggcanacttgtacttcttatcgaaggccactatgtccacgtggtccttgcccagagcagccattgtcaggaataatatctcacggtanattcccctctgcaggtgcaggccagtgggtgggggccctagagtttccagcaggagccccacagccttgtgcacttcattgagtccaacatggcgcagcactgactccaacagtgccaaactaagggatgcaggtacagggcctggccataccacccgcttgggggatctggctgtggaccctccagagcacatagagaggtgggcagctaatggggtcaggggtcagtacatcccacagcagccgtacctgaacagaggctgatcagggggttagccaaggagatggggcctgggagtgcgaaggcccatcacaggaggccagcaccaggcctggtagaataccccatgtgcccgttgcagagctggggctcatccagagcaaggcagagccttcggtcactgagcacagggccaggaccaccagggacaggagcatctttgctgccactggcaccagcagatttggggctggggacactgggccgggaatcaagggtctggacactgagc

SEQ ID NO: 352399 - DNA, 1737 bp, Homo Sapiens
tgctggtgccagtggcagcaaagatgctcctgtccctggtggtcctggccctgtgctcagtgaccgaagctctgccttgctctggatgagccccagctctgcaacgggcacatggggggagcctcccggcgggttgagagtggggcatgggcatacctgagccccctggtgctgcgtaaggagctggagtcgctggtagagaacgagggcagtgaggtgctggcgttgcctgaactgccctctgcccaccccatcatcttctggaaccttttgtggtatttccaacggctacgcctgcccagtattctaccaggcctggtgctggcctcctgtgatgggccttcgcactcccaggccccatctccttggctaacccctgatccagcctctgttcaggtacggctgctgtgggatgtactgacccctgaccccaatagctgcccacctctctatgtgctctggagggtccacagtgagtctggtatttggcctgggtggggaaggggtgggtcccatacccagagggctcagtgattctggtggccttctttcctttcatccaggccagatcccccagcgggtggtatggccaggccctgtacctgcatcccttagtttggcactgttggagtcagtgctgcgccatgttggactcaatgaagtgcacaaggctgtggggctcctgctggaaactctagggcccccacccactggcctgcacctgcagaggggaatctaccgtgagatattattcctgacaatggctgctctgggcaaggaccacgtggacatagtggccttcgataagaagtacaagtctgcctttaacaagctggccagcagcatgggcaaggaggagctgaggcaccggcgggcgcagatgcccactcccaaggccattgactgccgaaaatgttttggagcacctccagaatgctagagaccttaagcttccctctccagcctagggtggggaagtgaggaagaagggattctagagttaaactgcttccctgttgccttcatggagttgggaacaggctgggaaggatgcccagtcaaaggctccaagcgaggacaacaggaagagggatccactgttaccaaaagtcctgattcccccatcaccaacctacccagtttgttcgtgctgatgttgggggagatctggggggagttggtacagctctgttcttcccttgtcctataccgggaactcccctccagggtacccacagatctgcattgccctggtcattttagaagtttttgttttaaaaaacaactggaaagatgcagagctactgagcctttgccctgaatgggaggtagggatgtcattctccaccaaaatatggtccctcttccctgacgttgctgaaggacccaaggctctccatgcctttctacctaagtgtttgtattttattttaaattatttattctggagccacagcccccttgcttatgaggttcttatggagagtgagaaagggaagggaaatagggcaccatggtccggtggtttgtagttccttcaaagtcaggcactgggagctagaggagtctcaagctccccttaggaagaactggtgccccctccagtcctaatttttcttgcctgccccgccttggggaatgcctcacccacccaggtcctgacctgtgcaataaggattgttccctgcgaagttttgttggatgtaaatatagtaaaagctgcttctgtctttttca

SEQ ID NO: 352400 - DNA, 1670 bp, Homo Sapiens
  misc_feature (66)..(116): n is a, c, g, or t
  misc_feature (524)..(524): n is a, c, g, or t
  misc_feature (742)..(742): n is a, c, g, or t
aagcgaggcctgggtggcgaattcggcacgaggctcagttccgccagcccttgagagaacggcaannnnnnnnnnnnnnnnnnnnnnnnnnnnnnnnnnnnnnnnnnnnnnnnnnngtgtcagcacatcaagaggcaggcagctcccaggcagagccctatttggagcgcccttcccctactcgccctcttcagcgccagactacttgggctgggcgaagtctgagagacccagcctcaccccctggacgcctggtgaagagtggtagcctgggcagtgcccgaggggcacagcccactgtggaggccggtgtggcccacatgatagaggccttgggggtcctggaaccccggggatcacctgtgccctggcacgatggaagtctctcagacctgagcctgacaggggaggagccgcctccctggaggcagcccagggggctcaggctcagccctgagtgcccagtccactgacggccctggaagggctaagctgggcggggacccaaggctggtgggcgaagnggatgaggcaggcaccccccgacgagggctgggtgcccgcctccaacagctgctcactccttcccgccactcccctgcctcccgcattcccccacctgagctgcctcctgacctgccacccccagcccgccgcagccccatggacagtcttctgcacccccgggagcgccctggatccactgcctccgagagctcagcctctctgggcagtgagtggngacctctcagaatcttctctcagcaacctgagtcttcgccgttcctcagagcgcctcagtgaaacccctggatccttccagtcaccttccctggaaattctgctgtccagctgctccctgtgccgtgcctgtgattcgctggtgtatgatgaggaaatcatggctggctgggcacctgatgactctaacctcaacacaacctgccccttctgcgcctgcccctttgtgcccctgctcagtgtccagacccttgattcccggcccagtgtccccagccccaaatctgctggtgccagtggcagcaaagatgctcctgtccctggtggtcctggccctgtgctcagtgaccgaaggctctgccttgctctggatgagccccagctctgcaacgggcacatgggggtaagggctgggccaaaggggcatgaggaacgggaatgttgccctgtgtggggcctgtggggtgccagggagagatgggcacatctcttgcccttgagggcaaggggcatcccaaaagctgttggatgtggtggctcagtgggaggcaaggctctggggatgtacatgccctctactgccctccccctttgtgcctgatagggagcctcccggcgggttgagagtggggcatgggcatacctgagccccctggtgctgcgtaaggagctggagtcgctggtagagaacgagggcagtgaggtgctggcgttgcctgaactgccctctgcccaccccatcatcttctggaaccttttgtggtatttccaacggctacgcctgcccagtattctaccaggcctggggctggccctcctgtgatgggccttcgcactcccagggcccattctccttggctaacccctgattcagccctctgttcaggtaccgcctggttgtgggaatgtactgaaccccttgacccccc

SEQ ID NO: 352401 - DNA, 907 bp, Homo Sapiens
  misc_feature (30)..(30): n is a, c, g, or t
cctcttttttcaaacaaaatttcaaatttnctgttgtttatttcagtagtttctttcttgacctattccatctgggctagcagttgtaaaaacaaagcagagtgcaatgaactccatccgtctgtttctgtggtacagattttagccttcatcctaataagaaacatccctggatatgcccgttcagtttacagttcattttttgcttggtttggaaaaatttcattagagctatttatttgccagtatcacatatggctggcagcggacacaaggggtatcttggtactgatacctgggaaaccctatgctcaacatcattgtcagcactttcatatttgtttgtgtggcacatgaaatttctcagatcactaatgatcttgcacagattattattcctaaagataactcatctctcttgaaaaggttggcatgtatagctgcatttttttgtggactcctcatcttatcatccattcaagataaatcaaaacattaggttccaaaaattctaaaaaacctaaactcttcaggctacctttgtgtgtctctagaagagaaaagcatctatctggagatataaatgtgtatgtaaatataaacgtttgtggcaagaggacagttctgtgacatctgttgaacatatgtggttgtatatatttggaaatgtacatatccaatatgaaatacctaaaccaaccaacaaaccaaaaaccagaatgcattgaatagggatggcatgtggaagtctttttcttcctgaatcctaaaatttcccatttgggaaagtgggatttttaaagttaaaccttaaggaaaggcgcagggaaaaatggaattcaccctttttccaaggtaaaaaaaggggataggaagtaaattttaaaatttaaaccttttaggggga

SEQ ID NO: 352402 - DNA, 1678 bp, Homo Sapiens
  misc_feature (9)..(9): n is a, c, g, or t
  misc_feature (41)..(41): n is a, c, g, or t
  misc_feature (986)..(1083): n is a, c, g, or t
  misc_feature (1115)..(1199): n is a, c, g, or t
  misc_feature (1314)..(1323): n is a, c, g, or t
atgggcgtntggctggggcgtggccaccacagagcacatgngctgtgtctaggcgcaagactttagcagtatctgtttacatgcgcaaggatcaagccgactacctgtgctgtctactgggacagcagtctccgagctactccgtacctccctctgccaggtcgtggagttaggccccagtccctacttgtcactggttcccactgtgctcctaactgtgcagcacctgggagctctggcctggggctggaggccctggtaggagctgcagttggaggccgttctgtgcccagcagcggtgagcggctcccatgggccctgtgtctgcagggagccagggctgcggcacatgtgctgtgaaactggcacccacctggcgtgctgctgccgccacttgcttcctgcagcacctcctaccctgctccgtgtcctccctctccccgcgcctggctcaggagtgctggaaaagctcacgcctcggcctgggagcctggcctcttgatatacctcgagcttcccctgtgctccccagccccaggaccactggccccttggcctgaggggctgggggccccacgacctgcagcgtcgagtccgggagagagcccggagcggcgtgccatctcggctcggccttgctgagagcctccgccctggctttctccctgtctggattcagtggctcacgttggtgctacacagctagaatagatatatttagagagagagatatttttaagacaaagcccacaattagctgtcctttaacaccgcagaaccccctcccagaagaagagcgatccctcggacggtccgggcgggcaccctcagccgggctctttgcagaagcagcaccgctgactgtgggcccggccctcagatgtgtacatatacggctatttcctattttactgttcttcagatttagtacttgtaaataaacacacacattaaggagagattaaacatttttgctaacgacaacnnnnnnnnnnnnnnnnnnnnnnnnnnnnnnnnnnnnnnnnnnnnnnnnnnnnnnnnnnnnnnnnnnnnnnnnnnnnnnnnnnnnnnnnnnnnnnnnnntgctagcagttccgcgccaacaccgccccatnnnnnnnnnnnnnnnnnnnnnnnnnnnnnnnnnnnnnnnnnnnnnnnnnnnnnnnnnnnnnnnnnnnnnnnnnnnnnnnnnnnnnttttttatgttaacaccaacatgtgaccataaacactgtgaagacgagacacggtattatccttactcataactccacccagattacacctttacgccaatatttctttcaccannnnnnnnnngcccttttcactccccaacacttctcccaccccacccgcgcgcgacccaccttttagtggcgccgcctggagcattataactctatactctgtgcgggcggggtttattgcacacacacgccgcgtcggataaaccctcaccgccggccgcaggcaagcccacacgcaccggcaaattgttaaggtttgacgctcatccacaccctctccccttttcttcgactgcacgcaccccactcgcgcctactcagcaacagacccgcttgtcccggacgacgcgaaggcgtgcgcgaccgatgttggataaaagtctctgtccgcccctcaccacccggctgtattgatatccttctat

SEQ ID NO: 352403 - DNA, 1207 bp, Homo Sapiens
  misc_feature (878)..(878): n is a, c, g, or t
  misc_feature (883)..(883): n is a, c, g, or t
  misc_feature (890)..(890): n is a, c, g, or t
  misc_feature (894)..(896): n is a, c, g, or t
  misc_feature (933)..(933): n is a, c, g, or t
  misc_feature (935)..(936): n is a, c, g, or t
  misc_feature (1147)..(1156): n is a, c, g, or t
gggaggcgcggacagcgctgcttccgcggcggttggggtggtggggccccgggcggcgttgaccatgacccagcagggcgcggcgctgcagaactacaacaacgagctggtcaagtgcatagaggagctgtgccagaagcgggaggagctgtgccggcagatccaggaggaggaggacgagaagcagcggctgcagaatgaggtgaggcagctgacagagaagctggcccgcgtcaacgagaacctggcacgcaagattgcctctcgcaacgagttcgaccggaccatcgcggagacggaggccgcctacctcaagatcctggagagctcccagactttgctcagcgttctcaagagggaagctgggaacctgaccaaggctacagccccagaccagaaaagtagcggcggcagggacagctgaccagaccacgggcagggcctgcctccgtgtgcccctcagctcagccccagcaagtgtgtgctcagagcatctttgttcttcacggcagcagctaccttccctcactgtctcaggtgccgagaggggcaggtgccagcctccactggcatcagtgacaagcccagggcacagcccacccgggggtcctcgcttcatgctcacacaggctatggggatggtgggctccaggtcagctctgcaaggggcttgtctctgtggcacccacactcctgccctgccagggaggctctggttgtctgagcaccatgggggccccctcaccttgtccctcctcagccagcagaggcccagggcaagggacaggaggacaggggttctccttcaccacagaacccaaacctcaggtctcacccctgtggcctgtgattatgaataaagattatcttttgtaaangaaanataaatnttannnaaaaaacatagttaaaataatacatcacaaaaaaatntnnaagggcgcgcggccccaagaatccccctccgagggggcccagaggtttcaggtaccccaagtttttttgggaacaaagggggccccaaaaggggggggcgcgaatttattagctaagccccggggccccccccttttcacacgccctgggggcgggggaaaaaggcttaacttggggaactcttttgggggagggaaacccttcttctgtnnnnnnnnnncaaaatttgggggaaaaccctcccttcagagaattttacagctcttagggg

SEQ ID NO: 352404 - DNA, 1182 bp, Homo Sapiens
  misc_feature (44)..(47): n is a, c, g, or t
  misc_feature (51)..(51): n is a, c, g, or t
  misc_feature (892)..(914): n is a, c, g, or t
  misc_feature (1126)..(1126): n is a, c, g, or t
tttcccactttacgcgcctagcccgggggcgggccgacccgggnnnnaaanacaaaccccgcacccacgcagctggtaccggtccggaattcccgggatcgttgaccatgacccagcagggcgcggcgctgcagaactacaacaacgagctggtcaagtgtgagcggcgcagccgggacggggaggtcgggagggccgcagggccgggttcccggctcgcagcggggtgcccctggacccgcctcgctccgggcatcgcgcggctgagcagagccctccgtgccggaggccgggtgtccgtggcccgagccctcgctggctcgcaggccccgcgccgggcgctcgggggtggtgcctgactctggcttcctcgggtggaaggaggcccgccctccgccgccgcgctcctgccctgggcccacagcgccgcccctcccggcccccaggcatagaggagctgtgccagaagcgggaggagctgtgccggcacatccaggaggaggaggacgagaaccagcggctgcagaatgagatcctggagagctcccagactttgctcaacgttctcaagagggaagctgggaacctgaccaaggctacagccccagaccaaaaaagtacccgcggcagggacagctgaccagaacacaggccagggcctgccctccgtgggcccctcatctccaccccagcgagtggggggcccaggagcatctttgttctttccgggaagaaagccccccttccccctcactgggccccggcgccccacgaggggcccagctggctttccttcccctgggcttcaggtggccacgccccggggggaaggcccaacccggggggttccctcccccttcttccttcagctcgcggctaatgggcactgggnnnnnnnnnnnnnnnnnnnnnnnactccgcggggccactggtcccttgcagtgaaaaccccccgtgcatccgattgtccaggctaaccgccccccacacctccgcgtgaaaattcaggccgcgcccctcccgcggccatgaagtcaagatggatgtaataacctgtgacatccccccgtgccacggacaaaatcacgcgcgagcctcacgcatagtccatccgtgtatcgcctanttcactgccctacgcaccccacagaaatattacactgccagtcggcgtacgcaccc

SEQ ID NO: 352405 - DNA, 747 bp, Homo Sapiens
cccacttattgcactacatcactgagttcccgtatgccaagttatggccacttacatccgcgtcagcaaaactggtgccgagggagctgttcttgacgaagctaaaaatatcaataagtcttggtctgctcttggaaacgtgatctctgctttggcagaagggacaaaaacacatgtgccataccgggacagcaagatgactcggattcttcaggactctttgggtgggaactgcagaaccaccatcgtcatttgctgttctccttctgtcttcaatgaggctgagaccaagtccacactgatgttcggacagagagctaagaccatcaagaatacagtctctgtgaacctagaactgacagcagaagaatggaagaagaaatatgaaaaagagaacagagaaaaacaagactttgaagaatgttatccagcatctggagatggagctaaacaggtggaggaatggagaagctgtgcctgaggatgaacagatcagtgccaaggaccagaagaacctggagccttgtgataacacccccatcatagacaatattgctcctgttgttgctggcatctctacagaggagaaagagaagtacgatgaggagatctccagtctctacaagacaactggatgacaaggatgcatgaaattaaccagcagagccagctggctgacaagctgaagcaaaccgatgttggatcaggatgagcttttagcttccacaagaagagactatgagaaga

SEQ ID NO: 352406 - DNA, 923 bp, Homo Sapiens
tttttccggcccctcaacgaagcggagatcctccgcggggacaaattcatccccaaatttaaaggcgatgagaccgtggtgatcgggcaagggaagccatatgtcttcgacagagtgctacctcccaacacgacccaagagcaggtttacaatgcatgtgcgaagcaaattgtcaaagatgtccttgaaggttataacgggacgatttttgcgtatgggcagacttcatcaggaaaaacccacaccatggaggggaagctgcatgacccccagctcatggggatcatcccacgaattgcccatgatatctttgaccatatctactccatggatgagaacctggagtttcacataaaggtttcctattttgagatctacttggacaaaataagggacttacttgatgtatccaagaccaacttggctgttcatgaagataaaaacagagtcccgtatgtaaaggggtgcactgagccggtttttgtgtcgagcccctgaggaagtcatggatgtaatagatgaaggcaaagcaaaccgacacgtggctgtgacaaacatgaatgaacacagctctagaagtcacagtatcttcctgataaatattaaacaagagaatgtagagactgaaaaaaaactcagtgggaaactttatttggttgatttggctgggagcgaaaaggtcagcaaaactggtgccgagggagctgttcttgacgaagctaaaaatatcaataagtctttgtctgctcttggaaatgtgatctctgctttggcagaagggacaaaaacacatgtgccataccgggacagcaagatgactcggattcttcaggactctttgggtgggaactgcagaaccaccatcgtcatttgctgttctccttctgtcttcaatgaggctgagaccaagtccacactgatgt

SEQ ID NO: 352407 - DNA, 900 bp, Homo Sapiens
  misc_feature (106)..(106): n is a, c, g, or t
  misc_feature (297)..(297): n is a, c, g, or t
agtcggcttgaccgagaccaccttcccaaccctggccaagccctggagggggggttttacaaccagcatggccctatgtgcccaatccctgcgtgagcagggccgncgggcttcctgggaatgccggaatgttaaaaacagaaccaaggccattccaattactcccccagaggcaagtgggcgcagcaccagggaaatgtatctccacaggttctggggcctagttactgtctgtaaatccaatacttgcctgaaagctgtgaagaagaaaaaaacccctggcctttgggccagganggaatctgttactcgaatccacccaggaactccctggcagtggattgtgggaggctcttgcttacactaatcagcgtgacctggacctgctgggcaggatcccagggtgaacctgcctgtgaactctgaagtcactagtccagctgggtgcaggaggacttcaagtgtgtggacgaaagaaagactgatggctcaaagggtgtgaaaaagtcagtgatgctccccctttctactccagatcctgtccttcctggagcaaggttgagggagtaggttttgaagagtcccttaatatgtggtggaacaggccaggagttagagaaagggctggcttctgtttacctgctcactggctctagccagcccagggaccacatcaatgtgagaggaagcctccacctcatgttttcaaacttaatactggagactggctgagaacttacggacaacatcctttctgtctgaaacaaacagtcacaagcaaaggaagaggctgggggactagaaagaggccctgccctctagaaagctcagatcttggcttctgttactcatactcgggtgggctccttagtcagatgcctaaaacatttgcctaaaggc

SEQ ID NO: 352408 - DNA, 1061 bp, Homo Sapiens
  misc_feature (982)..(993): n is a, c, g, or t
aagtagcgaggcctgggtggcgaattcggcacgaggacctgctgggcaggatcccagggtgaacctgcctgtgaactctgaagtcactagtccagctgggtgcaggaggacttcaagtgtgtggacgaaagaaagactgatggctcaaagggtgtgaaaaagtcagtgatgctccccctttctactccagatcctgtccttcctggagcaaggttgagggagtaggttttgaagagtcccttaatatgtggtggaacaggccaggagttagagaaagggctggcttctgtttacctgctcactggctctagccagcccagggaccacatcaatgtgagaggaagcctccacctcatgttttcaaacttaatactggagactggctgagaacttacggacaacatcctttctgtctgaaacaaacagtcacaagcacaggaagaggctgggggactagaaagaggccctgccctctagaaagctcagatcttggcttctgttactcatactcgggtgggctccttagtcagatgcctaaaacattttgcctaaagctcgatgggttctggaggacagtgtggcttgtcacaggcctaaagtctgagggaggggagtgggagtctcagcaatctcttggtcttggcttcatggcaaccactgctcacccttcaacatgcctggtttaggcagcagcttgggctgggaaaaggtggtggcagagtctcaaagctgagatgctgagagagatagctccctgagctgggccatctgacttctacctcccatggttgctctcccaactcattagcccctgggcagcatcctcctgagccacatgtgcaggtactggaaaacctccatcttgggctcccagagctctaggaactcttcatcacaactagatttgccctcttctaagtggctatgagcttgcaacatatttaataaattgggaatggggttttgggggattattgccaannnnnnnnnnnntggaattggaaccagggggaaatttattaaaaggaaagtgggtgggctggtaaaaaataaccctatcc

SEQ ID NO: 352409 - DNA, 428 bp, Homo Sapiens
aactcttcatcacaactagatttgcctcttctaagtgtctatgagcttgcaccatatttaataaattgggaatgggtttggggtattaatgcaatgtgtggtggttgtattggagcagggggaattgataaaggagagtggttgctgttaatattatcttatctattgggtggtatgtgaaatattgtacatagacctgatgagttgtgggaccagatgtcatctctggtcagagtttacttgctatatagactgtacttatgtgtgaagtttgcaagcttgcttctagggctgagccctggactcccagcagcagcacagttcagcattgtgtggctggttgtttcctggctgtccccagcaagtgtaggagtggtgggcctgaactgggccattgatcagactaaataaattaagcagttaacata

SEQ ID NO: 352410 - DNA, 605 bp, Homo Sapiens
  misc_feature (67)..(118): n is a, c, g, or t
  misc_feature (216)..(224): n is a, c, g, or t
tgttggcacacacctgtaatcccagctacttgcgaggctgaagacaggagaaccacttgaaacacannnnnnnnnnnnnnnnnnnnnnnnnnnnnnnnnnnnnnnnnnnnnnnnnnnntgaacaagagcgagactgtctcctaaataaataaaacattttaaaaatggttaaaatggcaacttttatgtgtactctgccagaattctcttaagttnnnnnnnnntgtgagttttgaacctcccctccaagggcctgggagctgccaacacagagtcagccacagtgtttccagatggacagaacgaatcaaaaagatgtctgccagacactatgccaacaggaagatgggactcaagttgtttttaaaattttttgtgccttggcctgctggagaaataaaagctctgaacttgagttcacataggcctgaatgtaaatgctggttccaacactggctgtgtgaccccgggcaaatcactgagtctttctgggcctcagttttctcatctgtaaaatggagataagcagcagctctttgttaactcatgaaaaagccctaagtgtagtgcaggaacacagtaaggaccagcaagggttggtttct

SEQ ID NO: 352411 - DNA, 1853 bp, Homo Sapiens
  misc_feature (25)..(25): n is a, c, g, or t
  misc_feature (208)..(208): n is a, c, g, or t
  misc_feature (471)..(490): n is a, c, g, or t
ccccattccccaacggtcatggctnttaagttatcctaggctgttcttagtaatccagcccatcagaaccactaaattccctccctgttcacatgggttaaatacaggcttctgatttagctttacttcctagtaaagaggccagactacagagaatattaaacagctccttttaactatgctgcatccagactgcctcattccaccntaagagaaggtgcccacatgataatatgcactagagatctaccaatctaagtttctgaggtcttctttttggataagttccagcactggaatattcagaatttcaaaggaaaattacatgttgactactgacattttagactgcatattcaaagttaaggagcaagattaagactagagtgccaaccaagatgctgttaaacatggcaaaaaggtgacagcacaaagggaccaaagaggctgattctttagaggccctttgcnnnnnnnnnnnnnnnnnnnngcaacaagtgtagaatttcccctgatcaaaatctgaatattggttaatgcatgttttctcattctccgtgtatgaacccactcctaacctctctcattgcctttttaagcttaagagagagaaataaaagaaaatggatatagaccatgtatttttatttatgaaaagagaggcatattctaatagtcataaggcaatgtgtttaagagctgcacctgaactggtattctcaaaactgaaaatagttatcaactctattcaacttgtaagatgtatctatgtgcttcccaagtcactggttgtcacccaaatggaccacggtgactccatcactgccttaaggaggcattatatactgtgtgtagtatgcacatgtattttctaaagaaatgacattaagagagaaaagaacagcctttcaacacactcagttcctcaaactaaggggtgacagtgctataatggctcccttttaatctcctcacctactcagttatcaaatacctccacaaattacacaaaataagggccacgagacaaagctccatggtgaattgcactctcttcagcatgctgctttcaattcactggtttctaatttcccattcctgatttactgcaggagtaaaggtgagcaatcacccaactgatgacaaagctaaaacaggaaaacaggataaacacgctagggctctgcgcgtttggaggctggctatcagcaaggaaagctgtggaggcaactatagaccaggcaaacatcacaatcaccacaaaaagccgaaccatgaagtttacaggtcctggatcagccaaaagtaccagccggcaaatcagcattgctactgtcaagggaagtatacagtaacccagcacacagaggctctgaaaaaaagatatgttccctccaagaagttttgagttgagggtgatggtaactgcaccaaaccagacaatgacaaacacctctgcaaattggggccctccatctttttcactatctgcagagtctctttgcagcattaatgcgagtgtcacacaaaggatcaaagggccccacaaatcccaatctctcaaaagagtattacttttccttgggtacaaaacatgcatgaattttttcccaacagcttttagatcacgcatgatggtattgcgaacagattcatttaatgtggagctgtcaaactcccggatgcgagatctcataggaatggtgatttctccttctacggggatgtcttgtgagatggatatatctgaaaggcctgcaaacaggggcctgggcgatgctgtccccgggtctcctggagactcctccgcttccgccatcttggccctccttctcccgggtcgctcccccgct

SEQ ID NO: 352412 - DNA, 429 bp, Homo Sapiens
agatctagtcctaggtgttcgatatgctattgaggactgtgtatttttatttcatttgtcacctgtgtgtggtgctttaatcctgtgccctaaactcccgccttggccatggcggtgtttctgtggactcgtggggtttccgtgtgcacacgcgtgtcctctgtctgacagtggctttgcttccccttgtcagtctgtgcctcggcttctcactgcactggcgaggtgagccggcgctcgctaatcttattcccagtctcggtgaacatgggctcagtctctcccggctcagtgttgggtttgcactggtgcacttacaggcggaagagcttcctcatttgctgagggcttttcctgaatccgtgttgaatgtggtcagctgcctttcctgcactccagcctgggtgacaagagtgagactccatctcc

SEQ ID NO: 352413 - DNA, 1287 bp, Homo Sapiens
  misc_feature (234)..(244): n is a, c, g, or t
agtagaagaagcctgggtggccgcgttatggagtattggggcgccctctcgagagaggcattttgtttcatacgggcgccccacaccccggataaatgcacgggtgggccgcgtgcgtgcggactttgcaccactttggcgtggtcaaaaatgggtgataacaggggaatgtacagagaggcgggacggaaaccacttataagaggtcagcaactccccgtttgccgatctctnnnnnnnnnnnaaaagatttgccttaaaatccactttagaaagggggaaggcggggaaaagagattctaaaagggaattcttagcgcgcacctttggaaggtccaattcctacggtatccaggggacaggcataggatcttggggggagggaagaaagacagtttttgtgaaagcggatcgcgcccttcccgcagggcgaagagaattaaacacagggttattaaagttaaaccttcggagccggaaaggttcccccccaatttagggcacaggtttcggattccttcttccccagggccttcctggaacaatgttccaggggcgggcccttagcccaacaagaaataggaggggtcaagggggtccaggagtacggaagggtcagcagggaccctcaatactgattcttctctggctgaaggtgggcaggaagcagacatagctcaaatactgagcagccaaaaaaagaagaagatggcgagaaacaggaagagggaatcctgccagctggaggctgggtgaccctgtcccagatccacacctgtaccccggcggaaaggctcatgggcattgaagacggtggtgaaaaagccaaagggaaaagcaccaacaccaaatgagaagtggaagcccccggtatcaccaaatggctggaatccccctctgctctccggagctggtctctggccctgggggcggggtggagtttttaatctgggatcctggggcttctggctccctcgcccataaagcgggacaaccttctctctgctgatcccagctttacatactggacactcttgccgttctggccgtgtctccagccactgatgaagacatggccaacagtacaggtggccacacacactgaccacagcttcccgagcagtctccaaacatatattacattcgaaggtcgcgcccgccccgccccgctcgcgatttggcccttcggggcccccgtcctcctcctccgctgctgccatggccggttttgtttcgccccacgtacccttcagtccccccaaatacacatacacacgccccaacaaa

SEQ ID NO: 352414 - DNA, 1133 bp, Homo Sapiens
gggaggaaaccttgaagcctgcccaacgatcgtgggcaggaggtggtttctggtttgttggggcgtgtgtatgtgtatttggggggactgaagggtacgtggggcgaaacaaaaccggccatggcagcagcggaggaggaggacgggggccccgaagggccaaatcgcgagcggggcggggcgggcgcgaccttcgaatgtaatatatgtttggagactgctcgggaagctgtggtcagtgtgtgtggccacctgtactgttggccatgtcttcatcagtggctggagacacggccagaacggcaagagtgtccagtatgtaaagctgggatcagcagagagaaggttgtcccgctttatgggcgagggagccagaagccccaggatcccagattaaaaactccaccccgcccccagggccagagaccagctccggagagcagagggggattccagccatttggtgataccgggggcttccacttctcatttggtgttggtgcttttccctttggctttttcaccaccgtcttcaatgcccatgagcctttccgccggggtacaggtgtggatctgggacagggtcacccagcctccagctggcaggattccctcttcctgtttctcgccatcttcttctttttttggctgctcagtatttgagctatgtctgcttcctgcccacctccagccagagaagaatcagtattgagggtccctgctgacccttccgtactcctggacccccttgacccctctatttctgttggctaaggccagccctggacattgtccaggaaggcctggggaggaggagtgaagtctgtgcatagatgggagagccttctgctcagaggctcactcagtaacgttgtttaattctctgccctggggaaggaggatggattgagagaatgtctttctcctctcctaagtctttgctttccctgatttcttgatttgatcttcaaaggtgggcaaagttccctctgactcttcccccactccccatcttactgatttaatttaatttttcactccccagagtctaatatggattctgactcttaagtgcttccgccccctcactacctcctttaatacaaattcaataaaaaaggtgaaatataaaa

SEQ ID NO: 352415 - DNA, 863 bp, Homo Sapiens
cgtttctgggacttggcaccgacagtgtccgagtggtcaaggctgatgagagagggaaaatggtccccgaggatctggagaggcagattggtatggccgaggctgagggtgctgtgccgttcctggtcagtgccacctctggcaccactgtgctaggggcctttgaccccctggaggcaattgctgatgtgtgccagcgtcatgggctatggctgcatgtggatggctgactctgtggcctggaatccccacaagctcctcgcagcaggcctgcaatgctctgcacttcttctccaggatacctcgaacctgctcaagcgctgccatgggtcccaggccagctaccttttccagcaggacaagttctacgatgtggctctggacacggcgagacaaggtggtgcagctgtggccgccgtgtggactgtctgaagctgtggctcatgtggaaggcaaagggcgatcaaggcactggagccggcgcatcgaccaggcctttgtccttgcccggtacctggtggaaggaaatgaagaagcgggaagggtttgagctagtcatggagcctgagcttgtcaatgtgtgtatctggttcgtaccccccagcctgcgagggaagcaggagagtccagattaccacgaaaggctgtcaaaggtggcccccgtgctcaaggagcgcatggtgaaggagggctccatgatgattggctaccagccccacgggacccggggcaacttcttccgtgtggttgtggccaactctgcactgacctgtgctgatatggacttcctcctcaacgagctggagcagctaggccaggacctgtgagccttctctgtctggatcgcccagcagggtaccgag

SEQ ID NO: 352416 - DNA, 1113 bp, Homo Sapiens
atgtcattgatttttttaaaaagctggatattgtggaagatagtatttatatagcttatggacccaatgggaaagcaactggcgaaggctttgtagagttcagaaatgaggctgactataaggctgctctgtgtcgtcataaacagtacatgggcaatcgctttattcaagttcatccaattactaagaaaggtatgctagaaaagatagatatgattcgaaaaagactgcagaacttcagctatgaccagagggaaatgatactaaatccagagggggatgtcaactctgccaaagtctgtgcccacataacaaatattccattcagcattacaaagatggatgttcttcagttcctagaaggaatcccagtggatgaaaatgctgtacatgttcttgttgataacaatgggcaaggtctaggacaggcattggttcaagtttaaaaatgaagatgatgcacgtaagtctgaacgcttacaccgtaaaaaacttaatgggagagaaacttttgttcatgtagttaccctagaagatatgagagagattgagaaaaatccccctgcccaaggaaaaaagggattaaaagatgcctgtgccaggtaatcctgcagttccaggaatgcccaatgcgggactgcccggtgtgggactgcccagtgcaggacttcccggtgcaggcctgcccagcacaggactgcctggttcagcaataaccagtgcaagactgcctggtgcgggaatgcccagtgcatgaataccctagcgccggaggtgaagagcatgccttcctgaccgtagggatcaaggaagccaattatgggcctccatttaacttccctggcaattttggtgaatcaaaaatcttaagacctagacccctcccctcattcatttacaacctgccccccctttaaatccatgcgtcatgatgtgccacaaacacaacaaattggcggccttatctattttcccacaatatgatattatgtgcacctatttcacccttatacgcctcggagatatccatatacgttaataactatatccccgtaaatcgcccctttaataccatttttccaccaaatacaccccgtttatctctgttcataa

SEQ ID NO: 352417 - DNA, 491 bp, Homo Sapiens
  misc_feature (233)..(233): n is a, c, g, or t
attgcaattgtaggctataaaacacataccacttgtattgttcctgaaggaggtactccgataaccccttttaccaagggactctaaagtaatcacacccatataaggagagggagcattgtcatctgaaacactgtagaatgacacttcaactggaagagtcaaatgtgtggggcagaaagcaccacttgcccctacctcggcagtaaaaccatcaacaatgccgagaggancgaaacgatagttcaagacagattcctcaaaatttcctaggagactaagacttgttataggtggagcactagaactcaaaaatggtttttcatgaatatctggatcatcttcaatgtttagacatggtcgaggacttctagatgagaagcttttcagatgtagtaatgaagaatccagatcaaagcaacctgattgtgtttttctttgaggaacagggctgaaagaagaggcaatccagtttgaggatgacagtcacc

SEQ ID NO: 352418 - DNA, 970 bp, Homo Sapiens
  misc_feature (851)..(851): n is a, c, g, or t
  misc_feature (943)..(943): n is a, c, g, or t
  misc_feature (955)..(955): n is a, c, g, or t
agagcctttcatcctcaaactggattgcctcttctttcaagccctgttcctcaaagaaaaacacaatcaggttgctttgatctggattcttcattactacatctgaaaagcttctcatctagaaggaatctgtcttgaactatcgtttcgatcctctcggcattgttgatggttttactgccgaggtaggggcaagtggtgctttctgccccacacatttgactcttccagttgaagtgtcattctacagtgtttcagatgacaatgctccctctccttatatgggtgtgattactttagagtcccttggtaaaaggggttatcgagtacctccttcaggaacaatacaagtgaccttatttaatcctaataagactgtggtgaagatgtttgttgtgatatatgatttacgagatatgccagccaatcatcagacattcctacgacaaagaactttttctgtacctgttaaacaagaagtgaagagaagtgttaataaagagaacatccgacacacagaagaacggttattacgctacctcatacatctgaggttccagagttctaaatctggaaagatctacctccatagagacgtacggctcctgttctctagaaagtcaatggaggttgatagcggtgctgcatatgaactcaaatcttacactgaatcaccaacaaaccctcagttttcaccaagatgttgataaggagtgatgatttaaagtatttactcagtacccaagtttgcaagtaaaaattagcatagaatggagtgtaccaaattaacaatcaggagagtggattctctcctgttatcctggaccagtttttatgaaaggattcctganatgaaatccatatattccatgtagactgggaaaactccatgtcctaatcccttttggtaatggttggaaaccaatttcaattgggacaaggntggcaattgggnaaaaccccccaggtt

SEQ ID NO: 352419 - DNA, 997 bp, Homo Sapiens
ctctgaacttaggtcaatgggaggagctggatgagaaacccaaaagacaaaactgtgacaaaacccaaaatgggcggagacgaacccaagtaggggaccgggaataagaagtgggtgagcaatagaaggggcagcctcctctgacccaggagccgcacacttctcttcaccccaaccttacccaacggtaaaaagcgcatcatatcagacccggaaggccacctgctcctctcccatttggtcagcggaagggtcaggtgcagagctgggtggtccacatcttacgagctggctacaggttggggccccgggcggcagcccctctactgcaaccctaagcccaaagccacccactccttgcctttgaggcacctcctcctgcccccttcactggagaaacagctcagccttctctctgcagcctctggagcaatcatccacccccgccgctcacaggggtgaggcagctcaggcaggggtgagccgggggcttgtggcccaaagaatacattcacgtggcaaggcagaagagctggggctttcaggttcaaacccagggtgtcccccaaaatggcagcagtgggagacgcccctcaccagagccagagtcctgctgccccaccctgccagccagagaggttggcacggattggcccctcccgtctactcggccagcacaagatggcagccagagagctggggccgctcgtccaatttgtgcaactgtcccccaaagcagcgaagccaaggggctactttggccccaccccggacacctcagccagcctcagtgacaggagctgctcacaacaggtctggcgggtggggctcagacaggcctcctgtgcaaactgctggcccccagcttccagttaccccatggcccgccttctggggggtaagtatggccttgggggccaggcaggacaggtccacggggcctgtgtccccactgccccaaaataacagtgtgttttttctttcagcctcctaacca

SEQ ID NO: 352420 - DNA, 436 bp, Homo Sapiens
  misc_feature (406)..(406): n is a, c, g, or t
gcaccgcgcgctagcccggggcggctccgcagcccgccgggagctctgaccgaggcgcctcgctggggcggggaccttgccttgcccggggccatttcataattctgaatcatgtctgataacggagaactggaagataagcctccagcacctcctgtgcgaatgagcagcaccatctttagcactggaggcaaagaccctttgtcagccaatcacagtttgaaacctttgccctctgttccagaagagaaaaagcccaggcataaaatcatctccatattctcaggcacagagaaaggaagtaaaaagaaagaaaaggaacggccagaaatttctcctccatctgattttgagcacaccatccatgttggctttgatgctgttactggagaattcactggcatgncagaacagtgggctcgtttactacagacct

SEQ ID NO: 352421 - DNA, 814 bp, Homo Sapiens
  misc_feature (44)..(80): n is a, c, g, or t
tgataatcactatagggcgctgcgcgtattcgcggtggcggcgnnnnnnnnnnnnnnnnnnnnnnnnnnnnnnnnnnnnnatcaggccaaatcggccgagctcgaattcgtcgagagcggacgttcaccgggaggctgaggtcggagtcccgattttctcctgctgctgtggcccggacatggcgactcccggccctgtgattccggaggtcccctttgaaccatcgaagcctccagtcattgaggggctgagccccactgtttacaggaatccagagagtttcaaggaaaagttcgttcgcaagacccgcgagaacccggtggtacccataggttgcctggccacggcggccgccctcacctacggcctctactccttccaccggggcaacagccagcgctctcagctcatgatgcgcacccggatcgccgcccagggtttcacggtcgcagccatcttgctgggtctggctgtcactgctatgaagtctcgaccctaagcccagggtctggccttgaaagctccgcagaaatgattccaaaacccagggagcaaccactggccctaccgtgggacttactccctcctctcctttgagaggcccatgtgtcgctggggaggaagtgaccctttgtgtaactgtaaccgaaagttttttcaaaaatcctagatgctgttgtttgaatgttacatacttctatttgtgccacatctcccctccactcccctgcttaataaactctaaaaatccacttgtatttctaacaaattacttgaggtgggccccgggacccttcgccttatggagtcgtt

SEQ ID NO: 352422 - DNA, 1376 bp, Homo Sapiens
  misc_feature (143)..(143): n is a, c, g, or t
aacataaataccaagtaggggatgcatacagggatgtgacttcgatgagagtgagtagcggcggtgacacgtaggcagtatgagtaaattggtgggcagcgtagatatatcattagggatgaattcgtggagtaggtatgganggtggagtgcgacgtagggcggggtgttcgagtgtgggagggggaatagaggagtagggtgggtagacgtagaagtggctacccttagctggactgatcgtaggatataggtcggagataaatgcctagcgctactcgttagtagatagggaggggagggacttcggtgagaaactttccgatccgggaggagacagtcgggaatacgtaatggtgtcgagcgttggtatggaataatcaagataggtaggagtataaagtatccttgagagaagaatagatcgaagaagcggagagagagaggtcatagtcagttgggtgggtgaagagactggagggggggagggcggaaagtgttgtatactggaaggtgaactgaaaagatacgccattcaagttaggggataaattagcgggaaagtgggtatgattgtataagatcagatagggggtcgtaatgtccagattgacgaaatgtaggtggaatgtgaagggcgggagagtgggtgggggtgaggagtaagagcggttcccgaggtggtgaagattttaagcgaagcgttctttgaatgatgcatgttgtccacgcgtggtttggtacccgggggggaaaccaaatcggatccgagagtcgtgttctaaaggccagtactggccacactttctcctgccgccttcctcaaagcgggtggtcatgacaatcaccaagactttttgctcccataccatgagccagaaatcacgataggtattctccaaaggaccttgtgtgccaatgtaagcattcttctgcttgtagccatccatgaaactggcattgatgtaatctgtctgagtatggccacttcgctttgttagcttcactctagtttggtccaggcagggtacatccccataacggtttttctctaggtttcctggagacatggaacagtggaaagtgccaacagggttctcacgacgaatgtcttcatattcctcatagattccttgcttttgcctggcattaacatagtccaccaactcttggatggtcatagcatggggacctggaacatgtactgagtcccagtctaaggcaggagggagggagaacaggatgatctcctcgaagggatctgggtggccgttcacctggggtaggaactggaaattccaagtggcgagatcaattttgacgtactccacccaggctttctggatagacactccgagcagaagacaggtgttcct

SEQ ID NO: 352423 - DNA, 261 bp, Homo Sapiens
  misc_feature (40)..(40): n is a, c, g, or t
  misc_feature (48)..(48): n is a, c, g, or t
  misc_feature (68)..(147): n is a, c, g, or t
taaaccaccctgtggcgcacgcctgtagtcccagctactnagggaggntgaggcaccagaatcgcttnnnnnnnnnnnnnnnnnnnnnnnnnnnnnnnnnnnnnnnnnnnnnnnnnnnnnnnnnnnnnnnnnnnnnnnnnnnnnnnncagaaaaaaaacaaacaacgctttgagaagctgcagaagcggctctgcctttgaccccgaatgggcatctttactcgggtccatcatccccacaaagacaggaaatctgatgcc

SEQ ID NO: 352424 - DNA, 802 bp, Homo Sapiens
  misc_feature (118)..(176): n is a, c, g, or t
agcggagtgcgcaccccgagcgccggcgagcggcgcggtgagaccctcgtgcaggtgagcccggcgcacggcggcccagaatcctggaccccaggagaagcgtctacggccccgacannnnnnnnnnnnnnnnnnnnnnnnnnnnnnnnnnnnnnnnnnnnnnnnnnnnnnnnnnngctgctgggattacaggtgtgagccaccgcgtgtggcctctgggcaccttttgaaggtggtttcaccccaacatcagcagggtggaggcggagaagctcttcctatccagaggtcagcgtggggacttccttgccaggcccagtgagagcagcccggggggcttcacgctgtccgtcaggtagctgaagcagagagagaaggcggcaggcatcagcgttttcttctatgaacttataagatcaaagactttaagactttcactatttcttctaccgctatctactacgaacttcaaagaggaaccaggagtacggaaggagcatgaaagtggacaaggaacgtgaccattgaagcaccacagggaggggttcaggcctccggatgactgcaggcaggcctgggtaacatccagcctcccacaagaagctgctggagcagagcgttccctgactcctccaaggaaaggacactccctttcccgatctgctaagtaacgggtgccttcccagacactggcgttaccgcttgaccaaggggcctcaagcgggccttatgcgggcatgaccgaaggctcccctcttgccttctattcacttctcacatgtcccttcagcacgtgacccta

SEQ ID NO: 352425 - DNA, 458 bp, Homo Sapiens
  misc_feature (413)..(413): n is a, c, g, or t
  misc_feature (446)..(446): n is a, c, g, or t
gtgaagattctaaagtgcttcctagggtgggcggtggtggcaggaggccttggacggagtcagggccaggacccagcctcctgtttaataggctgagcccaagcgtccctcagatgcgaatccaacagccttggtgagttgtaagatttcatggaaactttccctgacttctgtctcccccttgctccccattacctgggaaaggcagctttgtgggccatgtgtcccggaagggcctgggctggctgtggcccagtgctcaggaccagccatcttggccctcacagcgccctgcccagttggtgtaatatttgtcttcaagccattgttggagcaggcaggcaaagggggctttctgaggatccaacgtgtgccagccactgggatacaaagacaggcctggttcctagctntggggctgggaagggtatctgacatcaatggtnggcaactgggca

SEQ ID NO: 352426 - DNA, 647 bp, Homo Sapiens
tagggaggctacgtgggtatgatcttgcaaacttgtcaggatgaatatccagttgcattctctgtcctttagataagctttcccatctatcaggtccttgaggtaaaagagaatgaagtaattccatccgttctcgtaatggaggtaacagcatggttgctcccactgataaagtttcaattaccacctcttggatttcatctgggacagttgagtccatcagtctgaagagcaaatttcgaagtggacctgcctgcctcccgagaatgctggtagctacccctcccgcaagtgcaagagcaaggtgatttgaaagtagcttcaggcacagcttgagaaaactgtggtgttctcttgatgaagggaaagggagtgggggaatctcactgtttattttatcacagtatctctcaagaaaagaacgcaggtgtgagaaggtactctcttcaagatctacacaataaggtcggtgccatgcaacaacttgtctgtccctaggaagagcagtccatgccagactatgtgatgttccagccgaaatctgctgaatagctatgccatctaagccactcactttctttggtttagtaataggacctgtggaatttccctgaccacattgccccattgagttattgccccaggca

SEQ ID NO: 352427 - DNA, 516 bp, Homo Sapiens
  misc_feature (39)..(39): n is a, c, g, or t
  misc_feature (95)..(95): n is a, c, g, or t
  misc_feature (128)..(128): n is a, c, g, or t
  misc_feature (131)..(131): n is a, c, g, or t
  misc_feature (297)..(364): n is a, c, g, or t
cctcttgccgcatcgtgccaaccccacccagctccaggnccaccggatgctgtgcctagcctccgatgcctggcctgccagacactgcgccccgnctgacctgggggagccgaccaattagtcactgntgntactgcccctctccgaaagaagacacagaaccaacaaaaccgcattcagtgcacctgcctcagctacctaatgattccgcgcggagacctcctgacaacgtctcttcaagcatcctcagaagcctcgactgagctttagacagcagagcagatgccgcagcggcgnnnnnnnnnnnnnnnnnnnnnnnnnnnnnnnnnnnnnnnnnnnnnnnnnnnnnnnnnnnnnnnnnnnnatgactatcacacactttctcttcaatgaaaaaatcgaattggtggcttatattttcagcaaagaattttggggggttttgtgtgttggcaaaagagctactcagaaatggacaaagaaaacgggggggttctcccctcctgattaaaaagg

SEQ ID NO: 352428 - DNA, 1780 bp, Homo Sapiens
  misc_feature (85)..(85): n is a, c, g, or t
  misc_feature (104)..(104): n is a, c, g, or t
  misc_feature (477)..(477): n is a, c, g, or t
  misc_feature (526)..(526): n is a, c, g, or t
  misc_feature (578)..(578): n is a, c, g, or t
  misc_feature (582)..(582): n is a, c, g, or t
  misc_feature (584)..(584): n is a, c, g, or t
  misc_feature (588)..(588): n is a, c, g, or t
  misc_feature (595)..(595): n is a, c, g, or t
  misc_feature (600)..(600): n is a, c, g, or t
  misc_feature (606)..(606): n is a, c, g, or t
  misc_feature (611)..(611): n is a, c, g, or t
gggcaggagcgggcttgcctgcggacatagctaggaacagatccacttgcaggttgctgttcccagccatggcttcgcgctgctngcgctggtggggctggtcngcgtggcctcggacccggctgcctcccgccgggagcaccccgagcttctgccaccatttctccacacaggagaagaccccccagatctgtgtggtgggcagtggcccagctggcttctacacggcccaacacctgctaaagcagcacccccaggcccacgtggacatctacgagaaacagcctgtgccctttggcctggtgcgctttggtgtggcgcctgatcaccccgaggtgaagaatgtcatcaacacatttacccagacggcccattctggccgctgtgccttctggggcaacgtggaggtgggcagggacgtgacggtgccggagctgcgggaggcctaccacgctgtggtgctgagctacggggcanaggaccatcgggccctggaaattcctggtgaagagctgccaggtgtgtnctccgcccgggccttcgtgggctggtacaacgggcttcctgagaaccagganctgnanccanaccttanctgtnacacanccgtnattctggggcaggggaacgtggctctggacgtggcccgcatcctactgaccccacctgagcacctggagagaacggacatcacgaaggcagccctgggtgtactgaggcagagtcgagtgaagacagtgtggctagtgggccggcgtgcacccctgcaagtggccttcaccattaaggtcccccgcccgaggaagcggctgacggaactgctgcttcgaacggccacagagaagccagggccggcggaagctgcccgccaggcatcggcctcccgtgcctggggcctccgctttttccgaagcccccagcaggtgctgccctcaccagatgggcggcgggcagcaggtgtccgcctagcagtcactagactggagggtgtcgatgaggccacccgtgcagtgcccacgggagacatggaagacctcccttgtgggctggtgctcagcagcattgggtataagagccgccctgtcgacccaagcgtgccctttgactccaagcttggggtcatccccaatgtggagggccgggttatggatgtgccaggcctctactgcagcggctgggtgaagagaggacctacaggtgtcatagccacaaccatgactgacagcttcctcaccggccagatgctgctgcaggacctgaaggctgggttgctcccctctggccccaggcctggctacgcagccatccaggccctgctcagcagccgaggggtccggccagtctctttctcagactgggagaagctggatgcccgaggaggtggcccggggccagggcacggggaagcccagggagaagctggtggatcctcaggagatgctgcgcctcctgggccactgagcccagccccagccccggcccccagcagggaagggatgagtgttgggaggggaagggctgggtccgtctgagtgggactttgcacctctgctgatcccggccggccctggcttggaggcttggctgctcttccagcgtctctcctccctcctggggaaggtcgcccttgcgcgcaaggttttagctttcagcaactgaggtaaccttagggacaggtggaggtgtgggccgatctaaccccttacccatctctctactgctggactgtggagggtcaccaggttgggaacatgctggaaataaaacagctgcaaccaag

SEQ ID NO: 352429 - DNA, 840 bp, Homo Sapiens
atccacttgcaggttgctgttcccagccatggcttcgcgctgctggctctggtggggctggtcggcgtggcctcggacccggctgcctcccgccgggagcaccccgagcttctgccaccatttctccacacaggagaagaccccccagatctgtgtggtgggcagtggcccagctggcttctacacggcccaacacctgctaaagcacccccaggcccacgtggacatctacgagaaacagcctgtgccctttggcctggtgcgctttggtgtggcgcctgatcaccccgaggtgaagaatgtcatcaacacatttacccagacggcccattctggccgctgtgccttctggggcaacgtggaggtgggcagggacgtgacggtgccggagctgcgggaggcctaccacgctgtggtgctgagctacggggcagaggaccatcgggccctggaaattcctggtgaggagctgccaggtgtgtgctccgcccgggccttcgtgggctggtacaacgggcttcctgagaaccaggagctggagccagacctgagctgtgacacagccgtgattctggggcaggggaacgtggctctggacgtggcccgcatcctactgaccccacctgagcacctggagagaacggacatcacgaaggcagccctgggtgtactgaggcagagtcgagtgaagacagtgtggctagtgggccggcgtggacccctgcaagtggccttcaccattaaggagcttcgggagatgattcagttaccgggagcccggcccattttggatcctgtggatttcttgggtctccaggacaagatcaaggaggtcccccg

SEQ ID NO: 352430 - DNA, 1723 bp, Homo Sapiens
  misc_feature (523)..(523): n is a, c, g, or t
  misc_feature (1443)..(1443): n is a, c, g, or t
ggggcatattctgggcggcgcccttgacctgccaacttcaacagtcttcgcccgggctcctacactggcacttggcccggcgacttccaactggaggatgaggagcccagggagtccgaagaaagagctgctaatgctgtcactgtcctgacctcgaccccaggaggtgggggcccagcccgcctcgaagtggtctccggcttaaggtgggggaactatccgatgttgtttcaggggcactgctgtcaatgctggccatgcctgtgtgcttcttcttaggccgtcctggggacccccatccccgtccattatagcctccacgacctgccaagtgccaagcggctaggaaccttcccttctggccttggggtcaaagctgcctcagatggaagaccctcacaggggaaatgtggggaaatctcaggcacatcctcctctgtgaaaccctcagtggggcctggcccagcccctgcccacactccctggttgaacaggccctgcagagcctgaggtcagtggttgncagggcccctggggcagaatgggcccccgtgctttgaaaggaagacctctggctggctgtggttgggcggctagatgagtagaaagaactcagcgtctgtggcttatgtgtctggctctctcggtccaagagtttgtctaagatcttcttaagcttggcctggtcgtccttgtaagtgatcattagtgctaatgccaggtcacccttctcccgacgtgtgccttcacataagaggggatgttctgcctcgctcactgttgtcttcatgcccaaggcagcaactgctgcttcaaatccaagctcctcatccccaggtgtctcgctgttccagttgcgacttgggggccgggaacctggagcacagagaacgtcaaagatgaaactggccagcatgagaggcaacacaggccgatagtcacagagtgtcccctcccgaagttcctctgcccggcaccgcatggtactcatctcactggacccagagggatcttcttgagcagggcagccacctcagactcctggtatgccagcttcacctccaagcccttggtagaagctggaggcctctgtagctccaaggcaaacatgccaactcggaaggccaggttgtggtgctctggacgctcacttagcactgtcaacaggaaggccgccttgctcagggtgttggtagccacccaggtctgacggctcgtggataccttgttcttcttgcccttggcagggggcggctctaccttgaggtcgggtgggttggctagcagatcctgggcaagctccacagtgagacgggaggcctcactgctatagccatgcgcatgcagggcctcagcacaggcaaacagtacctccatgcgactctcctgttccagtggcttcagcccagcaaacaggtcgtgctcctcccccagccccgcccntcggccttctcttcctcgcccccagccccatcctgggcattcagatagtacgcctggtagtcatcatcctcctctccaactgcaggggctgcctctttggttttgggaagcccattgccactctcatctgtagaagggaggtcgtcctgggtacagacatccccaggcagtaggccaggggggccaacagaggctgtgggaggctcaggcccttccgagaagtacacaccaccatcttcttcataagtatctgggggctcaatcccgggaattccggacc

SEQ ID NO: 352431 - DNA, 1163 bp, Homo Sapiens
  misc_feature (623)..(623): n is a, c, g, or t
gaaacccttctaggaagtagttcaatgaaaaacctaaaaatgcccaaataaacattcgcttacatattatatatcttgggcttctttttatgacagttcattcagggacccagtcagtaaacaggtagttaacttcgtgtaaccaagcaagggttttgtttatcttttttaaagtagaaaaaagtgaggctcaaactctctctttctccttgtcataactattggtttacagtctttatttgtttaaaagtaaagcacattgtatgtatttatttggcaatacatgaggccattaaaaccctgagcctaaggtaccacagttagtctcatttgcctcttgtcctgtgaactccacttagaatgtcattgaacttgggcagacataattctagtgtctgttccaaacgcactgtgtcacagaagctagaattaccattagaggcacaaacccctgagaatacacaagggggcacgcttccagtagatgtgttggggaaggaggagggcagaggggacaggggacaggattcagctttttgtggtgggtcctgagggttcctaccaggggtagccaggatctgggaaacagatcagcgactctagtctgaagtggctggcctggnttcggggggctgccttcagcaagattcaggcaggagagacggaaatagccaccttccaggcgtgagtcctggagataaaaatggattttaacctaggactgccgggagctggccctccgcggctgctcagactagggctgtgtgtgctggctctcgcctgtttccggtgtctaactggcttgtttctctttatggcttggcttcattccgacctggggtggggccacatccaacccactgcccactggctgtccgtctggcctgccccgcggttccaaccacagtggtgaagcagcgcttgcagatgtacaactcgcagcaccggtcagcaatcagctgcatccggacggtgtggaggaccgaggggttgggggccttctaccggagctacaccacgcagctgaccatgaacatccccttccagtccatccacttcatcacctatgagttcctgcaggagcaggtcaacccccaccggacctacaacccgcagtcccacatcatctcaggcgggctggccggggccctcgccgcggccgc

SEQ ID NO: 352432 - DNA, 909 bp, Homo Sapiens
gggtccggaattcccgggatgtctctggccgctgcgctccaccccagcccgccatggcgtcaggcgccgcggccccggggaggtggctcccactttaagaagtgaagttttgcgcccctccccctccctgcccacctcctgcagcctcctgcgccccgccgagctggcggatggagctgcgcagcgggagcgtgggcagccaggcggtggcgcggaggatggatggggacagccgagatggcggcggcggcaaggacgccaccgggtcggaggactacgagaacctgccgactagcgcctccgtgtccacccacatgacagcaggagcgatggccgggatcctggagcactcggtcatgtacccggtggactcggtgaagacacgaatgcagagtttgagtccagatcccaaagcccagtacacaagtatctacggagccctcaagaaaatcatgcggaccgaaggcttctggaggcccttgcgaggcgtcaacgtcatgatcatgggtgcagggccggcccatgccatgtattttgcctgctatgaaaacatgaaaaggactttaaatgacgttttccaccaccaaggaaacagccacctagccaacgggatagctgggagtatggccaccctgctccacgatgcggtaatgaatccagcagaagtggtgaagcagcgcttgcagatgtacaactcgcagcaccggtcagcaatcagctgcatccggacggtgtggaggaccgaggggttgggggccttctaccggagctacaccacgcagctgaccatgaacatccccttccagtccatccacttcatcacctatgagttccttgcaggagcaggtcaagccccaccggacctaaacccgagtcccacatcatctcaggcgggctgccggggcctcg

SEQ ID NO: 352433 - DNA, 1377 bp, Homo Sapiens
ggccgaaaccgggcctggcccaaaccctggctcattagccagcccttgttcgccaacattggccaggactgtgaccacccattaccgctcaccacggtagatactgcaacaagctgtaagagaggtccatcagatccagggagacaacggagctacagaaactaggactgttttgcagttgaggttttgaaggagcccaaaggccctcagggagcagactgggctgtttcctggaaaaaagaactgcagaaggataaataaggttgccacaacacgctcatctctgagctgcatttgccctcccacagtctccactgctgcctcagttagcaggttgcttagacatcgaagcacggggcatgccagcagctccagtcctgcatcctcggttttctggacagccccagccaagtccaacagcagcaaccccagagtagacagagccccatggccaatgagcagaggattgctgacctggctgcagatgatgtaatgaaggcaccaggcaaactccacagcgaccccagggttgagctttgggccaggttgcaacatttgtagcatgtgctgagggagagtggaggccaagatggagggaatgatcttctctggagcttcctcagcctgtagaagctgggacaaggcatatccgagagcttccagcacagccacatggggggactggatgcaggcagccaaggctggaacaatgccctgtggcaggagctgccttctcacagcctcactctccacgatcaggttacccagtgtatacagacacagctctatgaagtctgagctgtgactggagaggtaggtgaggaggtaagaagtggctggcaggcaggcctcagcaacagtggactgctcggagtgagagagctcatgcaggcaccgagccgcctcaagctgcagcagggcctggttgctggtcaggagcccgaccagggtccgcatgctgccctccagccggatgaaggtttgctgtgtttcagggtgctgcaagcctcgacgaaggctgaccagagccccctctctcgtccttttcacatctgtcccccgctgggcttgccagcaggaacatgctgcaccatcggtttccccgaggatcgcaagccacacatccctctccagcattcctctaggggcgtcgtttctcagcagcctcttgctgaccagctgctgctccctccgcgccttccgcagtgctgcctcccgctcccgcgcggcggcgcagtagctcctccaccccgcagaccgtgggccagaggcggccatgccgtcggctcaacatggtggagcaggaggaggaaagccgaaggaaacagcagccacaacgctcccaggggcgtagaagatggcaccgactgcgcagcc

SEQ ID NO: 352434 - DNA, 1109 bp, Homo Sapiens
  misc_feature (123)..(123): n is a, c, g, or t
cgcgcggggatgcggacttctgctaataggggtcgcagggccgatcccagacagtgcgggggcacgtatgtatcggtgggagaggtagcgagttagggggtgactaagcgaggctacactagnacatgccggaggaatcatcagtcggttcctctgcttgggcgtggcctgtcaatccagccctaccaaggttctgaacccaggggccccccgtgtccggggcgatcgcatttaacactaccggcacgcttcccatgacgccattcaaccccagtgggatcaagggcccagctcctggggaccgggccaccaaaagcacggggcctgggcctgttccaagcccaggctgccgtgtggggagtatggggaggggaggtgatggggacgctggagccagctacccttgcggctccacaagagggtggggagatgatgggtgtacccatggcggtaggcataagggcaaacatgttttcttcctcctacctgccagctcaaactggtcccaaaagcacaattttaaaatctaaaccaagaacaagataggaagggacagggcttactatgaagtctgagctgtgactggagaggtaggtgaggaggtaagaagtggctggcaggcaggcctcagcaacagtggactgctcggagtgagagagctcatgcaggcaccgagccgcctcaagctgcagcagggcctggttgctggtcaggagcccaaccagggtccgcatgctgccctccagccggatgaaggtttgctgtgtttcagggtgctgcaagcctcgacgaaggctgaccagagccccctctctctccttttcctctgtcccccgctgggcttgccgcaggaactgctgcacctcggtttccccgaggatcgcagccacacatccctctccagcttcctctggggcgtcgtttctcagcagcctcttgctgaccagctgctgctccctccgcgccttccgcagtgctcccgctcccgccggcggcgccgtagctcctccaccccgcagaccgtgggcctgaggcggccctgccgtcggctccacatggtggagcaggaggaggaaagccgaaggaaacaatcccaagaattccggacc

SEQ ID NO: 352435 - DNA, 1347 bp, Homo Sapiens
  misc_feature (47)..(47): n is a, c, g, or t
tccaggcagaggagcaagcccaccgcgactgcccttccactgatctncagccctacatccgcccgggcccagggagggagcaaggagaaggcaggtgcgcgcagcaagcgggccctggaggaagaggagggtggcacggaggtcctgtccaagaacaagcaaaagaagcagctgaggaacccccacaaagaccttcgacccctctctgaagccaaaatatgcaaagtgtgaccagtgtggaaacccaaaaggtgagtgggttccggctgcaagccaccaaggcttcagctttgggggtgggcagggtggtctctgcactgcttggggtggcaggtctggtgcccgcccagctgggtttgcaacgtggctcaaggtggcatggatgcctcaggacggccccttgcttccagccaagcccctgcccaggcctggaggggaagagagtctgggtgggttggggtgagggagaggcatctggcttgggagcagttcccagggctgcatccaggccgtgggcatctggcagaggcttccccagtggggctgctcccctgctggccagcctggccccgggagtggtgctggccacaggctcccgagatttcctgtgcccagggcaacagatgtgtgttcagcctgtgccgcggctgctgcaagaagcgagcctccaaagagactgcagactgcccaggtcacggattgctttttaaaaccaaattggagaagtctctggcctggaaagaggcccagcctgagctgcaggagcctcagccagcagcacctggaacaccaggtggcttctccgaagtcatgggcagtgccctggcctgaaggcccacaacccccacccccaggactgctgctggagcctggacacgtcctacttaagaaaatgccttttactcagggaatctcctgctacttaatgtggaaagacacgcccatgtcccccttcggcccactctgggggcctggaaatgctgcagtggggagcaggccccaggctggacctgccctgtcctcagcacgcgtgtgcaaaagtgaacaataaatcatttcaaagatgcgagagcccacagcctgtgaccactgccctctcagacgcagggaggcatgagccggggcaggtgcggttggggccagtgggggcttctgaacaacaggatacatctaaatgaaggcagcatctgggtagacaaaagtgggggcttaggtcccctccccacctcccctaggcgcctccataggcaagtggccaaagcctccgggagcttcgtgatgcctcacagccttggaagcaccgcctgcgaggccacagtggctgctgctgggggctgttgaatctga

SEQ ID NO: 352436 - DNA, 2088 bp, Homo Sapiens
  misc_feature (1861)..(1865): n is a, c, g, or t
  misc_feature (1936)..(1936): n is a, c, g, or t
cctgggtggcgaattcggcacgagggcccggcggcggccccggcgcggtgcgggcgttcgcggcgccccgggagctgcaggggccccgggcggcggcgaggccggagaggggcgggcccgggacaccggcacccggcgccctcggagccaaaggcgcgcggcggacacggcggggccctcgcgcgcctggagacgatgccaaagctgcagggcttcgagttctggagccgcaccctgcgaggggcccgccacgtcgtggcccccatggtggaccagagcgagctggcctggaggctgctgagccggcgccacggggcacagctctgctacacgcccatgctgcatgcccaggtctttgtccgcgacgccaactaccggaaggagaacctgtactgcgaggtgtgccccgaggaccggcccctcatcgtgcagttctgtgccaatgacccggaggtgtttgttcaggcggctctcctggctcaggattactgtgacgccattgacctgaacttgggctgcccacagatgatagccaagagaggtcactatggcgcctttctgcaggacgagtgggacctgctccaaagaatgattttgctggcccacgagaaactctctgttcctgtcacgtgcaaaatccgtgtcttcccggagattgacaagaccgtgaggtacgcccagatgctggagaaggccggctgccagttgctgacggtgcacggacgcaccaaggagcagaaggggcccctgtcgggtgcagcgtcctgggagcatatcaaggctgtgcggaaggctgtggccatccctgtgtttgctaacgggaacatccagtgcctgcaggacgtggagcgctgcctccgggacacgggtgtgcagggcgtcatgagcgcagagggcaacctgcacaaccccgccctgttcgagggccggagccctgccgtgtgggagctggccgaggagtatctggacatcgtgcgggagcacccctgccccctgtcctacgtccggggcccacctcttcaagctgtggcaccacacgctgcaggtgcaccaggagctgcgagaggagctggccaaggtgaagaccctggagggcatcgctgctgtgagccaggagctgaagctgcggtgtcaggaggagatatccaggcaggagggagcgaagcccaccggcgacttgcccttccactggatctgccagccctacatccggccggggcccagggaggggagcaaggagaaggcaggtgcgcgcagcaagcgggccctggaggaagaggagggtggcacggaggtcctgtccaagaacaagcaaaagaagcagctgaggaacccccacaagaccttcgacccctctctgaagccaaaatatgcaaagtgtgaccagtgtggaaacccaaagggcaacagatgtgtgttcagcctgtgccgcggctgctgcaagaagcgagcctccaaagagactgcagactgcccaggtcacggattgctttttaaaaccaaattggagaagtctctggcctggaaagaggcccagcctgagctgcaggagcctcagccagcagcacctggaacaccaggtggcttctccgaagtcatgggcagtgccctggcctgaaggcccacaacccccacccccaggactgctgctggagcctggacacgtcctacttaagaaaatgccttttactcagggaatctcctgctacttaatgtggaaagacacgcccatgtcccccttcggcccactctgggggcctggaaatgctgcagtggggagcaggccccaggctggacctgccctgtcctcagcacgcgtgtgcaaaagtgaacaataaatcattttcaagatggaaaaaannnnnaaaaaactccgaggcatcctattgtccgggtgcggaaggaaagaaggttattgaaaatgggcacattggcncataagctggttttcctgaaacccaagcttttcctttggaccaaaaagtgggtagaattctggccggggtccttcccctaaatagggggaagtccgtaatttaaatttttccaaattaagcccccagggttttaaacccttgccaatttaac

SEQ ID NO: 352437 - DNA, 1099 bp, Homo Sapiens
  misc_feature (87)..(98): n is a, c, g, or t
caaacagggagggctgggagttaccggttctaattagtacaacttaagtggaaagcaagcacttaaatacaatttatggtaacaggnnnnnnnnnnnntactgcagagagctgtccaaagaccaccaccaagttgtctgcatcattaatttccagtgtttcacaattagtaaaatacatagctacacatccctgtgagataaaaatacctttccacctgaattacactgggatcaggccagtaacacgaagctacttgacccaacattagttcaagtgtgtgcagcaaatgtcttagccacctctttcagatagctatataattaaaaactatgtaaggagctgggtggtttgagggaaaaaaattaaatcaaaacagtattgtgctcaattaataaaagaaaaccctgatgaaaaattatatgccaagaagcttagactataaagatttttattgcatttttaggtaacctggaagttcttatcctgaaggggaaaagttggttttcaaaaattacctgaacagatgctaaagtgctttataaattggctggcttcacaagtatttcctggaataacaaaaattaatcatagtaaagggataccaactatttcacaaaatgtacattccaacatcatttatgactacagtcataagagatactggaatacttgtccttattaagtggacagttgcatattcagaactgatcatcacaaccctttggatattcaaattacttacacaaagctgaaatatggtatcacagacctttgcaaaaaagaacttgtttctttttctacactttaaataatctgcttcagattacagttcacaaatacaagagtcctaacttttcaacctttccagttgcagtttaaaaatgaacactttctaaaagttaaggtcaagtgttacagcaagagaagaatgattcctattgaaaagcacatagattttagttaataatactcatgatagattgtaaactggattgatcacattctactcaactggtatcaaattaacacgtcagcattacaagtattaaatgtttttctattactatagaggatataaaccaaaacattaatatgcc

SEQ ID NO: 352438 - DNA, 695 bp, Homo Sapiens
acgcaaccccggatacaaatttactgcccaaaaactgaaatatggtatctcagactttgcaaaaaagaagaacttgtttccctacactttaaataatctgcttcagattacagttcacaaatacaagagtcataacttttcaacctttacagttgcagtttaaaaatgaacactttctaaaagttaaggtcaagtgttacagcaagagaagaatgattcctattgaaaagcacatagattttagttaataatactcatgatagattgtaaactggattgatcacattctactcaactggtatcaaattaacacatcagcattacaagtattaaatgtttttctattactatagaggatataaaccaaaacattaatatggcagttatgttctttaggcacagtttagtgatttttttaaaaaataaatactattgaatttcaattgaagttttaaactcaataaccaaagggtcaagaactctgattaggaaaaaagaaaagataactttacgctaacaatgtaagctgtttaaaatttctaacacttaacctatctgagttttatttaagattactttattaaaaaatacaaggaatctgaaaaaagatcaatacaattatcttaaagtacaaagtcataagctgtagcagtttttaactaaaatttaaaaacacaacaaggagggcagccccc

SEQ ID NO: 352439 - DNA, 1003 bp, Homo Sapiens
  misc_feature (9)..(9): n is a, c, g, or t
  misc_feature (23)..(23): n is a, c, g, or t
  misc_feature (29)..(29): n is a, c, g, or t
  misc_feature (33)..(33): n is a, c, g, or t
  misc_feature (56)..(56): n is a, c, g, or t
  misc_feature (70)..(70): n is a, c, g, or t
  misc_feature (78)..(78): n is a, c, g, or t
  misc_feature (121)..(121): n is a, c, g, or t
ggagtcgangtctcctctggtgnctcggngatnattccgccagcagctggtactcntctgcgccagcttnacgaaggnactgacgcagtggatgtaggcatcggtctccacgtccagcatntcatctctccctggccgcttaactggcttccttggtaggtgtgtctttcctcttgttggggatagcaggggagtagggaaccccagaggaagaactgctcttatggaaatgctccttcagtcctttgatggagcggtccagctggctggagcgtatctggtagtagacgttcatgaaatcttggttgcggccatattccaccagccagcgggagatgcgaatgacatcctggagcacgctctcgggcaggtgctccagggtcacgtcctcctgggcctccagatcatcgtcaccactgatcagatccaagatgagcacgggcgagacgaccttactgtgccgcgtcatcaggctgcgaaattcggactccagggcctccttcccgcgctcaaagagcagtttcactttgttgagttccgggctgtctgggctgttgtcctggaaatactccactgccttctgaatcttggccatgcttcccaggtactcttccagcctacctgtggggccctctctgatgatcttctcagtgtcactggccacatggtagtagctgatgacatggtccaggcaggacagcgtcttctcaacattctcctgcagccgctgcagattctccgtctgcttgtgcacagggatgatggagttctccagcttcataaggcggctctcaaaggatgataagatagacaccatgttcttagtgagctggtcgctcttctccaggctgtctcggatgaaggacagagtctcctcctcctgcttcagcttgtcctcaatctcccgccgtcgagcggatgcctcctgtgggggaatcatcgctctgaaccccgcggctcccactccccagtatctttcctccgcgggcccaccgggcccccg

SEQ ID NO: 352440 - DNA, 725 bp, Homo Sapiens
cagcagggaggagtggaggacgaggtaactcagcagcaatgtcaccttgtagcctatgcgctcaatggcccggaggggcagcaaccccccgcacacgtcagccaacagcagtgcctctgcaggcaccaagagagcgatgatggacttgagcgccgtgttcttcagcctcagctggaaggggaaaagtcagggccttcccggcgggggggaaggaggtgggcatcgggggcatggggcctggcctctggccgtgcatcctcactcccacccgcctccagcagccctctgtcggcctcctcgcgacttgactcaccgtcacctggaagcagggcaccagctgctggggtgggacttgggtcttcagatcataaactacgtattccctcttgacactcacaatctcgttcaccacgtgggcctggaactctaactccatcgctgaggggtgggaatgagaactatgaaccaggaaggagagatcccagctgccaagtctgggggtagcagactggagcccaggggtgatggagacttttgatggcttttggcagggacagacttggacacaaaaccgatccatagaagggcttcccaaaccttgttttgcaacatcccaaattgtctccagttgaaggaaggcctttatcagattcatagatgagctttcattgtaaaaataaatgtactttgcaccacttcatgatggagggagaagtggtcacaaa

SEQ ID NO: 352441 - DNA, 2883 bp, Homo Sapiens
  misc_feature (2268)..(2268): n is a, c, g, or t
  misc_feature (2831)..(2831): n is a, c, g, or t
ggaattcccgggatcggggttcagagcgatgattcccccacaggaggcatccgctcgacggcgggagattgaggacaagctgaagcaggaggaggagactctgtccttcatccgagacagcctggagaagagcgaccagctcactaagaacatggtgtctatcttatcatcctttgagagccgccttatgaagctggagaactccatcatccctgtgcacaagcagacggagaatctgcagcggctgcaggagaatgttgagaagacgctgtcctgcctggaccatgtcatcagctactaccatgtggccagtgacactgagaagatcatcagagagggccccacaggtaggctggaagagtacctgggaagcatggccaagattcagaaggcagtggagtatttccaggacaacagcccagacagcccggaactcaacaaagtgaaactgctctttgagcgcgggaaggaggccctggagtccgaatttcgcagcctgatgacgcggcacagtaaggtcgtctcgcccgtgctcatcttggatctgatcagtggtgacgatgatctggaggcccaggaggacgtgaccctggagcacctgcccgagagcgtgctcccagatgtcattcgcatctcccgctggctggtggaatatggccgcaaccaagatttcatgaacgtctactaccagatacgctccagccagctggaccgctccatcaaaagactgaaggagcatttccataagagcaggtccttcctctggggttccctactccccctgctatccccaacaagaggaaagaacacacctaccaagaaagccagtcaagcggcccagggacgatccgtaaggctcagaaaccttccgaaacagtattcccagcatggtctagatgggaaaaaggggggctctaacctcattcctctggaaggtcacgagcatgatttccgagttaagcacctgtccgaggccttgaacgacaagcacgggccgctggccgggagagatgacatgctggacgtggagaccgatgcctacatccactgcgtcagtgccttcgtcaagctggcgcagagcgagtaccagctgctggccgacatcatccccgagcaccaccagaagaagaccttcgactccctgatacaggatgccctggatgggctgatgcttgaaggggagaacatcgtgtctgctgcccggaaggccattgtgcgacacgacttctccacggtgctcaccgtcttccccatcctgcgacacctcaagcagaccaagcctgagtttgaccaggtgctccagggcacggctgccagcacaaagaacaagctgcctggcctcatcacatccatggagaccatcggtgccaaagcgctggaggacttcgcagacaacatcaagaatgacccggacaaggagtacaacatgccgaaggacggcaccgtacacgagctcaccagcaatgccatcctcttcctgcagcagcttttggacttccaggagacggcaggcgccatgctggcctcccaagagaccagctcttcggccaccagctacagctctgagttcagcaagcggctgctaagcacctatatctgtaaagtgctgggcaacctgcagttgaacttgctgagcaagtccaaggtgtacgaggacccagctctgagcgccatcttcctgcacaacaactacaattacatcctcaagtccctggagaagtctgaactgatccagctggtggcagtgacacagaagactgctgagcgctcctaccgggagcacattgagcagcagatccagacctaccagcgcagctggttaaaggtgactgattacatcgcagagaagaatctacctgtgttccagccgggagtcaagctccgggacaaggagcggcagattatcaaggagcgttttaagggcttcaatgatggcctcgaagaactgtgcaaaatccagaaggcctgggctattccagacacagagcagagggacaggattcgccaggcccagaagaccattgtcaaggagacctacggggcctttctacagaagtttggcagcgtgcccttcaccaagaacccggagaagtacatcaagtacggggtggagcaggtgggcaacatgatcgatcgccttttcgacacctctgcctgagcctgctgctagccctgcctggttccaccagactggcgtgtcattggacagataaaccagtgttagcttgcctctgggctgggtgagcttgaagtcctctgggacagagnacctgtctccacgcctccgggagctgtgtccctgagccccctagtcctggctcctgctttttccccacagcccgtgttcccagccgaaccagcactctcccggaagcctggggtccctccacaccttggcttttatgaccctgatggcttctgaaacaggaaaagagagaaggaagacagaggcctgtgcccactgctgctccatgtgtaccaagagcagcagggcagaagggccctccctccagcctaggtcagaggtggggacagagaactcccctacagcccagagatgtggcagggctcagagaagcagccagagctcctggaggaaaggcagtcgggactgaccccctctcttaaaacacattcccgcccgcccacaggcctgaggtctgggacctttccctcccaggagtcccctaggtggctgggggaggcaggctcactggccattttccctagagtccagcacactgcaggaggcgttcggaggaggagttccgccccaccctcttacagccttccttcaggcccctgtctttggtccccagcctcagtgcctnttggcccagggcagggcagttcgttggtttgcagaaggagcaatttagggtg

SEQ ID NO: 352442 - DNA, 1749 bp, Homo Sapiens
  misc_feature (1367)..(1429): n is a, c, g, or t
  misc_feature (1492)..(1492): n is a, c, g, or t
aaccatacggtaggtagcgaggctcgggtggcgaattcggcacgaggcaagagcagcagggcagaagggccctccctccagcctagtgtcagaggtggggacagagaactcccctacagcccagagatgtggcagggctcagagaagcagccagagctcctggaggaaaggcagtcgggactgaccccctctcttaaaacacattcccgcccgcccacaggcctgaggtctgggacctttccctcccaggagtcccctaggtggctgggggaggcaggctcactggccattttccctagagtccagcacactgcaggaggcgttcggaggaggagttccgccccaccctctacagccttcctcaggcccctgtctctggtccccagcctcagtgcctcttggcccagggccaggcagtcgtggttgcagaaggagcaattaggctgcctgcctgtgggctgggagacagggacaatggggaaaagttaaggagcaaaatgggggttggaagcaaaaaatagggccccacctatttaggacgagattgaagactgacccttgaggcacacttgcactggagatgggtttatttcacgctctgtgcttgtgtgctagcggagggagagctcagggtggcttaatccagaggccctgtcatggcccgcccccagccatgggaaagcaaacttcatcctaaggtgtgcagcccaggccctgcccctttacagtctaggccgcctgccatggggtgcagcctctccaggggctgcgtcagacttgcacgctgcccacatccagattcctgcaaagacgaattgggtgcacagcaccccaaccacatacacgaggaagaagatgcggtcagcagtctcaggccagcttctctgtgacccctttactcctctggagggctctgtggggagagatacagggaaaggagctgttcttcaaggtcccctcaacatgagcggaagagcgaaccccaggggtcatcagcctgtatcgcttcctttcttagattctcagctgatgaaaatttgggtctggcccatttcaggccatcttcagttgaagaaacaccctcttaggctgtgcaaggcatgggttatcaggggattgaggtcacctgggacttcagggaggctcagcttgctccctgccccagacctgtttcttctaagggaggaggacatggtggagaccagggacaggagagccagcagggtggatgcaaggggcctctacccacacctggacctccgtgccctcacccccagccctaggtgtgcacctagggcctcatttccttaccccccagcccatgcccaccttcagcaggatgaaggccctgggtttgccgggctctnnnnnnnnnnnnnnnnnnnnnnnnnnnnnnnnnnnnnnnnnnnnnnnnnnnnnnnnnnnnnnnggggccaagcaacccccagccagaaagcaaaacgcctcttatggggcgcctgaaggaacaaanccatctaccaggccggggatgggggcaaaatatataaaaccggcggtggagaggaaaggggccacaggggagaaatggcctccgcggggccccacccacccgtggggcatcctcgggtggcctcacacaaaacctctaagacacaccagtgcggctgtgtcctgtgcccataacaactcggggcgggaaaaatgggcggtgaaaaagacgccacaacgggtctggtcctgggtggctaaggaggtagattttcctaa

SEQ ID NO: 352443 - DNA, 521 bp, Homo Sapiens
  misc_feature (138)..(138): n is a, c, g, or t
aaaagtgggcaaacgggggcaaaggggcccccgtctggccgtgcaaccctaaatcccaacccggcctcccaacaacccctctgtcggccctccctcgcgaacttgactcaccgtcaccctggaaaacagggcacccanctgcctggggtgggaccttgggtccttcaagatcataaactacgtattcccctcttgacactcacaatcctcgtttcacccacgtgggccctggaactcctaactcccatcgcctgaggggtgggaatgagaactatgaacccaggaaggagagatcccagctgccaagtctgggggtagcagactggagcccaggggtgatggagacttttgatggcttttggcagggacagacttggacacaaaaccgatccatagaagggcttcccaaaccttgttttgcaacatcccaaattgtctccagttgaaggaaggcctttatcagattcatagatgagctttcattgtaaaaataaatgtactttgcaccacttcaaaaaaaa

SEQ ID NO: 352444 - DNA, 532 bp, Homo Sapiens
  misc_feature (348)..(348): n is a, c, g, or t
  misc_feature (358)..(358): n is a, c, g, or t
  misc_feature (394)..(394): n is a, c, g, or t
  misc_feature (421)..(421): n is a, c, g, or t
  misc_feature (450)..(450): n is a, c, g, or t
gcatcgcgtatttctaatgggtgtagatgtatgactgtgttttcagaaagggctagtccggtgatgatggcatcggcatagctgtgtattatgaatcccatatggattctaaagatcctctagatttattccatgaacaggtaatctatatccgattcatctgcctatggattaaccttcaggagaaggaccatcctggaaggggatctttggttctatgaatcctaatgatatcgcaaagatcctctagattattccaagatacagggatcaatacctgattcatctgtctatggattaaccttcaggagagggatgaccctggaagaggctctttggttctatgantcctcatgantcctgaacatcatcgtgattattccaaggacagggntcaatacctgattcgtctgcctacganttaaccttcaggggagggaagaccctggnaagatactctttgattctgaaggtgcacatcaccacacactatctcaaaacataaaaacattttttaaaagtttatttttag

SEQ ID NO: 352445 - DNA, 1038 bp, Homo Sapiens
atggcggccgcctaagtcccacagagacgggagtcgggtgggatcccaggctgggccccgcggcggctggattctcttccctggccaagtctctgagatcttctcccagggcgatgcaaagctactcgctaccagcttggacctgtctgcagtatctcctctgggacctgccatgctgaggacccattctcacctctgagggactcctgtcctaggactaaggtggagcctgggccatggtacagctggctcctgcggcagccatggacgaggtcacctttaggagcgacactgtgctgtcagatgtccacctctataccccgaaccatagacatctcatggtacggctgaacagcgtggggcagccagttttcctgtcccaattcaagcttctatggagccaagactcttggacagattcaggagccaagggtggcagtcacagagatgttcacacaaaggagcctccttctgctgagacaggcagcacagggtcccctccaggaagtggccatggtaatgagggtttctccctccaggccgggactgacaccactggccaggaagtggctgaagctcagctggatgaggatggggatttggacgtggtgagaagaccacgagccgcctctgattccaacccagcagggcctctgagagacaaggtacatcccatgattctagcacaggaagaagacgacgtcctgggaagaggaagcacaaggcagcccgcacgatatcatcagaataggtgtggcggggcgccctgctcctggcagactacatcctgttccgacaggacctcttccgaaggatgtacagcgcctggagctccgggccggcacgggggctcgctagcatcatcgcagccccccatgggacgggaccgtttatttgtcaaatgtccggtgcaaatctcctgtcccatgtggccaacgaaaacatttgccctccacaacccccctgggctggccacttggaaaatccacttgcggggcatccctacctcccggctcttttccctcccccggaaccctg

SEQ ID NO: 352446 - DNA, 999 bp, Homo Sapiens
  misc_feature (179)..(179): n is a, c, g, or t
  misc_feature (907)..(942): n is a, c, g, or t
cctccgaaaggaggttccctgttcggaaaccagggatggtagtcctgcccagggagccagggccgcccccgcccacaccttgcttgccaaacatcctcccagggggcgtggcccatggtgtgcttctattctggatgatatcgtgcggggctgccttgggctttcctctccccaggacngtcgtcttcttcctgtgctagaatcatgggatgtaccttgtctctcagaggccctgctgggttggaatcagaggcggctcgtggtcttctcaccacgtccaaatccccatcctcatccagctgagcttcagccacttcctggccagtggtgtcagtcccggcctggagggagaaaccctcattaccatggccacttcctggaggggaccctgtgctgcctgtctcagcagaaggaggctcctttgtgtgaacatctctgtgactgccacccttggctcctgaatctgtcgaagagtcttggctccatagaagcttgaattgggacaggaaaactggctgccccacgctgttcagccgtaccatgagatgtctatggttcggggtatagaggtggacatctgacagcacagtgtcgctcctaaaggtgacctcgtccatggctgccgcaggagccagctgtaccatggcccaggctccaccttagtcctaggacaggagtccctcagaggtgagaatgggtcctcagcatggcaggtcccagaggagatactgcagacaggtccaagctggtagcgagtagctttgcatcgccctgggagaagatctcagagacttggccagggaagagaatccagccgccgcggggcccagcctgggatcccacccgactcccgtccccggccagtaatggccgaaattcccgggcatatgtccggtaccgtcgactnnnnnnnnnnnnnnnnnnnnnnnnnnnnnnnnnnnncgccgcttcctcgctcaatactccctgcgctcgtcattcgcttaaccgtgccatatg

SEQ ID NO: 352447 - DNA, 523 bp, Homo Sapiens
  misc_feature (53)..(53): n is a, c, g, or t
  misc_feature (65)..(65): n is a, c, g, or t
  misc_feature (91)..(91): n is a, c, g, or t
  misc_feature (214)..(214): n is a, c, g, or t
  misc_feature (249)..(249): n is a, c, g, or t
  misc_feature (251)..(251): n is a, c, g, or t
  misc_feature (272)..(272): n is a, c, g, or t
  misc_feature (299)..(299): n is a, c, g, or t
  misc_feature (306)..(306): n is a, c, g, or t
aaaacctaacgtcatggctgtgatgtaaagaacttttatgtttttaaagaaanccccaagactanacatccaaaccaaggttgctgccttnaaagtatcaacctcagcgggctattccatcagtggcgggcatgtgtccccagtgtctctgagactgtggcttctgataaggctgtcagagcctgcagcctttttatgagtacccaaccttganaattacggtcctctgaggatctgactttatgaaananaaaaaattattatgagccaantctgatgagggaggtacgtgatacaantgagganccacaacggggctgacttcaaagggacgatgcttgagaggctcgtaagctggcaaatcctaaaaatacagcatccctggaacggcaccaggggcagccacagctctgtgtgctgagcaccgaccagctgccaggcaccatgcacattgcatgaggcccgtcacagctctgtgtgctgagcaccgaccagctgccaggcaccatgcacatgcatgagg

SEQ ID NO: 352448 - DNA, 722 bp, Homo Sapiens
ttttttgagaagtgaataataggtttatttgcatatacacaagagaagagttaaccgttactgggtgagaaggaggtaaggcttcagcagaggaaggcaccttgacagacaaacaagagactctcagcttattaaatcaagcatagtcacaaacttcacttgccccaagccaacaacttaactcatttacctgctgtcctagagaatcattaacaaaaccagctggaaaatagagagaaatgattttacatatctggacctgccacttaaaactttatgtacagaatgcaggaaaaaaacataagaggcacttccaaatagttcttgatctaatcagtgccatctgtcctgctattaaaaatatctattatggaagaaattgggtattaaatgtgccatcaaagttggggcctcaattctaaaagagtttaggcaaaggtactctagaagtggttcctgccaggtttccagacccacaaccatagacacaaaatctctggagatgagggtggagcagctataaagcaagcatttctcaccctgctcatgtgtgtgtcttatggggcctatcacccggtaagctgagcctaggatgctgggaagcctctgccaaggatggaaggcatacttgctaaaaatgatctttcttggcttctcaagttaaccagaataaactctgatttctcttttgagtacccaaatgagattaaggcttttaacat

SEQ ID NO: 352449 - DNA, 1150 bp, Homo Sapiens
cccctgtgggactcatccttgccaagtgaggggaagaagacaggatgaggtctcgaccctgtcccctagggactgtcctagccaggtctcctgggaaagggagatgtcaggatgttgctccatcctttgtcttggaaccaccagtctagtccgtcctggcacagaagaggagtcaagtaatggaggtcccagccctgggggtttaagctctgccccttccccatgaaccctgccctgctctgcccaggcaaggaacagaagtgaggatgagacccagccccttcccctgggaactctcctggccttctaggaatggaggagccaggccccaccccttccctataggaacagcccagcacaggtatttcaggtgtgaaagaatcagtaggaccaggccaccgctagtgcttgtggagatcacagccccacccttgtccctcagcaacatcccatctaagcattccacactgcagggaggagtggtacttaagctcccctgccttaacctgggaccaacctgacctaacctaggagggctctgagccaaccttgctcttggggaaggggacagattatgaaatttcatggatgaattttccagacctatatctggagtgagaggcccccacccttgggcagagtcctgccttcttccttgaggggcagtttgggaaggtgatgggtattagtgggggactgagttcaggttaccagaaccagtacctcagtattctttttcaacatgtagggcaagaggatgaaggaaggggctatcctgggacctccccagcccaggaaaaactggaagccttcccccagcaaggcagaagcttggaggagggttgtaaaagcatattgtaccccctcatttgtttatctgatttttttattgctccgcatactgagaatctaggccaccccaacctctgttccccacccagttcttcatttggaggaatcaccccatttcagagttatcaagagacactcccccctccattcccacccctcatacctacacccaaggttgtcagctttggattgctggggccaggccccatggagggtatactgaggggtctataggtttgtgattaaaataataaaagctaggcgtgtttgatgcgcttttaactttggtcaaaaaaaa

SEQ ID NO: 352450 - DNA, 330 bp, Homo Sapiens
  misc_feature (43)..(43): n is a, c, g, or t
gcaaaagcaatttgacacttcataacgtctagaaatatttttncaaatgtgatgtatgaataggaagtagcatacaaaaacaaattactgtgctatccctcccccaagaatacatattctctcttcacaccacgtggctgctgctggggcatgggggaggggtggcattggcagttcaagactgtcctaccctcttcagtgactcttttagcaatatgaagttaaaaaccaggtactgtttaccactcacctgatgtttaattctcatgaagatgcttttttgtgtagatagttgtcaaatgtggatgttcctgcagggaggaccaattg

SEQ ID NO: 352451 - DNA, 1098 bp, Homo Sapiens
  misc_feature (760)..(770): n is a, c, g, or t
  misc_feature (985)..(995): n is a, c, g, or t
gcgtcgcgcgccagggtagcggagcagctgccgctgagccgccggacggacgctcgtcttcgcccgccatggccgagagcgactgggacacggtgacggtgctgcgcaagaagggccctacggccgcccaggccaaatccaagcaggctatcttagcggcacagagacgaggagaagatgtggagacttccaagaaatgggctgctggccagaacaaacaacattctattaccaagaacacggccaagctggaccgggagacagaggagctgcaccatgacagggtgaccctggaggtgggcaaggtgatccagcaaggtcggcagagcaaggggcttacgcagaaggacctggccacgaaaatcaatgagaagccacaggtgatcgcggactatgagagcggacgggccatacccaataaccaggtgcttggcaaaatcgagcgggccattggcctcaagctccggggaaaggacattggaaagcccatcgagaaggggcctagggcgaaatgaacacaaagcctcgaaatcagtgcgctccagctgatctcgttccgccggttccccttggccgccagttccgttctcctcacgggccgaacggaacaaggggtccagcttgcgggggaccctccccagcccattcctgctgtcaaacaaacaaaaccttgcaaaaagctgaataatataaataaacatacttacatatctatacaacctataagagacatacatatacacatacgtaacaaacagannnnnnnnnnncgccctaatagtagatcctcccccggggggggccgcccacatatttgcgtgctactccacatttttgttatacaaggggggccccctatttgagggggtcgtatattatatacgcaggagagccggagggacccggtgttataaaccgagcgttgcggtgggggaaaaatggctttgtcggggggcactcgtggggaaaagacacccacatatcnnnnnnnnnnnaaccaattgtggggagaacctctcccgagagatttgagacgcccctggggaatattaatcaacttacggacgctgtactgtgcgttactccgagctattgtga

SEQ ID NO: 352452 - DNA, 947 bp, Homo Sapiens
  misc_feature (52)..(88): n is a, c, g, or t
atgtatacgactcactatgggcgaacttggagcttaccgcggtggcggccgnnnnnnnnnnnnnnnnnnnnnnnnnnnnnnnnnnnnnatcaggccaaatcggccgagctcgaattcgtcgagagcgggtcttcgcccgccacggccgagagcgactgggacacggtgacggtgctgcgcaagaagggccctacggccgcccaggccaaatccaagcaggctatcttagcggcacagagacgaggagaagatgtggagacttccaagaaatgggctgctggccagaacaaacaacattctattaccaagaacacggccaagctggaccgggagacagaggagctgcaccatgacagggtgaccatggaggtgggcaaggtgatccagcaaggtcggcagagcaaggggcttacgcagaaggacctggccacgaaaatcaatgagaagccacaggtgatcgcggactatgagagcggacgggccatacccaataaccaggtgcttggcaaaatcgagcggcccattggtgagtgtccctccacccttcgccgggtccgctgaacagggaggctacccgctcccagctggggttggtgagagtgggactcgggggaagaagatggccctgggggtcccctgttctctgaattctggagctttgcttctccaggtagtacagactgagggatggtggggtctctgcaggcctcaggaaacccctaagagcaagtggagtccgagtcccttccccttgccagttcccgtcagcctgtgctgttggcgatggttctctgagcctgagcacagcgggtccggggcctgtcagcatggggccggaagccagttccacaagagacccggttcccggttcttccggagagggggtgttcatgctctgctgtctaagtgatccgactcattcttcttcaaaattcgatgtggggaac

SEQ ID NO: 352453 - DNA, 821 bp, Homo Sapiens
agcggctctagcagctgccgctgagccgccggacggacgctcgtcttcgcccgccatggccgagagcgactgggacacggtgacggtgctgcgcaagaagggccctacggccgcccaggccaaatccaagcaggctatcttagcggcacagagacgaggagaagatgtggagacttccaagaaatgggctgctggccagaacaaacaacattctattaccaagaacacggccaagctggaccgggagacagaggagctgcaccatgacagggtgaccctggaggtgggcaaggtgatccagcaaggtcggcagagcaaggggcttacgcagaaggacctggccacgaaaatcaatgagaagccacaggtgatcgcggactatgagagcggacgggccatacccaataaccaggtgcttggcaaaatcgagcgggccattgatgtgggaaccaggagtgctcgtgtgctgagagcccagtgaggcacgggagcggcgtggccccccttccctgggaagatgttgaagaggggcagcgttggggggaggagggagctggtgctgcagtggccagtggctgtggctcatttcaggcctcaagctccggggaaaggacattggaaagcccatcgagaaggggcctagggcgaaatgaacacaaagcctcgaaatcagtgcgctccagctgatctcgttccgccggttccccttggccgccagttccgttctcctcacgggccgaacggaacaaggggtccagcttgcggggggaccctccccagcccattcctgctgtcaaacaaacaaaacctttgcaaaggcg

SEQ ID NO: 352454 - DNA, 2036 bp, Homo Sapiens
  misc_feature (117)..(126): n is a, c, g, or t
  misc_feature (129)..(130): n is a, c, g, or t
gtggaccggtccggaattcccgggatggaattcgttgagtttgcttttagagccaagtttctttccctgtgtgggtttttgaggaaaacctgaggtcccctaatctgtggccaccannnnnnnnnngcnncgccacgccttagagcagagcagcccctcctctcatttggtgcagaaacagtcaagaggaaccattggcctagagctcctgtgaccgagagcgccacggaagcctggggatgatgtcgggcagctttattctttgcttggctttggtaactaggtggtcccctcaagcatcctcagttcctcttgctgtttatgaatctaagacaaggaagtcctatagaagccaaagggacagggacggaaaggacaggtcccaagggatggggctgtctttacttgtggaaaccaggaaattgctcctctcagccaaccaaggttgaccacacaccacccttccggagcagctcagtcagccctcggggacgagaaaccacaagcgcagagacgctgaggcccaggcaggtgaagaggaagtggctttgggtttttaaagtaggtgagcgtgagcctctctgactgcttcttccccgggggggactgcaaaccgctcagggttgcggcagagccatggacttccggtccctgcaacgggtgacctaagcgtggtgcacccatcagtcacgcaggaggactgacttgacagacgaaagacaagcccggatgacacagggtgagaagagtcagggccgcacctctgtccctgcaaaccaacaggtgcatggtgagtgtggcagtccccacagctccacaatgggctcccccgccaacggggacgacagggatcttcaggaacttctgacctcaccaagtcaagtggaccactctccactccacgaggatgtgaaacggttctttaaaatgggattttagagcctcgggaatgcatgtgcgtcgcatctttcatattatgggtcaggatagattcatttcttgcaacatagtggaaaagatataagctgcagtaatttgctctttgaatgaccgtcacccccagtataggatatgcttgtatccccccgtcactcctccgcctgttttttaaacttttccaccacctgcgtccaaaaagaatgttatagcgagtgctcttaaatgttgaacctgggtgttgcttccgggccagtctgcgtggctccatgaaaagctcactgctgccccagccgggcttcttagaggaggtcagttgtcctatgtatcatcatttactctgggaatcctactgtgaaatcatgtctgtatttttctggagcagttcacatagagtagaatgtggaatttcccgtgaacgtctccttcctcccccgtatctgccgcctgtcacttcgccaccgtgctagaatactgttgtgttgtaagatgactaattttaaaagaacctgccctgaaaagttcttagaaacgcaatgaaagggaggaacttgtcctttacccagtttttcctttgtaggatgggaaagtataaaaaggcacagaaggttgtcatgggctgttccttgggggtttttatcctgctcaccgtggagataagcctgcggcttgtctaaccagcgcagcgcaaaggtctcaatgccttttggtaacatccgtcattgcagaagaaagtttacacgacgtcaaaaagtgacgttcatgctaagtgtttttccagaaatattggtttcatgtttcttattggctctgcctcctgtgcttatatcatccaaaaactttttaaaaaggtccagaattctattttaacctgatgttgagcacctttaaaacgttcgtatgtgtgttgcactaattctaaactttggaggcattttgctgtgtgaggccgatcgccactgtaaaggtcctagagttgcctgtttgtctctggagatggaattaaaccaaataaagagcttccactggaggcttgtattgaccttgtaactatatgttaatctcgtgttaaaataaaatataacttgtggctccgtgag

SEQ ID NO: 352455 - DNA, 2044 bp, Homo Sapiens
gaggcagctcctggggctccgagccaataagagaattcccacctctggggagggcgcccgtcccgggggcatcatccacgtgtatggcgatgacagcagtgacagggcggacagcagcttcatcccctactgctccatggcccaggcccagctatgcttccatgggcaccgcgatgccgtgaagttctttgtctcggtgccagggaacgtgctggccaccctgaatggcagtgtgctggacagcccagccgagggccctgggccagctgcccctggcctcggaggtcgagggccagaagctgcggaacgtgctggtgctgagcggcggggagggctacatcgacttccgcattggagacggagaggacgacgagacggaggagggcgcaggggacatgagccaggtgaagcccgtgctgtccaaggcagagcgcagtcacatcatcgtgtggcaggtgtcctacacccccgagtgaagctgctgccctgcctggcccgacctgtacataggacccccgaccacctgacccccgcccggcccgcggggtagccagccaggcgccgccacccctcttctaacctctcaacctgcagctttcacctgagtctggcccctccagcgggcagggagtgcggggatgcggatcagctgggaggaggaggggaggggtgcttccacccgaggggaagatgctctcgggacagtttacccgggcagctcctggccagcttccagcccagagtcctcaagtccagggcaccttgggcccagcgcaggcagaatccgaggtggtcctggctctaccctgggcctcctactccccagcacccctggaggaggcaggggctccccgccgccgaggctgcctgccctgggcccacctctgcatgctgctcatggggccaccctgcctcctgggccctcactctgcctaggggagctgggccaggcactagcctttgcccagggaggtgggcctcaggctgcccaggtgcctgcaccccagccggccttctctggggcctccccgtcgtcaagcctctatcctgtctgtccccaccccagctgtcccctgcccagggagctggcataaaagcacgaggcccggctccctggggcagctgcttgagaacagagactgctaccccatcctgcccatgcaggcaggctcttgccagccccgttctgacccgtgtccccccaggctctgcctgggcagaagactcaccttggaggagtgggccctggagtcctgtccctcccagaagcccccagggtgggatttctcaggctgccagggcaggcccaggcctcaggaagaaggggaggcccctggcctctccgggatcagacctaggacacaggctcagcctcaggttgatgggggatgatgtgctcccggggcctgcctcctgcacggggctccacggagcccagctcccagacacgctactaagtgcctagggttgcccgctgtggccttgctcccagggagcaacagagaggacaccaagcagaggccccgtggggctgaggatggagccgcccccaaccgactccaagcccgaagagggcagacgccaccctggactgctctccctgcccagctgggcctctctggcctaattcctaccttccaggcccactgcactcctgtctgggaggcccttatgagggcagcccagcccccgcacccacccccaaccagagaagcacagatcttggggagctgccccacaagccccgctggccaccgagggctgcagccgctgcgctgccggcttctccccaccaccctgccacctccactgtgatgtatgtccgctccctcgtctgttcccccaggatctcgaagtgactccgggctgagcagtggggcggctgggggaggggtgacgattctcctcaggctttggccctgcaagcaaacccacatatctgctctgtatgtaataaatgtctgaagttggagcagacttgtgctaactccaggtagttagtatcataattgaattgaattgtaggacacccagttggtgtttc

SEQ ID NO: 352456 - DNA, 467 bp, Homo Sapiens
ccgctaggctacctcctgctcagccacccctggtcctcattctgggatgaggggagggcctaggagaagccctccctttcagtgcagattcccttcttgaatgggacattgagttcctatcagccaccccagactgggtcttcccatgtatataatggaggaagacccctcccagccctctcagtcccccagctcaaagtgcctcagttcctccatctgctcccagatcccctggcactctagacaggcatgcccatgggaaggaccctgggatggagaggcaggcttcgcggcccttcatgcctgcccactgggattccagtttaacttcaccccaggggtgttcaggggctctgcaggatggcaagtgttggggaggagggaggcagaccactctgtgccccacgggcactgacccaccctgccataggcttcctaagggagccccccaacccctcccctccgtc

SEQ ID NO: 352457 - DNA, 990 bp, Homo Sapiens
  misc_feature (43)..(75): n is a, c, g, or t
ggatcatcatataggggaccggagtacacgggggcggcgcatnnnnnnnnnnnnnnnnnnnnnnnnnnnnnnnnnatcaggccaaatcggccgagctcgaattcgtcgagagcgggggaaccgcgacgggcgggcggcgagcaggcccgggagccgggaggctgcgggcggcggcgctggacccgacgcggcgagagaggccccgagatgccgagcaagaagaagaagtacaacgcgcggttcccgccggcgcggatcaagaagatcatgcagacggacgaagagattgggaaggtggcggcggcggtgcctgtcatcatctcccgggcgctcgagctcttcctagagtcgctgttgaagaaggcctgccaggtgacccagtcgcggaacgcgaagaccatgaccacatcccacctgaagcagtgcatcgagctggagcagcagtttgacttcttgaaggacctggtggcatctgttcccgacatgcagggggacggggaagacaaccacatggatggggacaagggcgcccgcaggggccggaagccaggcagcggcggccggaagaacggtgggatgggaacgaaaagcaaggacaagaagctgtccgggacagactcggagcaggaggatgaatctgaggacacagatactgatggggaagaggagacatcacaacccccaccccaggccagccacccctctgcccactttcagagccccccgacacccttcctgcccttcgcctctactctgcctttgcccccagcgcccccgggcccctcagcacctgatgaagaggacgaagaagattacgactcctagcgccttctgccccccagaccatagccccttttagttggttttagttgctctggggggaggagagaaggtagagctgttcttaaatttattaaaaaaacaatacgagggaaaaataccatccacgttcacgaacgggaaaacgacataaacacaaaacaaccttgt

SEQ ID NO: 352458 - DNA, 988 bp, Homo Sapiens
tgcgatgcagcaaatgcaatattgatgtcactctgaagacaagtctctgaatgttcgagccaaagcagcctggtccctgggcaacctgacagacactctgattgtcaacatggaaacaccagacccaagtttccaggaagagttctctggtctcctgctcttgaaaatgttacgatcagctatagaagcatccaaggataaagacaaggtaaaaagcaatgcagtccgggcccttggaaatttgcttcattttctgcaaccctctcatatagaaaaacccacatttgcagaaatcattgaggagtctatccaggccctaatttctactgttctaacagaagctgccatgaaagtccgatggaatgcttgttatgcaatgggaaatgtatttaaaaatcctgcccttcctttagggacagccccatggacctcccaggcctacaatgccctgacatcggtcgtgacatcatgcaagaacttcaaagtgcgcatcagatctgcagctgccctttccgtcccggggaagagagagcagtacgggtctgttgaccagtatgctcggatctggaatgcattggtcaccgctttacagaagagtgaagacaccatagactttttggaattcaagtactgtgtcagcctacggacccaaatctgccaggcactgattcacctcttgagcttggccagtgcctcggacctcccttgtatgaaagaaacccttgaactgagtgggaatatggtccagtcctatattctacagtttttaaaatcaggagcagagggagatgacactggagcaccccacagcccacaggaaagagaccagatggtcagaatggcccttaaacacatgggcagcatccaggcaccaactggagacacagccagaagggccatcatgggctttttaggaagagatcctggccgtttgttttggactcatctggtttcacaagggggcactcccagggttaacaaatcagtg

SEQ ID NO: 352459 - DNA, 370 bp, Homo Sapiens
  misc_feature (46)..(46): n is a, c, g, or t
  misc_feature (78)..(78): n is a, c, g, or t
  misc_feature (300)..(300): n is a, c, g, or t
  misc_feature (330)..(330): n is a, c, g, or t
  misc_feature (338)..(338): n is a, c, g, or t
cagactttctctcctgcttcaaaaaacaaaacagaagccataagantggaactccctataacttgcggcccccaagtntgcacgctgatttccctcccctgtgttacagatgacgaggagtcccttcttgctcaggccacttctccctcctgtgctctgggtcccagtttctgctacttgctctagaatctgacatcatcagtcaccttttctctcctggcaggttttctgctgccctccttgcttgatcctctattcacctttgcctgtgccagcatcccttctgtcctcccggtgaanccaaggtctcttccctctggcttctgggcnagaacttnataaccctccctttaatggtgaacccttgaaa

SEQ ID NO: 352460 - DNA, 1498 bp, Homo Sapiens
  misc_feature (1002)..(1002): n is a, c, g, or t
  misc_feature (1107)..(1107): n is a, c, g, or t
  misc_feature (1133)..(1133): n is a, c, g, or t
  misc_feature (1135)..(1135): n is a, c, g, or t
  misc_feature (1137)..(1137): n is a, c, g, or t
  misc_feature (1232)..(1232): n is a, c, g, or t
  misc_feature (1265)..(1265): n is a, c, g, or t
  misc_feature (1384)..(1384): n is a, c, g, or t
agcggtgctcaacggcgcgtgcgcagagggaggcaggcgggtgggctgccggcggtggactcgtcggagccgcgggcggtcaggaatttgaccctctagggcatgaatactgtgctgttcagttctgagctgtgctagcaatacccttcaaaggaagagcaatggctgcagcagcagcttctcacctgaacctggatgccctccgggaagtgctagaatgccccatctgcatggagtccttcacagaagagcagctgcgtcccaagcttctgcactgtggccataccatctgccgccagtgcctggagaagctattggccagtagcatcaatggtgtccgctgtcccttttgcagcaagattacccgcataaccagcttgacccagctgacagacaatctgacagtgctaaagatcattgatacagctgggctcagcgaggctgtggggctgctcatgtgtcggtcctgtgggcggcgtctgccccggcaattctgccggagctgtggtttggtgttatgtgagccctgccgggaggcagaccatcagcctcctggccactgtacactccctgtcaaagaagcagctgaggagcggcgtcgggactttggagagaagttaactcgtctgcgggaacttatgggggagctgcagcggcggaaggcagccttggaaggtgtctccaaggaccttcaggcaaggtataaagcagttctccaggagtatgggcatgaggagcgcagggtccaggatgagctggctcgctctcggaaggtcttcacaggctctttggctgaagttgagaaagtcaatagtcaagtggtagaggagcagagttacctgcttaacattgcagaagtgcaggctgtgtctcgctgtgactactccctggccaagatcaagcaggcagatgtagcactactggaagagaacagctgtatgaggaggagccaaagctcactgccagcttgccctcgggaactcaccctgcaagatgtggtgntccttaaggtaggtcatgttggccccctccaaattggacaagctgttaagaagccccggacagttaacgtggaagattcctgggccatggaggccacagcgtctnctgcctctacctctgttacttttagngngntggacatgagcccggaggaagtggttgccagccctagggcctcacctgctaaacagcggggtcctgaggcagcctccaatatccagcagtgcctntttctcaagaagatgggggccaaagcagcactncaggaatgttcaatcttccagtcagtctctacgtgaccagtcaaggtgaagtactagtcgctgaccgtggtaactatcgtatacaagtctttacccgcaaaggctttttgaaggaaatncgccgcagccccagtggcattgatagctttgtgctaagcttccttggggcagatctacccaacctcactcctctctcagtggcaatgaactgccaggggctgattggtgtgact

SEQ ID NO: 352461 - DNA, 1765 bp, Homo Sapiens
  misc_feature (399)..(399): n is a, c, g, or t
  misc_feature (407)..(407): n is a, c, g, or t
  misc_feature (697)..(718): n is a, c, g, or t
  misc_feature (1231)..(1284): n is a, c, g, or t
  misc_feature (1709)..(1719): n is a, c, g, or t
gttgtgggaaaggcccccactattgaagtttgaaaaccacaggtttaagaggggagtcagtttttagctgaaacagactggaggacccagatattagtcaataccttcctattgaagggtacccagcacagtgttctagaaaatgcttggcctccctgggaccccagacttgtgggcctctgagaagcaaatggggaagacctttgcagtgtaaaaacaagttgagtcattcataacctcgtctatcctcctttctgcagaatgtcagcatctcattagatggtgcttggccctgagaccatcagataggccaaccttcgaagaaatccagaaccatccatggatgcaagatgttctcctgccccaggaaactgctgagatccacctccacagcctgtngccggggnccagcaaatagcagcctttctggcaggtcctcccctctcttgtcagatgcccgagggaggggaagcttctgtctccagcttcccgagtaccagtgacacgtctcgccaagcaggacagtgcttgatacaggaacaacatttacaactcattccagatcccaggcccctgggaggctgcctcccaacagtggggaagagtgactctccaggggtcctaggcctcaactcctcccatagatactctcttcttctcataggtgtccagcattgctggactctgaaatatcccnnnnnnnnnnnnnnnnnnnnnntcagaaccctgccatggaactgtttccttcatcatgagttctgctgaatgccgcgatgggtcaggtaggggggaaacaggttgggatgggataggactagcaccattttaagtccctgtcacctcttccgactctttctgagtgccttctgtggggactccggctgtgctgggagaaatacttgaacttgcctcttttacctgctgcttctccaaaaatctgcctgggtttgttccctatttttctctcctgtcctccctcaccccctccttcatatgaaaggtgccatggaagaggctacagggccaaacgctgagccacctgcccttttttctgcctcctttagtaaaactccgagtgaactggtcttccttttgggttttttacttaactgttttcaaagccaagacctcacacacacaaaaaatgcacaaacaatgcaatcaacagaaaagctgtaaatgtgtgtacagttggcatggtagtatacaaaaagattgtagtggatctaannnnnnnnnnnnnnnnnnnnnnnnnnnnnnnnnnnnnnnnnnnnnnnnnnnnnnaaagatgcgcattctaacctggaggtcaatgttatgtatttatttatttatttatttggttcccttcctattccaagcttccatagctgctgccctagttttctttcctcctttcctcctctgacttggggaccttttgggggagggctgcgacgcttgctctgtttgtggggtgacgggactcaggcgggacagtgctgcagctccctggcttttgtggggcccctcacctacttacccaggtgggtcccggctctgtgggtgatggggaggggcattgctgactgtgtatataggataattatgaaaagcagttttggatggtgtgccttccagatcctctctggggctgtgttttgagcagcaggtagcctgctggttttatctgagtgaaatactgtacaggggaataaaaaagatcttannnnnnnnnnnatacttggcgttttttgaataaaaaccttttgttttaaaaaaaaaa

SEQ ID NO: 352462 - DNA, 541 bp, Homo Sapiens
  misc_feature (330)..(330): n is a, c, g, or t
  misc_feature (465)..(465): n is a, c, g, or t
  misc_feature (505)..(505): n is a, c, g, or t
taagatctcttttattcccctgtacagtatttcactcagataaaaccagcaggctacctgctgctcaaaacacagccccagagaggatctggaaggcacaccatccagaactgcttttcataattatcctatatacacagtcagcaatgcccctccccatcacccacagagccgggacccacctgggtaagtaggtgaggggccccacagaagccagggagctgcagcactgtcccgcctgagtcccgtcaccccacaaacagagcaagcgtcgcagccctcccccaaaaggtccccaagtcagaggaggaaaggaggaaagaaaactanggggcaggcagctatggaagcttggaataggaagggaaccaaataaataaataaataaatacataacattgacctccaggttagaattgcgcatctttcaaaagcaagaaacaaaaacagggtaaaataacttanagggcaaaatttcttaaaaattagatccactacaatcttnttgtatactaccatgccaactgtacacacatttaca

SEQ ID NO: 352463 - DNA, 1372 bp, Homo Sapiens
  misc_feature (106)..(159): n is a, c, g, or t
  misc_feature (584)..(594): n is a, c, g, or t
  misc_feature (651)..(707): n is a, c, g, or t
  misc_feature (859)..(882): n is a, c, g, or t
  misc_feature (1256)..(1256): n is a, c, g, or t
  misc_feature (1332)..(1332): n is a, c, g, or t
agacctcacacacacaaaaaatgcacaaacaatgcaatcaccagaaagctggtaaatgtgtgtacagttggcatggtagtatacaaaaagattgtagtggatctannnnnnnnnnnnnnnnnnnnnnnnnnnnnnnnnnnnnnnnnnnnnnnnnnnnnnaaagatgcgcattctaacctggaggtcaatgttatgtatttatttatttatttatttggttcccttcctattccaagcttccatagctgctgccctagttttctttcctcctttcctcctctgacttggggaccttttgggggagggctgcgacgcttgctctgtttgtggggtgacgggactcaggcgggacagtgctgcagctccctggcttctgtggggcccctcacctacttacccaggtgggtcccggctctgtgggtgatggggaggggcatggctgactgtgtatataggataattatgaaaagcagttctggatggtgtgccttccagatcctctctggggctgtgttttgagcagcaggtagcctgctggttttatctgagtgaaatactgtacaggggaataaaagagatcttannnnnnnnnnnatacttggcgttttttgatgaaaaaccttttgtcttaacaaagaaaacaaaaccccnnnnnnnnnnnnnnnnnnnnnnnnnnnnnnnnnnnnnnnnnnnnnnnnnnnnnnnnncatggtcggccgcctccggcccttctgaaaactttttctaaaccctttctttttggccccccgggccccacgtagggaacgggaacacatggcccttaccttggtttcccaaggaagaaccctggcccagtgactaaggcgtttggaatctnnnnnnnnnnnnnnnnnnnnnnnngcggcgggcaacccgaaggggttttctgaaacaaatttcccaaatgggacgttctccggaggggcctcttcacgtgggatacttattcaaaacggggagttctccaaggccgaggcttcccaatatatcaaattttagcgccccccggcccggtggccactctttaatcgcacacagaactgggctggcgtaactcccctttagacgcccattccttgcgccgaaaatggggaaaacccccttccacaaaacccgccaagtggattgacacccttgaactccgcccgcgcggagcattccagcccaccccttgtttgccctctctggccatacataaatattctttccgccctaggtgggggaaaaacacgggngggtcgtcaacaaaacactgctggcttccattcatggaggccccacgcgtttataaaaatccacacacttgtgggngagaacaactctcctcccaagcgattgtctggttttgaaa

SEQ ID NO: 352464 - DNA, 1127 bp, Homo Sapiens
  misc_feature (274)..(274): n is a, c, g, or t
tccacgttgacaccttctgcacaggtgcatttgtgagtcccctcggtgtctctgcagcatctatgtgtggatgaatagtgaagccacatgaggcctggtctgaagcagagaagatccgctcagcatcacgttgaatcccaagcccgcatctccgtgggctccaggacaatcctatgaaaatgacaccgtcggttcattgttcacatcggggaggagaattccatctgaaaatgagcgtgacttcactgacacccaagtccgtggcacagccctngtgctgagctccacagacctacagtccatcgcctccccttggagtgggcccacagctgcagacagtgttgtccaaagaagatgctctgagtagatgaatggaacaaactggaaactccagaaacaagcccttctttacatttctaatgtttggcttaaatggaaggtgccaaggaaggggatgaagacccgtgtccatctgcacttggagccaaggccaggaactcccggctgatttgcaggcgcctgtgtcagttctccactcatgtacacccagacgggggctcgatggcacaggaagcagatgatgccccgagtatatctacacttgggctgcaacaagaaacaacagagcccatgaaaactgacagtgctgaaagtgaagactgagattcaggagctgaggtgcccctgtgatccaggtcttccaccctgaaaccccatcctccatcaaggtcctgcctgtagagtctaccttgcaaagcctcctgctcctacccatgctacaggccaggaaccagagcccatcatctcagaggcccctggatgtccttcgaaggaaccaggaccctcagagcccagcatccatctctgtcatcatcttcatcacacccaaagaagagccagccttgcaggagggtttacatctccagggaagatgggctgccagcaactgcagaggatgcagccacctgcttaactgtgctgtccagccagccagccagctgcagggcctctttgctgctttaagagctgatggggccgggcatgtttggctcccacctgtggagacacagtacttgggaaatgggacccccttactaagaaaaggggcacacccttaattgggaaag

SEQ ID NO: 352465 - DNA, 1279 bp, Homo Sapiens
  misc_feature (25)..(25): n is a, c, g, or t
  misc_feature (894)..(894): n is a, c, g, or t
  misc_feature (946)..(946): n is a, c, g, or t
  misc_feature (1003)..(1044): n is a, c, g, or t
  misc_feature (1177)..(1177): n is a, c, g, or t
  misc_feature (1213)..(1213): n is a, c, g, or t
cggtccggaattcccgggatctgcncatctatgtgtggatgaatagtgaagccacatgaggcctggtctgaagcagagaagatccgctcagcatcacgttgaatcccaagcccgcgtctccgtgggctccaggacaatcctatgaaagtgacaccgtcgttcattgttcacatcggggaggagaattccatctgaaaatgcgcgtgacttcactgacacccgcgtccgtggcacagccctgtgctgagctccacagacctacagtccatcgcctccccttggagtgggcccacagctgcagacagtgttgtccaaagaagatgctctgagtagatgaatggaacaaactggaaactccagaaacaagcccttctttacatttctaatgtttggcttaaatggaaggtgccaaggaaggggatgaagacccgtgtccatctgcacttggagccaaggccaggaactcccggctgatttgcaggcgcctgtgtcagttctccactcatgtacacccagacgggggctcgatggcacaggaagcagatgatgccccgagtacatctacacttgggctgcaacaagaaacaacagagcccatgaaaactgacagtgctgaaagtgaagactgagattcgggagctcaggtgcccctgtgatccaggtcttctaccctgaaaccccaccctccatcaaggtcctgcctgtagagtctaccttgcaaagcctcctgctcctacccatgctacaggccaggaaccagagcccatcatctcagaggcccctggatgtccttcgaaggaaccaggaccctcagagcccagcatccatctctgtcatcatcttcatcacacccaaagaagagccagccttgcaggagggtttacatctccaggnaagatggggctgccagcaaactgcaaaggatgcagccacctgccttaactgntggctgtccagccaggccagccagctgcagggcctcctgctgcttaagagctgatgnnnnnnnnnnnnnnnnnnnnnnnnnnnnnnnnnnnnnnnnnnaatgggagcacagtactaggaaatgggagcacagtactgggaaatgggagcacagtactgggaaatgggggctcacagcactgcaaaatgggagcacagtattgggaaatgggagcacagtactgggaagtgngagcacagtactgagaagtgggagcacagtactgangaatgggatacactactgagaatgggagccagtactgggaaatggctacagtactgagaatgggac

SEQ ID NO: 352466 - DNA, 976 bp, Homo Sapiens
  misc_feature (30)..(30): n is a, c, g, or t
  misc_feature (705)..(746): n is a, c, g, or t
actagctccatttcccagtgctgtgcgtcncctttcccagtactgtgtcccatttcccaatactgtgctcccatttcccagtactgtgaactcccatttcccagcactatgctcccaattcccaggactgtgagctcccatttcccagtactgtgctcccatttcccaatactatgctcccatttcccagtgctgtgagctcccatttcccagtactgtgctcccatttcccaatactgtgctcccaattcccagtactgtgagctcccatttcccagtactgtaaactcccatttcccagtaccatgtgctcccaattcccagtactgtgctcacatttcccaatactatgctcccatttcccaaaactgtgctctcatttcctagcactgtgctcccatttcccagtactgtgctcccatttcccagtgccgtgctcccatttcccagtgctgtatactcctatctcccagtgctgttagcacccatctcccagtactgtgctcctattccccagtactctgtgctcccatgtcccagtactctgtgctcccatttcccagcactatgctcccatttcccagtactgtgctcacatttcccaacactgtgatcccatttcccagtactgtaagaccatttcacagtactgtgctcccatttcccagtactgtgctcccaattcccagtactatgctcccattnnnnnnnnnnnnnnnnnnnnnnnnnnnnnnnnnnnnnnnnnncatcagctcttaagcagcaagaggccctgcagctggctggctggctggacagcacagttaagcaggtggctgcatcctctgcagttgctggcagcccatcttcctggagatgtaaaccctcctgcaaggctggctcttctttgggtgtgatgaagatgatgacagagatgatgctggctctgagggtcctgttccttcgaagacatacaggcgtctgaatggggtggtga

SEQ ID NO: 352467 - DNA, 868 bp, Homo Sapiens
aaaatccaaatttccgccctcttgaaaaatctagaaacagcatctcaaatagcaaccatcagccagaattctgtatcagtttcaccttaagcagggcataaggactcctagacttccccaaggctgttattatttcccattttctccccaacccaaggtctaaagtgtcagttgtcattcagattcttagaagcagcctactgttcatttaaattgcttacctgctccctgtaaacagtttataactcctggactacaggataaagcccaaactcatgagtctggcattcaagaactatcacagcttggcctcaccactacacacagcctctgttctagtcacacagtcagaagccaccccaccttttacacctccttccctcaaataaatgtcattcacattgctccctcacacactcattttcttgtcatcctacttggctaaatcccaccaatccttcaaggtctaattcaaatactacttcctccaaatctttgagcacccctctaggccacaataaatcttccagggttgactgttcatcccaggacatatttagcactttgtagctctttaaataacatgtaccaaatgaaagatctaaaaagttacatagaagtatagaaaacttaagacttgttaaacaattttacacttgtagatcatatgtagttactgccatcacaaaattaacagcagaaacaaagtgaaacaattttccttttacctgaggctttttctagaatattacaaagtgcaaaaagagctgtgtcatttgtttctctcaacttgtgctcttaagtccttcaaattctgcaaataaagggatcaacacttccaattataaatccaagattggtctattac

SEQ ID NO: 352468 - DNA, 559 bp, Homo Sapiens
tttaaactgaacttattttttattaaggtcaggatgcatgaatagactcttctcaacagaaagataattcaacagcaatcaatttacagaatttagaacagcactacatttcagcaaaatgcaactagagaacatcagataaattatagtaatttgtttttaaaaatccattaaactatctcttacctctgcaataatgtatcatacatgcagttacagaagttagtagggaaaagcatgatcttccttccctattctctgcccatccatcttccaggaaaccacaggctgctgctgcccagagttggcatgaggcttcgaggctgctgcttttccccctacatcataaccgatttcaaatggtgctagacaaaaacagactctgaacaccaggagaaatcggtcagcctgtgtaagagatgggccagtggtgctcccagggtctgcacctcgacagtccaggtggcaagtctgatttcgggtgccccgcaatcaacgccgaatactccagggcatcctctaagagcagactgatggtgtcgatgtggacaaaatggtc

SEQ ID NO: 352469 - DNA, 808 bp, Homo Sapiens
ggcacccccgggaaagagatctaccgcaagagcaacatctccgtgtacgaagttgatggcaaagaccataagatttactgtcagaacctgtgtctgctggccaagcttttcctggaccataagacactgtactttgacgtggagccgttcgtcttttacatcctgactgaggtggaccggcagggggcccacattgttggctacttctccaaggagaaggagtccccggatggaaacaatgtggcctgcatcctgaccttgcccccctaccaacgccgcggctacgggaagttcctcatcgctttcagttatgagctctccaagctggagagcacagtcggctccccggagaagccgctgtctgacctgggcaagctcagctaccgcagctactggtcctgggtgctgctggagatcctgcgggacttccggggcacactgtccatcaaggacctcagccagatgaccagtatcacccaaaatgacatcatcagtaccctgcaatccctcaatatggtcaagtactggaagggccagcacgtgatctgtgtcacacccaagctggtggaggagcacctcaaaagtgcccagtataagaaaccacccatcacagtggactccgtctgcctcaagtgggcaccccccaagcacaagcaagtcaagctctccaagaagtgagcagcctggcccctgctgtcggacctgagcctcctggctcccagcctgtaaatatgtatagacctgttttgtcatttttttaataaagtcagttctggtggccctggactttggaggggaaggggaggcc

SEQ ID NO: 352470 - DNA, 358 bp, Homo Sapiens
  misc_feature (327)..(327): n is a, c, g, or t
gcggacagggctgaggatgctgctacaagcctcggggcaggtccaggtctccagctagctgccctcgtgctgtggaagggtgctttactgtgtgttcccgcagtgtctgtccacccagacctttgtggcagtcttacagctaaaactttgaccaaagctttggtcactttatgcaacctggttttgtactgtttctcagaggtgccttcttttttccaatccatactcaaataatagtctttgatgtctgtctttccttgaccccgtgttcgtgcaaagattcagagtctgtgtgtgggcttctactagggtgatgttacaacaggnggggtttaattgaggatatcaagtgtctgtt

SEQ ID NO: 352471 - DNA, 1157 bp, Homo Sapiens
agcgggctgagggctgagggacggctcagcgacgccacggccagcagcgctcgcgtcctccccagcaacagttactcaaagctaatcagatagcgaaagaagcaggagagcaagtcaagaaatacggtgaaggagtccttcccaaagttgtctaggtccttccgcgccggtgcctggtcttcgtcgtcaacaccatggacagctcccgggaaccgactctggggcgcttggacgccgctggcttctggcaggtctggcagcgctttgatgcggatgaaaaaggttacatagaagagaaggaactcgatgctttctttctccacatgttgatgaaactgggtactgatgacacggtcatgaaagcaaatttgcacaaggtgaaacagcagtttatgactacccaagatgcctctaaagatggtcgcattcggatgaaagagcttgctggtatgttcttatctgaggatgaaaactttcttctgctctttcgccgggaaaacccactggacagcagcgtggagtttatgcagatttggcgcaaatatgacgctgacagcagtggctttatatcagctgctgagctccgcaacttcctccgagacctctttcttcaccacaaaaaggccatttctgaggctaaactggaagaatacactggcaccatgatgaagatttttgacagaaataaagatggtcgggtggatctaaatgacttagcaaggattctggctcttcaggaaaacttccttctccaattcacaatggatgcttgatctacctggagaagggaacacggacttcgaggaacatcctttgcctacctaatgatggtcgtacaccggagcccctggacagcccgaagtggactgggtttgcaagacatgatggagctgttccaagcccagaatacaggggggggacctgaataagtcgcgagaatatctccgtgtcgatgtcgagctgtaccagggcttgtgcaaattctcaaacgtgcacgggcataggtatctgtgcggaaaattaccgctattccgcacaggagtgcacatgacccacatatgatttgagcagctacgggaaatgtattcgtcgtcttgtgtgggaagcacggagccaccaagtgtgtgtcttgtcgtaacgagcagtgtcgttcgcac

SEQ ID NO: 352472 - DNA, 1909 bp, Homo Sapiens
  misc_feature (1852)..(1865): n is a, c, g, or t
gtagcgaggcctgggtggcgaattcggcacgagggccaagctggacactgttcaaggcatcctggaccggatctatgcctcccagacagatcagatggtttttaacgcctaccaggctggggtaggagcactcaaactctccatgaaggatgtcacagtggagaaggcagagagcctcgtggatcagatccaagagctctgtgacacccaggatgaagtttctcagactctggctggtggggtaacaaatggcttagattttgacagtgaagaactggagaaggaattggacatcctccttcaggataccaccaaagaacctttggatctgcctgacaacccccgcaataggcattttaccaacagcgtgcctaaccctaggatctcagatgctgaacttgaagctgaacttgagaaactgtccttatcagagggaggtttggtcccaagcagtaaatctccaaaaaggcaattggaaccgactctaaagccattgtaggaccctcaagtgaaggaccctcatgtaaaagagagaccaggcttgctgggtgtgtacatagttatttaaacaagaaactctcagaatgtgtttggaagaggagaaaggagaaccactgattttatctggatgctactacttactacaggacagatagaatttctggaagcgatgctccaaaggcttgctcccagctgtatcatggacctgccttctcatctttatagtgccacgatttatacagtcctgtgtctgacctgtcatttcatagcctgcagttcttgccattggcacacttagatttgtcttcacccaccagcttcgttccagcccatgaaggggaaagatttgcagctttgccaaatctgaatcagttcccactccccccctgcggttttttagaggggtttatcctgtcgctaatgtcagttaaatagcttattcctgtcccacttgatttcactggtaagaatgagaatgaaatacttaaaggttttatttgaggggacttagctgccattttatggaaaaacatgtagtataaaaggtttttctccagggtcatttgacagaattctccaggtgttcagagaaagaggtcgccccaagtggcccagagtcgtgacagtccggaggggctggtgtggccggtgggcgctgcctcttcatctgatggagccaggaggtccgccggtgggggaaaggcttcttccgaggcttctgcactcgcctgggaagaggcccagtcactacaggaccctgagatgtccagaccccttatgcaaagaggcaaaattgttgccttggccccatcatggagtaacttaaaaatacatatctatcttccagaacaagccacacaacaacacacctcccctccttgagcctggcacacagcaccgggctctctgaatttggaaagtgtttcattttgtggcctactgctcggggcaggggggctgagccaggatgtgcaatagaagcaggggttgtcccctctgccagatctgtggggagctgcccaggccacccgtgcacctgtcctgcttcctgcagtccccactccctgcctcctttgagggactgggggacttggggtagggggacagacgggaaagggtctgaatgctctggcaatggcgagaagaagcgatcgccacactgccactctgctgcccagccaccaggatttctgcctggagccctttgccctgtccctgctgcctgaggtggcgtagagcagaggagaagaatttgctccaggccaggagcacaaatcgttgttcaatgaatttctctccaactcgaccttggtaaacggaaatgttgggggtgaagagaaacaatcactannnnnnnnnnnnnnatctggtaaataattaaaagaaaaaccgaacacttaaaaaaaaa

SEQ ID NO: 352473 - DNA, 457 bp, Homo Sapiens
  misc_feature (370)..(370): n is a, c, g, or t
tttgacagtgaagaactggagaaggaattggacatcctccttcaggataccaccaaagaacctttggatctgcctgacaacccccgcaataggcattttaccaacagcgtgcctaaccctaggatctcagatgctgaacttgaagctgaacttgagaaactgtccttatcagagggaggtttggtcccaagcagtaaatctccaaaaaggcaattggaaccgactctaaagccattgtaggaccctcaagtgaaggaccctcatgtaaaagagagaccagggcctgctgggtgtgtacatagttatttaaacaagaaactttcagaatgtgtttgggaaggagggagaaaggagaaccacttgattttantctgggatgctcactactttacttacagggacagataggatttcttgggaaggcgatgcttcccaaagggtttggttcccagctgtt

SEQ ID NO: 352474 - DNA, 1301 bp, Homo Sapiens
  misc_feature (62)..(62): n is a, c, g, or t
  misc_feature (88)..(88): n is a, c, g, or t
  misc_feature (93)..(93): n is a, c, g, or t
  misc_feature (162)..(162): n is a, c, g, or t
  misc_feature (1116)..(1116): n is a, c, g, or t
  misc_feature (1141)..(1141): n is a, c, g, or t
  misc_feature (1201)..(1201): n is a, c, g, or t
tttgtgcccaaccaaaaatgctgcctctcttggtctgcaaggtaaaattgccaaccttgagnacaaatcttggggttcccagcttggnccttncctgctccaacgtgcttaaagtcccaaaaggggctgcgaaaaccatctggctcctcaaaaggaggtccnacccatgttctggtggctccccagtgagccccctacccctccggctaccccccagaatcccatccttcattcctccaaccaagctcctgtgtgagctgcagcgcccacacgggggaagccctgcactcccagcagcatcttccagccttggcacagaactgatggcaaaggaagggctgggttttcagcttctgggacccgaggaagaccccacctcactcctccttccccagtacatcagactggttaggaggcatcccagaaggggcagcctcatgcccaggtttcagccctaaaggtaatgattgtcttgactctgccttggcatttcgctcggaatcacggcagacttggagtgtttcttcaaggcaggcatctgcttatgagcaaggtcaaagatttttcaaaatattgtgcattaattcattaaagctactgttaaatatttgctgtttttagattggcgtccgtgctaattctgcagttgtagcactgtatattttatctcatttctgtgccaagaaagttcatctttatgtttttctaatacacaatcttgatcatgtttccaaaataaagcttcagctccttggtcaatagaagtaagggtgtagccatccagggtctcccggctctaggcagaccggatcccgcggttcatcccatggttgttgaaatgtacctcgatcagtcatctctggtattcctcactctggccatgagccattgccatcttatgggcccgatttgggtactctgaattatgtcatggagtagacagttacttctaaatcccagcaaccaagttgcgtatccttccttatagctagtttctatagagaagtgaaaaagaaatctggcttccttaataagatagttgagcctatgacattaagggagcagcgctgctggcggaagattctagattcactggtggtttaagaggcccagggntttagttcttactggtgcgtaagtnttttcccatcctaaccggaaaaccactcacccaggcttcccccacttcccctcaaatttnctcagctctgccgctggtctccatgaacggcaaggggaaccaccactcattcactgtcagtgtaggtaagacagaggatgcccttgcaaaaattgggact

SEQ ID NO: 352475 - DNA, 339 bp, Homo Sapiens
  misc_feature (217)..(217): n is a, c, g, or t
gaagcccaccagcctgcctggttgatggacagcaggctctgcttctggaggcggcttatatcccaacagcctgaggcagggctctgtggcccaggccagcagtggctgcctctcttggttctgcatggtacattttgccaaccctgaggaccagttcttggggttccaggcctcggccttcctgctccacgtgctcaagcccccacatggggctgcngaacaccatctggctccttacagggaggtccagccatgttctctgggctcccagtgagccccctcccctccggctacccccagaatccatccttcattcctccaccaagctcctgtgtgagc

SEQ ID NO: 352476 - DNA, 924 bp, Homo Sapiens
  misc_feature (154)..(162): n is a, c, g, or t
  misc_feature (231)..(231): n is a, c, g, or t
  misc_feature (557)..(850): n is a, c, g, or t
tccaaaaatgggcttgataaattatggcagatcaccattcccatttttcataggtaaatatccatagtaataaaatctattatttaccagtgggaccaaaataacatataaggccagacatttaaaacaggtgttgtatcatcaacatgctctnnnnnnnnnctcatctgactagatctagacccaggcctttttgcatgaggccaagacaacaagtatacaatcaatacnccatgtgacacagtccaagtgctggggaatatgagggggcagtgggccatggggaggaagatatcagccccagtgaaaagctggggtttggctttactcgtgatattttgatgctctatgtctgagtaaaggaggaaatttaataaacactttgataacgtacaaaaggcatcgactcccatttcaaaaataaatgggaagacttcacagtcaaagttcagtcacttgtcagtatctgccctggaactctgatgcagtatcaactcttgtactctctccttttccctccactagcatgccctctctcagttgtttggtttgtttgnnnnnnnnnnnnnnnnnnnnnnnnnnnnnnnnnnnnnnnnnnnnnnnnnnnnnnnnnnnnnnnnnnnnnnnnnnnnnnnnnnnnnnnnnnnnnnnnnnnnnnnnnnnnnnnnnnnnnnnnnnnnnnnnnnnnnnnnnnnnnnnnnnnnnnnnnnnnnnnnnnnnnnnnnnnnnnnnnnnnnnnnnnnnnnnnnnnnnnnnnnnnnnnnnnnnnnnnnnnnnnnnnnnnnnnnnnnnnnnnnnnnnnnnnnnnnnnnnnnnnnnnnnnnnnnnnnnnnnnnnnnnnnnnnnnnnnttgcttcaggatgctagggatacttctgggagataactgctaacagattagaaagaagaatgatacataccgct

SEQ ID NO: 352477 - DNA, 1369 bp, Homo Sapiens
  misc_feature (28)..(28): n is a, c, g, or t
  misc_feature (79)..(79): n is a, c, g, or t
  misc_feature (112)..(178): n is a, c, g, or t
  misc_feature (641)..(701): n is a, c, g, or t
  misc_feature (1018)..(1018): n is a, c, g, or t
  misc_feature (1030)..(1030): n is a, c, g, or t
gcggggcggggtcctcccgtacacccgnccccacgccgccgccggcgggccgggccggataatcaaatcgggggacggngggagcagattcctttccgggttggcaaaaggnnnnnnnnnnnnnnnnnnnnnnnnnnnnnnnnnnnnnnnnnnnnnnnnnnnnnnnnnnnnnnnnnnnagaaagagcttgccggggggcgagcaggacaggacgaagccggagtgtaggcggcagaggattcgctcccagagcagctgcggccaggtatatgaatgacctaaaggtacaaataaagacggagagagaacagtgccaactgggagcagggcaagaatgccaattcctcctcccccgccacccccacctggtcctcctccacctcccacatttcatcaggcaaacacagagcagcccaagctgagtagagatgagcagcggggtcgaggcgccctcttacaggacatttgcaaagggaccaagctgaagaaggggaccaacgttagggcccggagggctccccatcctccagaggggcgaaacggagccacgggggggctatggcctctggcgcaacctgcgcctcctagccgtccggcacccgctcccccgtgggagggcgtgctcccgtggtggcgcgctnnnnnnnnnnnnnnnnnnnnnnnnnnnnnnnnnnnnnnnnnnnnnnnnnnnnnnnnnnnnngaggaggcctcgggccgtgccccgcgcgcggccgggcccgtagcggggggcggtggtgggcgcggccagccacccccggcctggctctggggcgaatcgacttgggtgcgccgcgcgtgtggttgttcgcgttttcctcgactgggtagttggggcagaccctgccgggatcgcttgtgctaccgcccgggcctcgtctctgccgcccccgtgcgcgtgcccgcgcccgttggtgccgcgcggagcgtagcgtgtaggcgacaaccgcttcccgctctccactccggatcgaaccgcaagggcgccggatgcccacnatcagcgcgagntccgctagttgtgcgccgaccgcgtgaggcgagcgtctgagacccgttggcggccaccccccgcggggagcgggggcgcgcgggcgacacatagcgcggtcccgcgggagagtgcgtgcgcgcggctcgatagcccgctaacctgggcgcgggggtggcgctccgaatacctcacgcgacccctcgcgttgaccgtgccgaggacagaaaacagctgccataattgcgctgcgcgtgtgcgcggcgcgggtcggtccgatcggggggtatggtggaccggtggcatgtgcggccccggtgatgaaatcggatctgcccctcggggaacccgccccccgc

SEQ ID NO: 352478 - DNA, 864 bp, Homo Sapiens
  misc_feature (98)..(110): n is a, c, g, or t
  misc_feature (287)..(581): n is a, c, g, or t
aatgaggggcagtgggcatgggaggagatatcagccccagtgaaagctgggttttgctttactcgtgatatttgatgctctattctgagtaaagaggnnnnnnnnnnnnncactttgataagtacaaaagcatcgactcccatttcaaaaataaatgggaagacttcacagtcaaagttcagtcacttgtcagtatctgccctggaactctgatgcagtatcaactcttgtactctctccttttccctccactagcatgccctctctcagttgtttggtttgtttgnnnnnnnnnnnnnnnnnnnnnnnnnnnnnnnnnnnnnnnnnnnnnnnnnnnnnnnnnnnnnnnnnnnnnnnnnnnnnnnnnnnnnnnnnnnnnnnnnnnnnnnnnnnnnnnnnnnnnnnnnnnnnnnnnnnnnnnnnnnnnnnnnnnnnnnnnnnnnnnnnnnnnnnnnnnnnnnnnnnnnnnnnnnnnnnnnnnnnnnnnnnnnnnnnnnnnnnnnnnnnnnnnnnnnnnnnnnnnnnnnnnnnnnnnnnnnnnnnnnnnnnnnnnnnnnnnnnnnnnnnnnnnnnnnnnnnnnttgcttcaggatgctagggatacttctgggagataactgctaacagattagaaagaagaatgatacataaaccccgattaggagaagtttggtgacagacctaatcatggtctgtcccagagttaatatggtccaggggatggcaaaggacagcagaccccatacacattacccccgttgagccctccctcacctagcactcgggagacttgggtttcaccggccaccatgcacagatccctagcctcgtgatccaatcaactgcaaaggtttctaacacagt

SEQ ID NO: 352479 - DNA, 810 bp, Homo Sapiens
  misc_feature (55)..(55): n is a, c, g, or t
accctttcctctagctaactcaattctttccttaattgtccactccttaatctgnccagccctgaacgctacttaaaaccggcacaagtcctcagccgcaaagtaaaattgagggtggaaagaagaggggcggttgatcaaatagtttcttgacctaggcagcaatgctaaagagttatgttcagttttgctagaaaacgctgacgagacttttactcaggttgtattcatgtaacaaaccagtaaacaggtccggaaagagaggtgaacagagccgggataagaacacaaatagtaacaatccgagaactaaagaaccaccagacacagctgcgctacccactctccccatatcccgtccgcccgcccaccccagcatcctcacagactgattcaccagccaggagccaagcaccgcactccccacccccgaaatccagcaacttcgtgcctcagcctcgcgcagctgaagcaacaggacatgcatgcttgcaccccgccagcgagcgacaacctcctcctgtcaccgtgcaggtgcctagcatacattaccctctagcctgtaaagaagacgcgtccgaccttctgccataggcgctgagaaggattgcggacgatgcaggggccggaagcgcggcgggatatggcccaggtacacaatacctggcactacccgcttcattgctgccacaggccgcttcttcggattcctcctgctcctcctccgcatctagtgtctgttctgtcccttccagcggctcttgctccgttgcggccttctccgattcctctgcctccatgttgactgac

SEQ ID NO: 352480 - DNA, 1688 bp, Homo Sapiens
cagacattcctaagggatgatcagcataatctggtctttgaatataacttggcactggccttgttggcatcagtggataatgtggtctgagtttaccagtatatcgataacctgcccatgggtcagtattaatatcaccttccacagtccaggaagacacttctcgcttcgccttttcatcttttgctttcttatgtagtaacttgtgagtagcccaacttcctttaaaacattctattgtgaaaaagagaatttagatatacatcaatataaaataggttaaattgtgatttaaccatgcaaatgaatctatgcagtcattagaagtaatgaaattaggtcgtgctgctcgtgtcagtcaacatggaggcagaggaatcggagaaggccgcaacggagcaagagccgctggaagggacagaacagacactagatgcggaggaggagcaggaggaatccgaagaagcggcctgtggcagcaagaagcgggtagtgccaggtattgtgtacctgggccatatcccgccgcgcttccggcccctgcacgtccgcaaccttctcagcgcctatggcgaggtcggacgcgtcttctttcaggctgaggaccggttcgtgagacgcaagaagaaggcagcagcagctgccggagggaaaaaagcggtcctacaccaaggactacaccgagggatgggtggagttccgtgacaagcgcatagccaagcgcgtggcggccagtctacacaacacgcctatgggtgcccgcaggcgcagccccttccgttatgatctttggaacctcaagtacttgcaccgtttcacctggtcccacctcagcgagcacctcgcctttgagcgccaggtgcgcaggcagcgcttgagagcggaggttgctcaagccaagcgtgagaccgacttctatcttcaaagtgtggaacggggacaacgctttcttgcggccgatggggaccctgctcgcccagatggctcctggacatttgcccagcgtcctactgagcaggaactgagggcccgtaaagcagcacggccagggggacgtgaacgggctcgcctggcaactgcccaggacaaggcccgctccaacaaagggctcctggccaggatctttggagccccgccaccctcagagagcatggagggaccttcccttgtcagggactcctgagggcctgggtggccccttccatttcctggccctgctctgcttcctgtctacctcatactagaatgatcgtgactacccgggcagacattttactgtgtttctcagaccaagtgtctactgatggcccaaacatggagttttgtgggcttccactgtccccactccgaactcctgtatgtgcctggctgagtcacctaattcatactgtcatactagcataattatgactattgcatatgcttgttttgtttgactcttggctgcctacgtctgtagggtcccctgaaaatcccacttcctgcccccagaaagggcctttatttccaactaggaggataatgcctagtccaggcaatctttctctgtttagcagtcacaggtgagggtggtattagcatcttttttatgtagaaaaaattgagttaatggggtggactgggttgggaagaaatacatttcctaatgtatttatagaaaataaaaatatttttatgtgccttttaaa

SEQ ID NO: 352481 - DNA, 1135 bp, Homo Sapiens
gcctctttccaccgctcccccccggacgtgcctcctcccctagctggtaccggtccggaattttccggatcagcggcgggcccagctcctcccccgactcggtctctctcccctcccctccgaccggcagttcctccctcccgccgccgcctcttcctcggtgaggcgctcttccagcgggcaggcagcatggcggccgtggagacgcgggtgtgcgagacagacggctgcagcagtgaggccaagctccagtgtcccacttgcatcaagctgggcatccagggctcgtacttctgctcgcaggaatgttttaaaggaagttgggctactcacaagttactacataagaaagcaaaagatgaaaaggcgaagcgagaagtgtcttcctggactgtggaaggtgatattaatactgacccatgggcaggttatcgatatactggtaaactcagaccacattatccactgatgccaacaaggccagtgccaagttatattcaaagaccagattatgctgatcatcccttaggaatgtctgaatctgaacaggctcttaaaggtacttctcagattaaattactctcatctgaagatatacgaagggatgcgacttgtatgtaggcttgctagagaagtcttggatgttgctgccggcatgattaaaccaggtgtaactactgaagaaatagatcacgctgtacacttagcatgtattgcaagaaattgctacccttctcccctgaattattataatttgcccaaagtcttgctgtacctcagtgaatgaagtcatttgccatggcaataccagacagaaaggcctgacaaagaaggtgacattgtcaatgtggatatcactccttatcgcaaagggtgatcatgggggacctgaatggagaccatttaggtggagaagtggcattgatggagcgcgggaaacttgttcaggaccaccatattgagtgcctgatggcaagcccagtgactgccgtgaagactggtggtcgggtacagagaaattgcggaaacacttatccaagaagcttgcccaagcgaatggatatacaggttgttcgaagcattggggggcatggaaatccccaagctttgctaacaagtccccaagggaccccag

SEQ ID NO: 352482 - DNA, 839 bp, Homo Sapiens
  misc_feature (712)..(754): n is a, c, g, or t
  misc_feature (803)..(803): n is a, c, g, or t
  misc_feature (813)..(813): n is a, c, g, or t
ctctggtgagggttggccacgagagagatttgcatgaggtttggaagtggaagtagagcaacagccatgcgtattcactggaagtggatgtaggtcaggccctgttccatcacgtgcacgttaccatggatctcctgcacttgtggtgtgggcagccgctgggcccacggctcctcccactcccgcagaactctgcctttggcttttccagaccctgggccgggtatgagaaccagcttcttggtctgcagccacaaggatgaaggtttggggatgagagaccagcacgggctctgatgagagacaggtgcaggtcccagcttgtggcttgcaggtctcagtcgtacttgctctcccccaccatccattccaaccgcctggcctgtggtctggtgaagaagaaacagccgaaccgagactttcaccagcccctctaattgctcaaaccgctttcacaatcctctctttctacatcattcctagtggttcttttctgatggaacctctgactggtaacatggcattaccagtcctttccctctcatgttttgctatttcctgatggaacctgcgagtctgagtgatttgtatttcaagaagcagttatgctggatctctttgttggttaataccccatgacctatctggccgttatgggatatttcagggataggagttgtgaaagagcccttggctggacgtttctagcctnnnnnnnnnnnnnnnnnnnnnnnnnnnnnnnnnnnnnnnnnnngccttcctacagcgtgagcagggtctgggtgggctctcaagcccctttnagctctaagnattccaagtttgtgattccgatacat

SEQ ID NO: 352483 - DNA, 839 bp, Homo Sapiens
gttcctgagagggacgcgtgcctgcggagccaggcttactacgtgacccggacaccaggcatacgctaggggcagtcagctgtgccttctctttcggagttgttccgtgctcccacgtgcttccccttctccactggctgggatcccccgggctcggggcgcagtaataatttttcaccatgcatcggaaaaaggtggataaccgaatccggattctcattgagaatggagtagctgagcggcaaagatctctctttgttgtagttggggatcgaggaaaagatcaggtggtaatacttcatcacatgttatccaaagcaactgtgaaggctcggccttcagtgctgctggtgttataagaacagagctggggtttagcagtcaccggaagaaaagaatgcgacagctgcagaagaaaataacagaatggaacactgaacataaagcaggacgacccctttgaactcttcatagcagccacaaacattcgctactgctactacaacgagacccacaagatcctgggcaataccttcggcatgtgtgtgctgcacggattttgaagccttaactccaaacttgctggccaggactgtagaaacagtggaaggtggtgggctagtggtcatcctcctacggaccatgaactcactcaagcaatggtacacagttgactatggactgtgcattccagggtacagaactgaggccccatcagcgatgtggctgggcaagatttaatgaaacaggtaattctgttctctggcctcttgtcaagaaggtgtctcgtccattgatgaccagctcaacatcctggccatctccttccaagttgcacc

SEQ ID NO: 352484 - DNA, 562 bp, Homo Sapiens
  misc_feature (77)..(77): n is a, c, g, or t
  misc_feature (86)..(86): n is a, c, g, or t
  misc_feature (88)..(116): n is a, c, g, or t
aatgaaaaccagaaaattaattaatctctaaaattaaactttacactgaatgttcttgtttctctaattagaacttntgctagcancnnnnnnnnnnnnnnnnnnnnnnnnnnnnnagctctagagggagtagggagaaaatacaggatgaaattgaaaacagggactaacaacttttcactgaatgccagcaagctctctaaaattagttttctttggttgaacaaatttacaattcattgtacttcatttcacagcattaaacatttactcgaggcagtttattctgtttgctctttcatcccccttcttatttacttttttcttgtgctctaaaacttttgtcaatctttaacaaaactgtgctgttaccttttttaatgttaaaagaattttaacactgtcaactgtagtttgtgcagatgtatgtcagaaaaaaatgtacagtatgtgtcaaaatatatttgaatatcttgttgctgttgctgttagttcctggctctctaattttctgtctgttagggagtttcttaagatttgaaatacaagttaagaactatgg

SEQ ID NO: 352485 - DNA, 1650 bp, Homo Sapiens
  misc_feature (1512)..(1512): n is a, c, g, or t
  misc_feature (1633)..(1633): n is a, c, g, or t
tcagccctaggcctccatccaacaccgtggaaatgttgctgccctcttcttggcgctgaccccaagattgggtttcctttctgccgctccctccactgttgtttatctaactgggcccccactccaggtccagagggactgtgctcactgcacagacatcactcagcttccgctccccagtcctgcagagctgttgccagggtgcagtggggaggggagtgaaatgtggaggactgtgtacctcagtcctctctctaaactcctcagcctcccaacaggggcctcctcacctgggttctgagtgtgtaccccttttagagagtgagatgccacccgggcagcactcgttaaagctggccagcacgagtgactaaggggagagagcatgacatagacctgggtggcaacggggacctctggaagcaggtgggagtaacagaggagagggcagtggagggtagaggaaaaggacctccagaggtggggtgtctgtgggggcggcctttgcctccctaaacctgtgcggaggagtggagtgtgcttgtcgctcaaacacatctctgggggactgaggacgttgtcacaagccccaactggagaaataattccaatggcagggtcagaggcaagcattctctaaatcttgcccaacccttccatccttccctatcctatgagctgaagccctgctgtgtgtcgcagggtcttcaaaggggcatcctgccaccaccccagggcgctggccccacgtcctgttcccctaaagctctgacaccgccttctctccgtgtgctccccccaccacctccaccctgatgtgcttcagtgtgcatgtctgtgaacagccctcctgccctgccaactcccctggctaaagtctccccagcagatttagcacccagggattgagctcacatttcaggctagagaggataacccttgggccacccacatctctcacccctgatgcttcttacttcgcctgagccatcagaactcctccttaccctccttcagcccctctcatcttccttcagcccagccaggcctgcaccaccaactgtgtggcctccacctatgcaacatcgcctctggctccccttcccttcttcctagcggggagtgcgaggggcccaaattgtggggataccatggcccatggcttctaaagggtttagctttactttcaggtagagatggctgagtgaggagggagaagaggctagagagagggaggcttgggcaggggaaacagctgcccaccaggttttcctggacagcagtgcccacctgcctactagcactgaacctgcctggaccctgagtctgtgctccttgggggcctggcgtttggagcacccttctttcctctgaatggacatctgtgaggtacaggtggtgagctgcagcctcaggctccatttcttagccagctggcacctggatgtcatgctttgtgtggggacagcctggccacctcagggctccaaggaaggaggaacgtggctcctncctccctcaggcctgttcctgagacagagcctggtctcacaagaagggaagggggaccctctattattattttgcctgtattgaccatttctgcctaagtcggctcagacaggcctatctnccacacatgcacagctt

SEQ ID NO: 352486 - DNA, 592 bp, Homo Sapiens
  misc_feature (470)..(470): n is a, c, g, or t
  misc_feature (492)..(492): n is a, c, g, or t
  misc_feature (562)..(562): n is a, c, g, or t
  misc_feature (580)..(580): n is a, c, g, or t
gtgaccagcaggctggattccaactagctaatgcattcagcaggtctgaggctggggccaggtgtcagccctaggcctccatccaacaccgtggaaatgttgctgccctcttcttggcgctgaccccaagattggggtttcctttctgccgctccctccactgttgtttatctaactgggcccccactccaggtccagagggactgtgctcactgcacagacatcactcagcttccgctccccagtcctgcagagctgttgccagggtgcagtggggaggggagtgaaatgtggaggactgtgtacctcagtcctctctctaaactcctcagcctcccaacaggggcctcctcacctgggttctgagtgtgtaccccttttagagagtgagatgccacccgggcagcactcgttaaaagctgggccagcacggagttgattaagggggagagagcattgacattaggacntggggtgggcaacggggggacntttggaaaggcaggttgggaattaaacagaagggagaagggcagttggaaggttagagggaaaaggaacnttccagaaggttggggtnttttttggggtt

SEQ ID NO: 352487 - DNA, 1117 bp, Homo Sapiens
  misc_feature (13)..(13): n is a, c, g, or t
  misc_feature (73)..(73): n is a, c, g, or t
  misc_feature (539)..(566): n is a, c, g, or t
aatccccaacctnccctactaacaatgaaacctcccctggaaccctgaatctgtgctcccttgggggccctgncgtttggaaacacccttctttccctctgaatggaacatctgtgaaggtaaaaggtggtgaaactgcagcctcaggctcccatttccttaagccagctggcacctggatgtcatgctttgtgtggggacagcctggccacctcagggctccaaggaaggaggaacgtggctcctcctccctcaggcctgttcctgagacagagcctggtctcacaagaggggaagggggacctctattattatttttgcctgtattgaccatttctgcctaggtcgtctcagacagcctcatctcccacacatgcacagacttagagagaaaccaattctttggtctattttcttggtagctttactgattgccagggaaaatgaaaaccagaaaattaattaatctctaaaattaaactttacactgaatgttcttgtttctctaattagaacttctgctagcagctgtggctatnnnnnnnnnnnnnnnnnnnnnnnnnnnncctcacacctacacgtttgcactccggaactgtcagagggtgtcaggcacagacagactctaggttgcctagacaggcacacacatgcagtcactcccaagccccctttggtgctctgctcagcgcctgcttagtggaaggagtccctggagagcaggcactcctggactggggttgtagcccatgacctgccctttggggacacagttctggaggctctgggccaatgaatcagcccaaggaggatgggcaatggcgctcagcctgaatcagtcagctaggtctcttgtggccctgggggctgatgtgattcctgtaggtgtggccccagggtggacagctacagagtgatgggggactcatgtagggcacctggaaggctccatgtgtcctggggacaagggcttgtggggtgggttgggcctggctggggagaagacaggtctctgtcaattgggtgcatcacactgtggcctttttgtcgtggatttaagcgcaaagattgtacaaatcaaactggtggataataaagtcgtggatgactcactgac

SEQ ID NO: 352488 - DNA, 443 bp, Homo Sapiens
  misc_feature (403)..(403): n is a, c, g, or t
cggtacccggtgtttatcgatgccacttcacatccattaggatggctacaatcaaagaagaaagtggagcaagtgtccagtatgtgaagaaattagaactctcgtacactgctggtgggaatgtaaaatgatgcagccaccaaacagtttggtggtttctcaaaaagttaaacatagatttatatataactcagcaattccattcctaggtatacacccaaaagaaatgacaaggatccaaacagacactttacgtcaacattcacagcagcactactcacaataaaccaaaggaagaaacaagcatccatcaacagatgaatggataagcagaatgtgggatatacatacaatggaatattattcagcaataaaaaggaatgaaattcctatacatgccacnacatatatgaacttgaaaacaccttgctaagtgaaataag

SEQ ID NO: 352489 - DNA, 881 bp, Homo Sapiens
  misc_feature (67)..(67): n is a, c, g, or t
  misc_feature (835)..(835): n is a, c, g, or t
atcagctggaggagaccaaaaaggaaaagagaaccagaataccatacaagccaaactatagcctcantttatggagcatcatgaagaactgcattggaaaagaactctctaagatccccatgccggtaaactttaatgagcccttgtccatgcttcagcgccttactgaagatctggaataccatgagctgttagaccgagctgcaaaatgtgagaattctctagaacagctctgttatgttgcagctttcaccgtgtcctcctactccactactgtcttccgcaccagtaagccattcaacccactgcttggggagacctttgagctggaccgattagaggagaatgggtaccgatccctctgtgaacaggtgagtcatcatccccctgctgctgcgcaccatgctgagtccaaaaatggctggacattgcgtcaggaaatcaaaatcaccagcaagtttcgaggcaaatacctctccattatgcccctcggtaccattcattgtattttccatgcaactgggcaccactacacttggaagaaagttaccacaactgtacacaacattattgtgggcaagttgtggatagatcagtctggcgaaattgatattgtgaatcacaagacaggagacaagtgtaatcttaaatttgttccttatagctacttctctcgggatgtagcaagaaaggtgacggggggaagtgacaaatccatcaggaaaagtccactttgctcttctggggacgtgggatgagaaaatggaatgtttcaaagtacagccagtcattggggaaaatgggggtgatgctccacagagaagccatgaagcanaggaaagcagggtcatgctgtggaaaaggaatcctttacgaagaag

SEQ ID NO: 352490 - DNA, 1009 bp, Homo Sapiens
  misc_feature (3)..(3): n is a, c, g, or t
  misc_feature (8)..(8): n is a, c, g, or t
  misc_feature (13)..(13): n is a, c, g, or t
  misc_feature (15)..(15): n is a, c, g, or t
  misc_feature (18)..(18): n is a, c, g, or t
  misc_feature (20)..(21): n is a, c, g, or t
  misc_feature (23)..(23): n is a, c, g, or t
  misc_feature (25)..(25): n is a, c, g, or t
  misc_feature (28)..(28): n is a, c, g, or t
  misc_feature (44)..(44): n is a, c, g, or t
  misc_feature (48)..(48): n is a, c, g, or t
  misc_feature (85)..(86): n is a, c, g, or t
  misc_feature (101)..(101): n is a, c, g, or t
  misc_feature (111)..(111): n is a, c, g, or t
  misc_feature (278)..(278): n is a, c, g, or t
  misc_feature (314)..(314): n is a, c, g, or t
ccncatcnacatntnccnanntnancanacactccacacgagantttnagtgaaggggccagcatccgcatgagaccatcgagannagtatttccacatantcaaagggtnccaatatttaactgaacatctggtttctttttggaagttttctttcacatggtttgtcattacaagacaaggtctgcccagccaggtggatctaccttgcccccatcacctgccgcccccatcaaacatgttgggacaatgcccataggaatggacctccttccccntctccagctgggactggcgttttttagtctctggantatgatggttctcatgggtaggatgagatctttggcagaaaggtcttcggtggtgctctgagcctgcgctgcataggactgagcagacccacctcctccagcttgggtggccctgccactcctggttccaagtctcccctttcctggcaggtcttaaggaaacaacgaaccccccacccctcacatacccagaaccatcagtatgtcacttccctaatttctatcagtgtatcctcattatttcatactgttttactaatcctgagtctaaacagatttgcctcaaaaggagaccattctattttttaaagtacttagtgatacacgtataagctttgcatggacgaattaaataagcacattgaccttggcttgtacattcagaacctgaacatccatgtgaaaactgggtccatttttgagagatgtgaaactacagtttatttgtaataaataaatataatctatccgtatatgcatatatctatatgctgtgttaagtggtaatggtacattacagtctgtgagagatggatcgctccctctgtaaggaacaagacgttctcagctgatgtcacggtaggtttagattctgtagagtgttccccaacccgcaccgttctgtacctctcacaccactgcttgcccgggcagtagtggctgaccaataaagacctttacctgttttgtatggc

SEQ ID NO: 352491 - DNA, 1072 bp, Homo Sapiens
  misc_feature (121)..(184): n is a, c, g, or t
  misc_feature (493)..(493): n is a, c, g, or t
cgcacttctgactcgagtccccgccgcgcttgtcgtcgccgccgccgggatccgcagccccgcgccatggagccggccgcgggcatccagcgccgcagctcccaggggcccaccgtcccgnnnnnnnnnnnnnnnnnnnnnnnnnnnnnnnnnnnnnnnnnnnnnnnnnnnnnnnnnnnnnnnntgcgcgagccgccccagctggaggaggagcggcaggtgcggatcagcgagagcggccagttcagcgacgggctggaggaccgaggcttactagaaagcagcacccgcctgaaacctcacgaagcccagaactacaggaagaaggcattgtgggtgtcctggttctccatcattgtcaccctggccctcgcggtggctgcctttactgtctccgttatgaggtacagcgcctctgcttttgggtttgcatttgatgccatcctggacgtcctgtcatcggcgattgtcctgtggcgttacagcaacgcgnccgctgtgcactctgcccatagggagtacatagcctgtgtcatcttgggggtgatattccttctgtcatccatatgtatagtggtcaaagccatccatgacctctcaactaggctgctcccagaagtggacgatttcctgttcagtgtctccattttaagtgggattctttgcagcatcctggccgtgttgaagttcatgctggggaaggttctgaccagtagagcactcataacagatgggtttaactccctcgtgggtggcgtgatgggcttctccattcttctgagcgcggaagtgttcaagcatgactcggcggtctggtacctggacggcagcataggcgttctgatcggcctcaccatatttgcctatggggtcaaactcctcatcgacatggtgccgagggtgaggcagacacgtcactacgagatgtttgagtgaagggggccagcatccgcatgagaccatcgagatgaggagtttccacataggcaaagggtgccaatatttaactgaacatctggtttctttttggaagttttctctcacatggtttgtcattacaagacaaggtctg

SEQ ID NO: 352492 - DNA, 757 bp, Homo Sapiens
ctggatggcaatgtagatagagcttctgagctctgctgcatcaggtcctgagccaggatgttataagacatcagagtgaactggaactgaggcgcatctcctgccttcaggccctgagcatctggctgggtggagaaatcctcccattctcgccacaaaatttcatgatatggtatttccactgtcgggaggctgcaactgccccaggccctcaaagggccagatggaagcctcttcctggggcacaggctcaggtgctatgctccagaccaacaccgctgggtcctcttcccactgctctgtggccagggcacccactgggatgggcagcacagtctgcatactggggctccgactgcatggggatagctgcccacatggagccctccaccccctccacctccagcagtggctcctctcctagcatctcagggaaaggctcatccaggttctctgcagcccgaaggtcactcagctgcctgctggaccacctgtcctctgaagcagcattctcttctccaggattatccactcagaagtgccaggctgctctgggctagtcctttatctataaggggcccctcacttgcagttgagagcacctggctcaacccttcttctcgccactgctgcagcaggccctcacattcctcctgctcagggccccgaggggccatggcaaagtcgccctctacctggggggatgagctgattcgccagaaggacattttttcgacatgtgaagaaagcatctgag

SEQ ID NO: 352493 - DNA, 1142 bp, Homo Sapiens
  misc_feature (797)..(797): n is a, c, g, or t
  misc_feature (875)..(875): n is a, c, g, or t
atgcgaggcctgggtggcgaactcggcacgagggtgggcagctatccccatgcagtcggagccccagtatgcagactgtgctgccctcccagtgggtgccctggccacagagcagtgggaagaggacccagcggtgttggcctggagcatagcacctgagcctgtgccccaggaagaggcttccatctggccctttgagggcctggggcagttgcagcctcccgcagtggaaataccatatcatgaaattttgtggcgagaatgggaggatttctccacccagccagatgctcagggcctgaaggcaggagatggccctcagttccagttcactctgatgtcttataacatcctggctcaggacctgatgcagcagagctcagagctctatctacattgccatccagacatcctcaattggaactatcgcttcgtgaacctcatgcaggaattccagcactgggaccctgatatcctgtgtctccaggaagtccaggaagatcattactgggagcagctggaaccctctctgcgaatgatgggctttacctgtttctacaagaggaggactgggtgtaaaaccgatggctgtgctgtctgctacaagcctaccagattccgcctgctctgtgctagccctgtggagtacttccggcctggcttggagctacttaatcgggataatgtgggcttagtgttgctactgcaaccactcgtcccagaaggcctgggacaagtctcggtggccccgctgtgtgtggcaaatacccatatcctttacacccacgcccggggcngatgtcaagcctggcccagatggccattctcctggcggaagtggaacaagtgggcagactgtcagatggcagccactnccccatcattctgtgcggggacccaaattctgtccctgaattcactctcttacacttcatcagggatgaagagctccagtaccatgggatgccaacctggaagtatcctggacaggaagacttcttccattagctttaacaaagaaactgcaggcccactgtggcccaattccctgggggatcctgaatgcttgacaaatggtcccctccgtgtaccccaggagatccaaaagaacccagtttgggccgcaaacttctggctacctg

SEQ ID NO: 352494 - DNA, 482 bp, Homo Sapiens
  misc_feature (25)..(25): n is a, c, g, or t
tatcagctcaagccttacaccatcnacctcatcaaggacctccactttttccttcgagtgctcatccaactgtaccaccgtatccctcacaagctacacatcataccactttgggaccgggaccccagcaccagccttctggaacagggccacattgtccattacctgtcacaggtcctcatctccagccccaaggaccaaacagtattccaacacctactgcttcagggttctgtcctcatcctggctctgtggccctgccacatggggttcaaggacctcagcaggcatctccagtgcctggacagattccaattcacagagcacaggtgccaccaacatttcaaaacaattaccatgggtcagggtggcattaaaatggactccaaaaacatttttttaaatgttctgtaagataaactgtatatttcatatgtacctgttaaggtactttttaaagcttgtacatgaacctttgtata

SEQ ID NO: 352495 - DNA, 896 bp, Homo Sapiens
  misc_feature (36)..(36): n is a, c, g, or t
ccctatggccaccgttcccttgcttagtttagccantttccaaccagttgggtgggcagggggctggagaggaggggaacagcccacttccatccaccccagactgctcttgggccaccaaagcctggaaagatggccatctagttccaagtcaaaccaggacacctgcaagagggtccggggcagggccaccttccagagagcctgagacacaggcccagcgtggagggagaggggggtgacacggctcaagctgggggaagggtacaggggggaaaactggcaccgtgacacctgcttcccaccacccaagagcagttctcagccctgtgcccgctcaccccccactgcaggatggctgcagagaaaggctgagtctgcagcggatgcccccctgcagtcctctacaaaccctgagggactttctgagacaagtgtgtaaattgctcacatcagacctgattgaactgactctggcaaagggagccgtgagtgagggaattctctcaggggaattctaccccagtgagatcacagtcaggagaaactgaagagaggctgtgccaccttcactggcatcgctgggtgtggccctctgagtggaaggggctcgaaggaacacccactctgtgcacacagacttccgcccaatgtagactaagccaaataacaaaacggccaagcgcagagtgagtaaagaaggcagcgtggggacctgtagatgaggctctgcaaacagacggatgaggtgggggctggtgggagcactgtggcaaaggctctgggccagaggccacccctgaagtactccagaaacagaaaagattttcagggaggttgcacatctcccaatgcactaggcttttgctgttgatattaacaaaaattaaaaattg

SEQ ID NO: 352496 - DNA, 864 bp, Homo Sapiens
  misc_feature (129)..(129): n is a, c, g, or t
gtgacaacttactgaagaagtcagcgaaagggatgacagagaatgaagtggaagacaggctcacgagcttcatcacagtgttcaaatacattgatgacaaggacgtctttcaaaagttctacgcaagantgctggcaaaacgtttaattcatgggttatccatgtctatggactctgaagaagccatgatcaacaaattaaagcaagcctgtggttatgagtttaccagcaagctacatcggatgtatacagatatgagtgtcagcgctgatctcaacaataagttcaacaattttatcaaaaaccaagacacagtaatagatttgggaattagttttcaaatatatgttctacaggctggtgcgtggcctcttactcaggctccttcatctacgtttgcaattccccaggaattagaaaaaagtgtacagatgtttgaattattttatagccaacatttcagtggaaggaaacttacatggttacattatctgtgtacaggtgaagttaaaatgaactatttgggcaaaccatatgtagccatggttacaacataccaaatggcagttcttcttgcctttacaacaaggaaactgtcagttataaagagcttcaggacagcacttagatgaatgaaaaggaactgacaaaaacaatcaaatcattacttgatggggaaattgataaccatgatttaaaaaatgaagatattggtgcaaaaacttcgttttcattaaattatgacttctagcagcaaaggaacaaaatttaacattacctcattcatggccgaaagacacaccacatgaatatgagccaaccttaaattcgttgatgtaggccggttgtttcttccttgttttt

SEQ ID NO: 352497 - DNA, 456 bp, Homo Sapiens
aaaatctatcagctgcttattaaaacaaagtcccgtgtgtcataaaaatctcctaaaaccagtctatgaactcagggctttaaaacatttttaatttatttggtcattcaatttacttgtttttaatacatgattctctatgaaattgatgggctcaaactagctgtgaatcttctgagagtgaaagcaacacaaaacacaagtgtggttttaaagccttgaacattctgatgttgtcaataaagttaatttccaggcgatgatagtgtgcccctggcgtggctcacccaagttcctcgactgagggccggtggccatgcagaggcgtccgcaggtgccgtgttctgccagcaccgcccttcacccggcctgaactaaggagcagtggcagaaggtgggccccgtgtgtttacagcatttccaggtccagagaggttggcagacaagtgccattat

SEQ ID NO: 352498 - DNA, 436 bp, Homo Sapiens
  misc_feature (13)..(13): n is a, c, g, or t
  misc_feature (389)..(389): n is a, c, g, or t
caaaaagcctttntctctgggaaaggatgcgttatcttggtcttggaaatttcaaatgatgagggttgggggatggaagcattattccaggtggacgggatagaatccagcctctgcctggattagcccagggggatttggaaagcctttctaccatccttgaggatggtaactgagcttcctctgacagtgaccaaaggatgctgtatccttcagagctaaggcaagacagagagtctgctgttaattctcaaatccagcgaaaggctggacatctctaaatctcgtcttcctccacctcatgtgcatgcctgatcttcaccctgacactcctgatgccgcatctgtgatagcactcgtgttgccttcacatggcaggctgggccaancctgggtgggaaggttctgacattgtgtttttcagaaatgtacattg

SEQ ID NO: 352499 - DNA, 626 bp, Homo Sapiens
  misc_feature (24)..(24): n is a, c, g, or t
  misc_feature (44)..(44): n is a, c, g, or t
  misc_feature (62)..(62): n is a, c, g, or t
  misc_feature (73)..(73): n is a, c, g, or t
  misc_feature (107)..(107): n is a, c, g, or t
  misc_feature (173)..(173): n is a, c, g, or t
  misc_feature (235)..(235): n is a, c, g, or t
ggcagacactgacaactagtaagnaagttgatcatgagtaaccnttgtattcagtgccaccnttaacaagaantgtaaagaggataaacctttctaggaaggttgangcgtgttgggtgaggaaggagcatctctcaggagggtaaacagtagctgtggttttgctgagagantttggctgtgagtgacaagcctatatcaaaaagaaaagtggcttatcaatctcagtttttantgctcaaagcaattctttactcctattttttccaaattccattgtttttactctttagagctcttatccgtcagagtgtagtctgcatatttctttattatcattgccatgtgacttctttggtgacaagttcagtgatatttcaagcatgatgttttgagtttgagaaatgtatttgtgaggacacatcactttaattaaaaaagtgtgagtactatggtcattaagttattcagagtgagatttctgagaggagaagagagaatgtagatggcagttattgagagtggggctataggacaaaaagaagaaaagtatggttaacattgccaaataaagggtcatacagccttgctttttgctggagttagcaaaaatcattctccatatg

SEQ ID NO: 352500 - DNA, 893 bp, Homo Sapiens
  misc_feature (21)..(21): n is a, c, g, or t
  misc_feature (34)..(34): n is a, c, g, or t
  misc_feature (45)..(45): n is a, c, g, or t
  misc_feature (50)..(50): n is a, c, g, or t
  misc_feature (55)..(55): n is a, c, g, or t
  misc_feature (60)..(60): n is a, c, g, or t
  misc_feature (857)..(857): n is a, c, g, or t
cagttgcagaagttgccctgntcaaaaaatcccnaacttaaaccntaccntgtgntgaanactgcccacccgtaaaagccatgcagcccccaccccccccaggcaggcccacgtgggactgcagctccttctgcctgccaggcgggtgacaggaagactgctgagaggatgatgccacagttggggccagtaaatgttctgccaactgaaacaaacaggagatctaacaggcactatcagtgggagttttcaggaagccaagtccaaccaggctctacgatggcagagcaattaagctgagtgggctcttcccagggcagagaagcctgcctgtctccagccaccatcctatccccaagctaacacaggaaacctgaaatagctgtaatttggcttgaaagattaaagatgcacacaaaatcattaagagaaaaagataattgtttctagagtgaatactgtattgaacagctcttagaagacacgtataatggaacatgcaagagaatttactattatttaaatgcattttccaggaacatatttccaatacagatagatcatcaaaaacacagtgaataacttctgtttcaaagtatttcattaaggtgcaaagtgtggcatatacatgtttgtgacactacaaaaatggatgtgcttctggttgtctgatggcctttgctggctgctacccagctgggtacagatcgagttatttaagagaagaaaaccaccttggaggaaaaaaacgtctaaaaatagtgagtttatttgcttgtatttaaaatctgagggctgaaagaagttatactcctcacaggtcaaaagaagaaaatcacatttctaaaaccctcgangtataacacacaggaacattattgcgatgttttaat

SEQ ID NO: 352501 - DNA, 1317 bp, Homo Sapiens
agcggaggcgtggttggccggtcgttgcgttgggatggatcaggcggaattccagaagagaaaataatccctgtctagatgcagaggacttggttcctattccagtgctcctccggtagcagggaggcgacagaaggtgtccaactatccattaccaagaagaaatctattcgtttgagcctgagacactctttgaggtaaaaaattagaatgaaagaacctttggatggtgaatgtggcaaagcagtggtaccacagcaggagcttctggacaaaattaaagaagaaccagacaatgctcaagagtatggatgtgtccaacagccaaaaactcaagaaagtaaattgaaaattggtggtgtgtcttcagttaatgagagacctattgcccagcagttgaacccaggctttcagctttcttttgcatcatctggcccaagtgtgttgcttccttcagttccagctgttgctattaaggttttttgttctggttgtaaaaaaatgctttataagggccaaactgcatatcataagacaggatctactcagctcttctgctccacacgatgcatcaccagacattcttcacctgcctgcctgccacctcctcccaagaaaacctgcacaaactgctcgaaagacattttaaatcctaaggatgtgatcacaactcgctttgagaattcctatcctagcaaagatttctgcagccaatcatgcttgtcatcttatgagctaaagaaaaaacctgttgttaccatatataccaaaagcatttcaactaagtgcagtatgtgtcagaagaatgctgatactcgatttgaagttaaatatcaaaatgtggtacatggtctttgtagtgatgcctgtttttcaaaatttcactctacaaacaacctcaccatgaactgttgtgagaactgtgggagctattgctatagtagctctggtccttgccaatcccagaaggtttttagttcaacaagtgtcacggcatacaagcagaattctgcccaaattcctccatatgccctgggggaagtcattgaggccctcagctgaaatgattgagactacaaatgattcaagaaaaacagagcttttctgctctattaattgcttatctgcttacagagttaagactgttacttcttcaggtgtccaggtttcatgtcatagttgtaaaacctcagcaatccctcagtatcacctagccatgtcaaatggaactatatacagcttctgcagctccagttgtgtggttgctttccagaatgtatttagcaagccaaaaggaacaaactcttcggcggtgcc

SEQ ID NO: 352502 - DNA, 1262 bp, Homo Sapiens
attcgaaatgaggggaggactctcctaaagggggtttattttaaaccctccttttaaccgattgtacagtgtgtaggactagggtagaaacttgacggcatgaaacttctttgtaaaacacaagaaacccttaacgttaaacctcaagcttccgagcatgtcggcggagggacttaaccagcggaacccaacattccccggtgaagttttccagccggagtgcagggtcagaggcagccttttcctactgcgcaggctcagtgctgcttacccatcatggaagcaatgtggctcctgtgtgtggcgttggcggtcttggcatggggcttcctctgggtttgggactcctcagaacgaatgaagagtcgggagcagggaggacggctgggagccgaaagccggaccctgctggtcatagcgcaccctgacgatgaagccatgttttttgctcccacagtgctaggcttggcccgcctaaggcactgggtgtacctgctttgcttctctgcaggtaggaggccataggaggggcgatgggagccggggctttgaaagggatttaagtgctaaccgatctcagtcgccttcttctcgaagttttccgtagggagctaagtgaatacaccgaaggtcttacctctgaacccctcacagcctagggacaggagcggccggcttacctggtgggttgggggacgtcggcagctcgcgtactacgccagcaggattgaggagcagagaaacagttgcagttggttgtattcagtacctgcatttccgttgggaactccacctgtacttgttattctgtggaacttttttttatttgtagaaggagcaagaatattgaccttactatatagcacacgaaacaatctatgctgtatcgtgcctgctcaatccttaaagttaacttctaatgatagtaaaagaccttcctgctgcctttaaaatgcagcttgtgctagttacatgcatgtgtcaaattgaagaattagacatagatgactagatagaaagtaattttgtaggtaattttagagttcaactccacccagctttcagtgaaggaacctttcaaataatagatttttgcttaccatagagaaaagaacaaaagacaaagcaaatattgaccattaagctggaatatggtgataattgaacagttgtataaatgaagtaattgaattgtacacatacaatgggtgaattttatggcatgtcaaagtatacctcaataaagctatttttttaaattg

SEQ ID NO: 352503 - DNA, 454 bp, Homo Sapiens
  misc_feature (68)..(170): n is a, c, g, or t
ggagcctcctgagtagctacaactacaggtgtgagccaccacacccagctaattttttattaataaannnnnnnnnnnnnnnnnnnnnnnnnnnnnnnnnnnnnnnnnnnnnnnnnnnnnnnnnnnnnnnnnnnnnnnnnnnnnnnnnnnnnnnnnnnnnnnnnnnnnnngtataacccaccgcacctggccttaacatttaagtgaaaattaactttttccttattatgtaagcaatcatatcttcattattgaaaatataaaaatgtaagcaagcaaacagaagaaaacaaatgtacataatttcccagtcccacctatccggaatcaataggtgttaattaaccctatatattttccagactttgttaatatttgtgttcatgttgtgtatgcatatagttatatgtgcatggtgggtgtgtatattaaacaaataggtactttaaaaaaa

SEQ ID NO: 352504 - DNA, 2160 bp, Homo Sapiens
  misc_feature (1109)..(1109): n is a, c, g, or t
  misc_feature (1135)..(1135): n is a, c, g, or t
  misc_feature (1586)..(1594): n is a, c, g, or t
  misc_feature (2067)..(2067): n is a, c, g, or t
  misc_feature (2091)..(2091): n is a, c, g, or t
  misc_feature (2108)..(2108): n is a, c, g, or t
  misc_feature (2118)..(2118): n is a, c, g, or t
  misc_feature (2128)..(2128): n is a, c, g, or t
ctcctaccaaaatcacagccccttgtggagcccgagctctcattcacagctttctagagaaatctgagcccgaacctgccagaataggggatctcacccacccagttcagcagcgaggacacctgcagaaatacattcccaaagcaaggctgggcggccgtgtgaagtaagcaatggcctcagttttgcttctgttttggatgaacaccaccacatagggcctgaatgtgaaagaagaccctctatttgtctgttccggggcagcctggtagtaaaacactgttgaatgggccacagtttcagcagaccatcaggtgaatgggaccagtctctcttcttccaaaatatcagaagttaaacacttggaacggagatttggccaagatgacccatttacaggctggactcagtccagagactatagagaaagctcgcctggaactgaatgaaaaccccgatgttttacatcaggatattcagcaagtcagggacatgatcatcaccaggcctgacattggatttttacgtacagatgatgccttcatcctgagatttctccgagccaggaagtttcaccaagcggatgcctttagactcctggctcagtatttccagtaccgccagctaaacctggacatgttcaaaaacttcaaggcagatgatcccggcattaagagggctctgatcgatgggttccccggggtgctggaaaaccgagaccattacggcaggaagattcttttgctgtttgcagccaattgggatcagagtaggaactccttcacagacatccttcgtgccatcctgctgtcattggaagtcctaatcgaagatccggagcttcagataaatggcttcattttaattatagactggagtaatttttccttcaaacaagcctccaaactgacaccttcaatccttaaactggccattgaagggttgcaggacagctttcctgcccgctttggaggagtccactttgtcaaccagccctggtacattcatgccctctacacactcatcaagccatttcttaaagacaagaccaggaaacggattttcctgcatggaaacaatttaaacagccttcaccagctaatacaccnctgaatttttgccctctgaatttggnaggaacttcttcctccttatgacatggggaacttgggcccgggacgttacttcggtccccgactacagcggatgaaaatgactatactcacacattcctataatgcaatgcacgtgaagcatacgtccccgaatctggagaaagaatgctcacccaagctgatgaaaagatctcagtctgtggtagaagctgggaccctgaaacatgaggagaagggagagaatgagaacacccagccactcctggctctggactgaaccctgagtcaccccaatgctcctgcacactggccttcagtggtatcagccacccaggaagcacatgcacaactgacccatgcagacacgtgtgttctgcttgacacaaggtcctccactcctgaacccctgcagtgactgtcaccagccatcggtctgagcagccaaagttggacaaagacttgagagatgcnnnnnnnnncccccagtgaggggactggaggatgatgcaaggcatttatgtaaaaaagattctccctcctttcatatttattgtagtaaattgaaaaaataaagactaaatttgatggacacactgcattaggacaagaattttcctgaggtatcacacagggaccctctccagtttttgaaaattaagtgcatttccaagtaaatgtatcagagttaaactgtacagacaccactgtcaagtttcatgtagtacaaagccctgagacaatagtatctccagtaatttccattcttactgaattatttcctttgacctcatcaccagcatcgaattgttcagcctaagagcatgttctcataggtctgggtatttgcaaagtttgcttattttgatgatatcctggcaaaaaattattttgatgtcacatctcttgtcaggtcacttggctggactgtcctggggctggacgtttaaagggnggacacatgggacgtggaaattanggttattttcctctggnggcatgttgnggttaccccngggcggcttcaaaggcccctttggttgcggct

SEQ ID NO: 352505 - DNA, 386 bp, Homo Sapiens
  misc_feature (19)..(19): n is a, c, g, or t
  misc_feature (81)..(81): n is a, c, g, or t
gtgcagctcagtgtcactnaggacagcttctgctgctgcaagctcagcgccggtggggctgtgccaccacccagtcctggnatctttcctccctcagtgaacatggtgatcaaggatcggccctcagatgggctgggcgtgccgtcctccagcagcggcatggcttccgagattagcagtgagctctccacttctgaggtgagcagcgaggtggggtcaacagcctccgatgagcccccgcccggagccctaagcgagaacagccctgcctaccccagtgagcagcgctgcatgctccaccccatctgtctgtccaactccttccagcgccagctatccagcgccacgttctctagcgccttcgctgacaacggcctcactgacaa

SEQ ID NO: 352506 - DNA, 1889 bp, Homo Sapiens
  misc_feature (61)..(350): n is a, c, g, or t
  misc_feature (1515)..(1515): n is a, c, g, or t
tggtacgcccggaataccgggatatcgtcgacccacgcgtccggttaaataatgcggactnnnnnnnnnnnnnnnnnnnnnnnnnnnnnnnnnnnnnnnnnnnnnnnnnnnnnnnnnnnnnnnnnnnnnnnnnnnnnnnnnnnnnnnnnnnnnnnnnnnnnnnnnnnnnnnnnnnnnnnnnnnnnnnnnnnnnnnnnnnnnnnnnnnnnnnnnnnnnnnnnnnnnnnnnnnnnnnnnnnnnnnnnnnnnnnnnnnnnnnnnnnnnnnnnnnnnnnnnnnnnnnnnnnnnnnnnnnnnnnnnnnnnnnnnnnnnnnnnnnnnnnnnnnnnnnnnnnnnnnnnnnnnnnnnntaataaatgtgggctattcagaagaaaaagtcagtgacagagagaccagaacccattggatcaagagacctgcagggattataactctttactctgtgagcagcggtgtttcgtgccctgtctctgcctgtgtgtttttactaagaattccagaaatcctgtaatttgtaaatgggaaacagaggaaccagattgttttatagctgataagaaacagtctgttttagaaacatctgtttggaaagtattactcatgtattcacaaagtcatatttataacactagtcttctttgactgtattcaacaaaaggcagtttcaccattaatttcatagtaagcttttttaaaggattctagatctaaattgcctaagaatgttaaccacattcttgttttaaactctctaatttaataaatgtaattattttatagtcttttatagacttacattttcttcatactaaaggtaatgataatatagtcatttgccagtactttaaggtattcaggcatttgagacaagaaagctgtcttgtagaatagtccaattgctttcttaaacagtactggtttcatttagacagtttctaagccagcaaaggtgtcaattttaatgccaacttgacagtttaacagttagtgtttgtaagcagtttagcctgaattatcccatactgctgtagaggagaattgttagtaacatcaaaggtcagaatgcttcaggtgactaataagaatggaaagagactgagtaggttttttgtttcttttccctgtctttgagtaactttgaatgactaaaattagtatgaaactaggttttggacccccttctcacctcacccggatgtaatgccaccaatttcaaataactaaaatgtgaccaattactttgcttcaagttctatacaaatatctctgaaatctgtaagccatatttcagctattctggtttttataatacattctaccctaaattaaccaaaggactttttattcagtgtattccatgtttcagcataaggaaagtttgtgcctgatatggcaggagaaagaacactatggtaatttcattgttacttcaggtctctttcaatctgaagaactgggttgtctggagaattgaacatagccaagcaatattatcaattagtaatgtcatcnttaaaaatgttccacttttacctaagttttattccagaggatcttatgtattattagaaaaatgaagtatttctgacatggaacaaagaaagtggaaactggtacttaatgggggaagcaaaattagctgggactaaaacggacatgttttgttttgtgaattctacctaaatgtctctctatccacagagaaactagtattacttgaagatgtgaaagttcctgtggtagccataccttgaagcacagtgtttgtacataagtaaatatcttgattctaaattaaatccagatttaactaatatatattattttatatctttgttgtattaaaatgtttaaaaacactaaaaataaaacatttgaaagttgga

SEQ ID NO: 352507 - DNA, 1914 bp, Homo Sapiens
cctgtgggccctgctctggacctgacccttagggaagcagggggcattttgctggtatgggaggctgggacatcagcccagactggaatgctgcagttcttcccgaagccacgagggcactggctgtccaagccggctcagcagcttcgacaactccaaattatggttccggaaaaaatccgtaaggaaaagacgggactcagtgtccatatctggatacctccggcctttgctccggcctagacagcgagtcttaccaccttcaagtccctggcaccaaaatcccttattcatcatcaaacctgagggtccggtgtgtagttcagaaaggggtgtgatacccaggaactttctggatgctctccattgaggctgctgggttggtacgcagctcttgcccatccacaatcagcaactgtccagaggggtagtaagtcagccagcgttgtagatgggtagaatagtagccagggacaagacagcggttctgcagggagcgtagtgccagaggggtctgggaggaggctgaaatcacctgatagaaggtatagttcagagcaactgggtctcccatgggcctcgctgatgctggtaccaggagtaggccctgtcagcagggttggtgagcactgtgatgatcttggctcgtggcaggagggcagccccccgccgtggtacaacttcagagtcaaagtaggtggcacttttttcaaataggaaatcagtgctggcattggaaggaacagggaagaaatccatgtaccagtcaatacccttgtggtaattagggctgttgaagaactgaatctcctcaaatgtgctggggctagggaagctgctagttacagctgggtgcaggctcaggaagaagtgaatagctgtagtccctgttttctggggtcccacaatgaggaacttcgggagacgatcacaggttttctccttggaccagatatctttgtgcctcttgtcatcacagggattctgccaaaggggcttcgctcctgagggaaaagttcaaagtacttctgtgcaagtgggacaggaggaagggtctgtaggcgcagccgtgtccaacactggaggaagcgcaccaagctctcaaaggtgtataggcccagccggtcatttccataattggacagatgggtcataaagatgctgatcggattaagcagcactgtcagaaagagctctccacctcggatgctccggtctagttcacgagagcctccaggatactcattatagaagattgtgtgagtgaagaggccacatgtctgccggggcagcaccataatgccattgtgaatgaagccacggcggtagcgggcagggcggagatggggatactcctcagtgctggtcacctggatgccccacacggagttccaggcctcatagagctgcgtgtggatggggtacacacccgagtggctggggggccacagcataccccaggtccgtgggaatcccatgctccagagcaaactgtttgttgagcctcatctggtcagccagcacggagcgattgtggaacaggtgtggctgcatgtggctccacatgtgggggaaccaccagaactctttgcggtgcttcagcagcatgtcgtcccctgcatcctcctcctctgtcccagtatgatagaacttgcccgagaagcccaagttgaaggtgaagttgggaactaaggtcctgaggtttgttctgggtggtcaacagagcctcaacatcagccaccttcatcgcgggtcccttccttgcccacaaagatgtcatcgatgtctaccaagatgtagcggtcaaggtccaggcagaggcgcttgccagtgaggtatgcaacagcatcaacgaagataagtttgtgaaccaggaggaaggccctcggccgataacaccggcctcgtacctag

SEQ ID NO: 352508 - DNA, 921 bp, Homo Sapiens
  misc_feature (50)..(87): n is a, c, g, or t
gatgttacgactcactatagggcgacctggagttcacgcggtggcggcgnnnnnnnnnnnnnnnnnnnnnnnnnnnnnnnnnnnnnnatcaggccaaatcggccgagctcgaattcgtcgagagcgctgaggacattgtgtgagggtgtgacttttgtgaagccagaaaactgtgcctaagattcattacagtgagtatgtgcagaggcccctgacccagtaaatgctttttgcctttttattcccaatgtcttggacagttgagacaacttggcccaactctgaattgtagcagtgatgtcttatatgcttacgagtttatattaattcagctgaacaagaactacatcttaaaccacctttgtaggtatgattaatacgtgcaacagctgctttaaaaggtggtatttattattcatcactcatgaaacttgactcagtgaggacttcattatttttatttctctttccacgtctccaactttttaaaaatcactaatttaactctttgttaagtactcaagtacaaagtgatctcttctttcatgaactttgctataactgttgaaaggattggtgtcaggctctctcaaccctgggagtttccaaaatttagcaaatattacttgtgataagcttaaatgccacatcgctaagtacaattattaccaggaatccgtcaagggggagatagccccgctcacacccttagacccaaacaggtgcttggttcatgctttctccacaaattggcagttgggtacttccccactgtcatcacagttgagctcattttaacatatattcaaagaagcctttttagttttctactcctgaattgtagtgttccaagcttatttgccttcctgggttagaaaattttaacccaagtctgggattcttgggcacctgtctttccca

SEQ ID NO: 352509 - DNA, 422 bp, Homo Sapiens
  misc_feature (160)..(160): n is a, c, g, or t
tgagccaccgcgcctggcccactgtacctgattttctgtgaagtcagaggcctgattttcaggtgtgggcaagttggacattttttaacgtgctacatgggcaacagaacatatctacgagccccattctgttcttgggtccccactgtttccctcctgnatccagttgaaccccaggtgacagatcttccacaacagatgggtgatgagaaaaggagggatacttgggggctgtgccatcactggggacccatcatccccagtgatgccaaatgaggccgattgtggcccggtgggcatggcctgggcaatcagggctcaagaccatcaagctacgcacgatgggcctaggagaagatactgatgctgtttttctttctctctgcccagtctgaagaaaggaaaagaatagatgaattgat

SEQ ID NO: 352510 - DNA, 360 bp, Homo Sapiens
  misc_feature (34)..(34): n is a, c, g, or t
ctaatgcataatctgcccaacaccaagttctgangggtgggtgagggacgtcccctctagtttccatgactgctgtagacccgcatcatctctagccctaatcgggccagtcccagagcccgcttttttacggcccatattattcaaccaaataccaggtgcactctgtctcccctcggccatccttcccttgcttcagacctaatgacaagtgtggcacatatgtccactttcaggcctcacatctgccaccttagcaagacatcacctcatccccttgtcactaggaagagggcttcttccccacatgtcgtcatagtgctcacctctgggctgaaaggggaaagcatccctccggtt

SEQ ID NO: 352511 - DNA, 1309 bp, Homo Sapiens
  misc_feature (41)..(42): n is a, c, g, or t
  misc_feature (44)..(45): n is a, c, g, or t
  misc_feature (48)..(48): n is a, c, g, or t
  misc_feature (66)..(66): n is a, c, g, or t
  misc_feature (513)..(528): n is a, c, g, or t
  misc_feature (771)..(798): n is a, c, g, or t
gaagaagacaaagtctaaggaagaatcggccagtgggcttnngnnggncggggggaggttgatttncatgattcatgagctgggtactgactgagataagaaaagcctgaactatttattaaaaacatgaccactcttggctattgaagatgctgcctgtatttggagagactgcccatacataatatatgacttccctagggatctgaaacccataaactaagagaaactgtgtatagcttacctgaacaggaatccttactgatatttatagaacagttgatttcccccatccccagtttatggatatgctgctttaaacttggaagggggagacaggaagttttaattgttctgactaaacttaggagttgagctaggagtgcgttcatggtttcttcactaacagaggaattatgctttgcactacgtccctccaagtgaagacagactgttttagacagactttttaaaatggtgccctaccattgacacatgcagaaattggtgcgnnnnnnnnnnnnnnnncctatgctgctctgttttgtcttaaaggtcttgagggttgaccatgttgcgtcatcatcaacattttgggggttgtgttggatgggatgatctgttgcagagggagaggcagggaaccctgctccttcgggccccaggttgatcctgtgactgaggctccccctcatgtagcctccccaggcccagggccctgaggcctgctagaatcactgccgctgtgctttcgtggaaatgacagttccnnnnnnnnnnnnnnnnnnnnnnnnnnnnacattagtcattggaccacagccattcaggaactaccccctgccccacaaagaaatgaacagttgtagggagacccagcagcacctttcctccacacaccttcattttgatgttcgggtttttgtgttaagttaatctgtacattctgtttgccattgttacttgtactatacatctgtatatagtgtacggcaaaagagtattaatccactatctctagtgcttgactttaaatcagtacagtacctgtacctgcacggtcacccgctccgtgtgtcgccctatattgagggctcaagctttcccttgttttttgaaaggggtttatgtataaatatattttatgcctttttattacaagtcttgtactcaatgacttttgtcatgacattttgttctacttatactgtaaattatgcattataaagagttcatttaaggaaaattacttggtacaataattattgtaattaagagatgtagcctttattaaaattttatatttttcaaa

SEQ ID NO: 352512 - DNA, 880 bp, Homo Sapiens
  misc_feature (416)..(425): n is a, c, g, or t
tggcgattctcatgcccccccgggtccgcgccacgggatcccccagaattcagggggtacctttgggcagacagtggctgtgcaggtgggtgtcgagggtgagggtgcgcggcagccccaggggcaccacgctgatgaagcactggatctcgagcagcactgcgttggcgtagggcaggcacacgcgatagtccaggcttggggcgggcctccaccctaccacagggtccagctcctgcaccttggctcaggccgggggaggctgtgagctgcgcacttccaggaccctccagccatccccagactgcagcctcccattctgggtctctccgggttgcacacctgccacctctaggtacttaagcagaatgaggagcccatagcacagggtggtgctcgtggtttcggtgacgccnnnnnnnnnntgcgtcgtcattaccgacgtctactcctggaaatggctctccgggtcctgctgttacggtgggcagaggagatgtgctgccgcgtgccaggcacctcgccccatctggaactaatgatgcagaagttgtcactgaagaggttcaggagcctcaggaactccgggtccccatagcgatagcggttcccgaagacaagaacagataacattggatacagcattatccagtagccgcacggggtcaaacggggctccttccagtggccccgtcttggcagtgcaagggactctcccacaccaggcccttccgctctcccggccaggccgaagcaatggtggcttgaaattcgtctagcagacaagccgcctcctccaggacgcgcgcctcgacggtccgcgtacccaacccgaacttcttaagcgctccaagtgcaaaattgcgcagtgtccaccagc

SEQ ID NO: 352513 - DNA, 883 bp, Homo Sapiens
  misc_feature (44)..(80): n is a, c, g, or t
tggtcagtctaatggggcctggagcttaccgcggtggcggccgnnnnnnnnnnnnnnnnnnnnnnnnnnnnnnnnnnnnnatcaggccaaatcggccgagctcgaattcgtcgagagcggcctcaccacaggaatcttgttttctaaccggccgtgctggtggacactgcgcaattttgcacttggagcgcttaagaagttcgggttgggtacgcggaccgtcgaggcgcgcgtcctggaggaggcggcttgtctgctagacgaatttcaagccaccattgcttcggcctggccgggagagcggaagggcctggtgtgggagagtcccttgcactgccaagacggggccactggaaggtatttgggtggaagaaagccagtaagcccatggggctggctgggggcaggaccacgcgttatgaccaccgtcctgttcctacccccaggagccccgtttgaccccgtgcggctactgggtaatgctgtatccagtgttatctgttcttgtcttcgggaaccgctatcgctatggggacccggagttcctgaggctcctgaacctcttcagtgacaacttctgcatcattagttccagatggggcgaggtgagagggccggccacaatctttccttggtgcgtccagccttatgccaaatcccgagtacacagacctacctacaatggatcattagaatggacagattcctggaagagttctagaacatccagtatcaaagtcctagtccaatctccctgtagggaaactaaggcctagtggacttgtgcagggcccatgttgagacagaccctgtctctccagatgtacatttgcctgtccctcatggactggctcccgggcccgcaccaccgaatcttccgaaa

SEQ ID NO: 352514 - DNA, 1785 bp, Homo Sapiens
gttaaaaagatccgaaaaggttcgcgcggtgtcacacgttgaagggtgggtggaaaatgtttcccaaagggccatccgtctcgcggtttggttgaaaaaagaaaaataagggaggggtttttttcggagaacggggaataaatcccggtaatggaagttcatgggttccgaataccgtacgcaattttttaaaccgtccgttaaaaaaaagggaggtcccggtagttcgcgcggattagggaggaatcccccagttcctttgggtgtttccggaaaaatggcaacaaagtggatcttggaggtattatggcaatccacatctttctcatcagattataccagtcacctccgtactgtggaaatgttccatcgattttggcagctcaggccatgaggccccccacaacatccggagctgttaaagggtctaactcttgagctgctgataaggactggaggatcttcacggctttctgtgagtcatttcccagtttgcaaatcacataaatgggggacaagcagccccttcttgtgtgccctgcttctcttcccagattgcttcttttaagagtttcaggctctccgcatccctgcgttccaaatgtttcagagggatgtgtagggcatgaggcaaacgacaaatgtccacctccacctgaggcctgacgtccagcaacaggtggaatgccccagaatccagcagtcgcttatagtcggtgacagaaacacgctcctctgggctcagtagttgcagggagcggcatttatcagtggctgaggagccacagaaggcttcatagtccagcagatcagtcacagtgggccgttccccgcaagctgcacagtcgagcctgcggctccgcagccgaatagagcggaaatgccctctcagggcatcaaagagcaacaagctgccactgtaagaggggccccagacccgcagcgattttcagcacttcccaaggcctgcaggcagccccaggaccccggtaacgacaccgagcaccccgccgtccgcgcagttggtcactgtctccgctgggggtggttgggggaatatgcagcgatagcaagggccaccgtcataatggtagactgtgatttggccctcgaagcgcaaggcactggcagacacgaggggccgacccgccagcacacatgcgtcattaaccaggtagcgagtgggcacgttgtccgagcagtcagccaccacatcatatcggcggaccaggtctagggcagtggctggcgtaagggcctgagtgtacggcacgcattccactgccgaattgaggcggcgcagcgaggcggcggccgaaaaggccttggcctggccagccagtgcctcgccatgcagcacttggcgggccaggttgctcatctctaccacgtcatagtccacaaggccaaggcggcccacgccggccgctgccaagtactgcgctagtggacagccgagcccaccgcagcccacgattagcacgcacgcggtccccaggcgcagctgtccgtgcacgcccagctcgggcagcactagctgccggctatagcgcagaatctcatctcgggacagagcggccttcggcggcagcggcgacaccggaaccagccgttctggctgcggttcctgctcagccaaaagagccgacgccagcttctgcttcagcgaattcaattcctcctcacgttgggcaacttcagcttgtaaggcgagtacctcctcccgggaagccatggcgaactccccgctctcgacgaattcgagctcggccgatttggcctgat

SEQ ID NO: 352515 - DNA, 553 bp, Homo Sapiens
gcatggtcctggggcagcaaggaaaaagctcaaagggtggggaaaagcattaaacagtgagcaaagccctgggtgaaagggagaagaccttggttcctagccagccctgctaatgtgctgtgtggccttctgtaagtccctgccctctttgggcctggccttcctcattcgtgagctgaggccctcgctttggtcatttgctctccagattgggtgtgagcttctctgtgattccaggtggatatgtggggaaagctctggtgaccctgggcttcgcagggtgtagatcccaggactcggcagtggatgggatgcagccagtcatgggttagggtcagcagagactcagagtccagggcaaggttcaaggcagactaacctcatgcatggattgtaaaaaaccagctccctttggatcaacccagcctggcacccttgcctgtctgagagtgtctcaaagggctgatggcttcctggtccccttgagtcatcaccagcttccccaagagagtgtcagaatcttaagagctgagaggccgggcacggtggctca

SEQ ID NO: 352516 - DNA, 1635 bp, Homo Sapiens
  misc_feature (1393)..(1393): n is a, c, g, or t
  misc_feature (1399)..(1399): n is a, c, g, or t
  misc_feature (1415)..(1415): n is a, c, g, or t
  misc_feature (1451)..(1451): n is a, c, g, or t
  misc_feature (1510)..(1510): n is a, c, g, or t
  misc_feature (1573)..(1573): n is a, c, g, or t
tttacatatagtacaatttccagtgtgatgacatttcaatgggaaaaagattgtgcatttgcaataaacaccatcattcctgagtccacagataaggtccccggagaaggggcttcccctcctttctcgctgggttgacgttcccagcgagtgaagccttttctggaatgtgtgtacgcaccctccaccaagagttctaataagctaagcttaaagcagaacagtgaaatggcaaaactgtacagagccctgactttacatttcactctgacagccagggtcggaagcaccacatggaaagtgctgtccataactgctcacttacctgctccttgctgacagctcccaggatctggctccagcgagtggcaaaactgggaattttgccaagggaaattactcaggaccgctaataaaaacgccggcttctgcaacatgcatattcccccagcccccacctccatcttgcccagggcagaccattcattaactatctgcggggtgaacaaagaatcccaatcctcagatgtcccaggactcatggctcatgacccacggaatctaaggcagcacagtggcttaatttaaaagatgtgctttcgaatgaatcctagaaaataatctgtctttacacagagagggctgcgggggcaatcctactgacgagtttgttgagagcgcgaactttttcttccaagaggcggctttgtttctcggcgcctcgctgcttctcctcggtggcctgaagtgctctcaccaggtgggcgttctccacgtacagctccttcagcagcaggtcggacttcgtgttcttttcaaactgctccttcagcttatccactttctcttggaggagcatttccatattcttcagaatcatctccgcctcttccacccgctcttctgtggctttcagctgtttctcatgttcttcccgctgtgcatccaggcgcctcctggcctgctctccctgaaggctgagcaggcgatgcagctcggccacacggtcctggggcaccagccggacctcctgcaagtgctgggcctgggcctgcctcagcctcaggtgagctccctgcacctggtcttgactttcctcaagggtctgggtcagctctgaccatggcagctgcaggctctgatgttcctgattcaggcattcaagttcaactctaagtttttggatttggtcactctgctgctgcccactgcgaaccacctcctccaggctctgtgttaacatctgaatggtcacacgatgctcctcgttttgggcctggtgggtagaagcctcctgtcccagttgaagaaccctgacattgaagctgggataattgaaccttgtagttctgaatctgtctgttgagcacctccatctcagagcaggcctttnccttgnctttctttaaaacctnaatttccttcctctgtgcatcgtgagtactttctgnagcttcaagctcttgccgaacccttcccagatcgtttttcaacaaagtgttttcttcanaaagtctatggaactccagtctgatctgctgcaggtggctgtgatgccgcagggccaggccanacagtgcctgggtgcagcagggtgccaggcccatctgctcaggctcggggccgcgggctgtg

SEQ ID NO: 352517 - DNA, 766 bp, Homo Sapiens
gcagatgggcctggcaccctgctgcacccaggcactgtgtggcctggccctgcggcatcacagccacctgcagcagatcaggagagaggctgaggcggagctgagtggagcagctgtctggggctgggagccctgccctgctcgcagagacctgaccttggagctggaggagccgccgcatgggaccccgtgccacgctgggagccagaggtcggagcagctggagctggagagggcactgaagctgcagccctgtgcgagcgagaagcgcgcccagatgtgcgtatcgttggccctcgaggaggaggagttggagcttgcccgcgggaagcgagtggacgggccctccctggaagcagagatgcaggccctgccgaaagatgggctggtggcaggaagtggccaggagggcacacgtggcctcctaccactgcgtccgggctgtggggagcggccactggcctggccccaggtgatggcagagagtctgaggaggcggcaggcagccgggcctcgccgcaggcaagcccaggacacagaagctacgcagagcccggaccccgcccctgccccggaatccacgggcctcagagaggtggtcacgcatgcagccctgtgagtggatggggatattgtcccgaaaaggagcagagcaattcggagcgaaagcgcagcggggcttgagcagctggacgcccgggaagagtgctctgtggaacagagagaaaggcctcgaaacaccagcaccggatgttgaagccagccg

SEQ ID NO: 352518 - DNA, 1186 bp, Homo Sapiens
  misc_feature (129)..(129): n is a, c, g, or t
  misc_feature (175)..(175): n is a, c, g, or t
gtttttgcctagcacttgaacaaaacggaacagaggaaaatgcttctatcagcgacatttcctgttgcaactgtgagccagatgttttccatcaaaaagatgccgaagattgttcagtacacaactttnttaaggaaatcattgacatggcttcgacagccctaaaaagtaaatntcaacctgaaaacgaggtggctgctcctacttcattaactcaaatcaaggagaaagtgttggagcattctcaccggcccatccagctgagaaaaggggacttttattcgtacttatctctctcatctcatgacagtgattgtggggaggtcaccaattacatagaagagaaaagcagcactccattgccactagacaccactggactcgggcttagatggacaaggaagatattgaatgcttttttgaggcctgtgttgagggtgactctgatggagaggagccttgtttctctagtgctcctccaaatgaatctgcagttcccagcgaagctgcaatgccactacaagcaacagcatgttcttctgagttcagtgatagttctctttcagctgatgatgcagatacagtggctctttcaagtccttcctctcaggaaagagctgaggttggaaaggaagtgaatggtttgccccaaacttccagtggctgtgcagaaaacttagagtttactccttcaaagcttgacagtgaaaaggaaagttccggaaaaccaggtgaatctggaatgccagaagaacataatgctgcttcagccaaatctaaagttcaagacctctccttgaaggcaaatcagccaacagacaaggccgcattgcatcccagccccaaaactttaacctgtgaagaaaatcttctaaaccttcatgaaaaacgacatagaaatatgcataggtagaatgtaccccctccccaagcatgaaaatcatctcactgaaagatacgcctggctgcaactcaggggtggcctcatcctcccgccctgggctggcctctggttccatcacgtttgtcactgccgtttattacattgacttctcccaagatgaatcttccttccaaatgtgttttctccacacaagccttgtgatctgaatgtgtgcgctggttctctttaggtgatcgtctttgaagttcagcaaagctgcttgttctcccatggattcctgtc

SEQ ID NO: 352519 - DNA, 1279 bp, Homo Sapiens
  misc_feature (10)..(10): n is a, c, g, or t
  misc_feature (18)..(18): n is a, c, g, or t
  misc_feature (20)..(20): n is a, c, g, or t
  misc_feature (47)..(47): n is a, c, g, or t
  misc_feature (49)..(50): n is a, c, g, or t
  misc_feature (67)..(67): n is a, c, g, or t
  misc_feature (136)..(136): n is a, c, g, or t
  misc_feature (237)..(237): n is a, c, g, or t
cttttctacncttccaangnaatcaggccccctaacccttcttcccncnnacagacttttcaaggtngactggcggaaatctccccttcaaggcacacctggataacagcaagcacttctggagggcattctgggngggggcacaggaggcagaaggcagaagagatggtgagcaggtgcatcggagagcatctggagatcattgggagaggttcttgtagtgagaagccacgtagngggccataagccgttggaggaaaacttcagaggccttgtggtagcaaaagagggtatctctattaacatagtacagttcacaagcttcaggcaaggggcagcctgagactatccgagtgatgttgaggcaatccaggcacagcaagtcattcagccacttctccactgcatccccaggggcgtatcggattgactcctggagggaaacctcatgcagtgtccgcgctgatgccaatctggctgtcgtcgtggtcttattctcagcagtggtgctgacctggctctgggcgctctgttgacggagctgctgaattagcttgagggacagtgaccggccagtgccctcatagccattgatgggggatgccatgaaaacaaggtaggggccaagtaggctcttcaccaaggggagggggatggcgggcagcttcatcaatcacaactagttcagcctggcccagcttcacagcatctgcaggatgtatatactgaatagtctgcctgtgttctcgaaatacattcactctgatcactgctttgttaaattcaggatttagagactggataaatgtcataatccagatgtttccggatattgcagagcatcaaatcctttaaatacaaattcaaacagagtatgggaggttatcaggggcttggggaggtaacaaagatattggagtacccaaatgccaccgccccagcaatcgccaatcccagggctgcagattttccccgtcctcgagcagctgggagtgcaacagtactcctcagggtcttttcagagatgccctcgataaatttcaagacagctttggcctggtctagagtcttgcagcagtccaccaacacacccacaggctgggtgtcctgcaagctctcgttcaactccctcagctccagatcagaaggaccaagactctcatccggagtctggggaggcagggcctccatggtggcaacgtgggaggagatgggcaggatgttgagctggtcatcaatgacgagacacttcttacaagaggccagagacagaataaac

SEQ ID NO: 352520 - DNA, 955 bp, Homo Sapiens
  misc_feature (20)..(20): n is a, c, g, or t
  misc_feature (48)..(48): n is a, c, g, or t
ggcagggcctgctggccctncaagaatgacacagctgctgtgcagcgncacttcgtctctggcaacaacgtcctggcccatcggtccctgcccctttctgaaggagggcccccactaaggatcgcccagaggatgcggctggaggcaacgcagctggaaggggttgcccgaaggatgacggtggagacagattactgtctgctgctggctctgccctgtggccgtgaccaagaggatgttgtgagccagaccgagtccctcaaggctgccttcatcacttacctgcaggccaagcaggcggcagggatcatcaacgttcccaaccctggctccaatcagcctgcctacgtgctgcagatcttcccgccctgtgagttctctgagagtcacctgtcccgcctggcccctgacctccttgccagcatctccaacatctctccccacctcatgattgtcattgcctccgtgtgagccactgagtggttatcacctcagtgaatcttcccagggctctgcagtaaaaacaaaggacaacccagccaagcagaggaagaagctgccgaaggggacagactccactgccagacggccagccgtttgctgtcctgccgcccggctcagtcggccagacttcctctaggagtggtgctgctaccttgtatgtttacataatgctttagcccaaggacacatcaccaacccatggactcgcagacaccggggctgggtttctctttcctctttttggagaaaaggaacgggccgtggaatgaacattttttgtttggtttgtctttacgaaaacagaaacccgaacttgccttttgccctaaattcagtgacttgggacttttgccccagggaaaaaacagcctggggacactctgggatttccttggcggtgtgttaaaaacccctttggcaaaactcccttaaccgcacggaagggactttc

SEQ ID NO: 352521 - DNA, 835 bp, Homo Sapiens
cttgggcaatatgcattctgtaggtttggatcagggtccaggttggcctgtaactcttcctgcccaaagtgatgagcccaaaataatgtccacaacattggttgtcaggccagagagtttggaagctgcccagtcaatccagcctttagcgcaagggtcaacattaatgagcacaaggccttccacaagctctggatggttgagtgcaaatctgctgaggatgtaagctccagctccaactccaattccaatgatgcttttcaggcttaggtgggtaagaacaggaggcagcatttcagccagctcatccattgtggggtactgataccctgttcggaaagagggtgcaccttcctgctggcctggggcatccacatgacagacagcaaagtgctgggtgatctcttgcatatcctcaaagttaaagaatgcattgaaacaggatttatggttgaggccaatgtcatgatatgttagtataactggtctgtttcctttgggtaagcctcttatagtgacgtggaccacaccatgagttgtttctatatcatgttcctccatggtgattggcatgcatatttttcgtgaccttgtgaatgaacagcttgaaaaaaactccatctgaagatgaatgtgcagagaccctggctaaggagctgattcagttgtcaggccactgcagggagtaacgtgctgttgctacctttttgtcttagtcaattatcatctgttttacaggctctctatccagttatctcatctcccaccccagcattctagagtgtgactacaaatccgctctcgacgaattcgagctcggccgatttggcctgat

SEQ ID NO: 352522 - DNA, 1288 bp, Homo Sapiens
  misc_feature (121)..(132): n is a, c, g, or t
  misc_feature (933)..(941): n is a, c, g, or t
catgttattaatccattgtgacgttgcagaatgaggaggagacaagagcgggtgcaccctccatctgtgagaggcacacttcagtctggggtcatagaagcagaatggggcctactagccnnnnnnnnnnnntaacaccctcctcccttcttttaccatttgaatggacattttccttacctgtgatcccaacagaaacagatccagacctatcatgtgaagtccacgttccaggatcagaagtaaccagtttatggactgagcttacacgggaaagtctacccccgactccttcctggatagtaacatacacagctgcataaaaacgtctccaaggggacatacgatgcatttgcttggtgtccccagccaagctccccaccggcgacctcactgttccttagagctcaagagctcgtctcctatcaatcagagaaccccatcagctgtgaccaacagagctggagccctctgtggagggagctgaccccacacacaggacagagcagaatcctgattattttacaaactgcaaaccttctgagtaagaagacaaaaatatacattccaaggtatctgtaaagtgcttggaagatgcagacagctgcaccgaggggctctgatccatccaaacacctgcgctttgctgcggtcacacacacggtctcagtcacgtgatggttttgcttttatttcttaaacggctgagtgataatccagctagtgtgcagtcatttcatacctttcaatgggcgtcaccgcagtgacgctgccccagccccatgctgagggccgacacaattcacggaacagattcatcatatttggtctttatgtaaataataaatgttttaaaattgcctaaatataccattctgagccatttcatccctatttcatcccaccaggaaaatacaggttttttcctctctnnnnnnnnnttaaataccaaaataactacatttaaataaataatgttatgatgatgacatttaaaagctcagccatcaggctgacgccctctccccatgtgcacggccctcggccctcggccggcacactcgggaagggccagcggttttcttcctgaggagccgggcgaggaggtgcagggacctcccactctcattccctcacccccgtcctgtcctcattttccgtagaggagtcagcctcaggattgggttcggttctgaaaggtcagggacatttcctaccacaaaacaggaaatgccccagacgtgccctgcaggacgtggctcggaccctgctccaccatggcggccgc

SEQ ID NO: 352523 - DNA, 2575 bp, Homo Sapiens
aggtccatgcctcccgcagcaacaacatgggcatcgttggtggcttcactcagatgattcgagaaggaggggccaggtcactctggcggggcaatggcatcaacgtcctcaaaattgcccccgaatcagccatcaaattcatggcctatgagcagatcaagcgccttgtttggtagtgaccaggagactctgaggattcacgagaggcttgtggcagggtccttggcaggggccatcgcccagagcagcatctacccaatggaggtcctgaagacccggatggcgctgcggaagacaggccagtactcaggaatgctggactgcgccaggaggatcctggccagagagggggtggccgccttctacaaaggctatgtccccaacatgctgggcatcatcccctatgccggcatcgaccttgcagtctacgagacgctcaagaatgcctggctgcagcactatgcagtgaacagcgcggaccccggcgtgtttgtgctcctggcctgtggcaccatgtccagtacctgtggccagctggccagctaccccctggccctagtcaggacccggatgcaggcgcaagcctctattgagggcgctccggaggtgaccatgagcagcctcttcaaacatatcctgcggaccgagggggccttcgggctgtacagggggctggcccccaacttcatgaaggtcatcccagctgtgagcatcagctacgtggtctacgagaacctgaagatcaccctgggcgtgcagtcgcggtgacggggggagggccgcccggcagtggactcgctgatcctgggccgcagcctggggtgtgcagccatctcattctgtgaatgtgccaacactaagctgtctcgagccaagctgtgaaaaccctagacgcacccgcagaggggtggggagagctggcaggcccagggcttgtcctgctgaccccagcagaccctcctgttggttccagcgaagaccacaggcattccttagggtccagggtcagcaggctccgggctcacatgtgtaaggacaggacattttctgcagtgcctgccaatagtgagcttggagcctggaggccggcttagttcttccatttcacccttgcagccagctgttggccacggcccctgccctctggtctgccgtgcatctccctgtgccctcttgctgcctgcctgtctgctgaggtaaggtgggaggagggctacagcccacatcccaccccctcgtccaatcccataatccatgatgaaaggtgaggtcacgtggcctcccaggcctgacttcccaacctacagcattgacgccaacttggctgtgaaggaagaggaaaggatctggccttgtggtcactggcatctgagccctgctgatggctggggctctcgggcatgcttgggagtgcagggggctcgggctgcctggcctggctgcacagaaggcaagtgctggggctcatggtgctctgagctggcctggaccctgtcaggatgggccccacctcagaaccaaactcactgtccccactgtggcatgagggcagtggagcaccatgtttgagggcgaagggcacagcgtttgtgtgttctggggagggaaggaaaaggtgttggaggccttaattatggactgttgggaaaagggttttgtccagaaggacaagccggacaaatgagcgacttctgtgcttccagaggaagacgagggagcaggagcttggctgactgctcagagtctgttctgacgccctgggggttcctgtccaaccccagcaggggcgcagcgggaccagccccacattccacttgtgtcactgcttggaacctatttattttgtatttatttgaacagagttatgtcctaactatttttatagatttgtttaattaatagcttgtcattttcaagttcattttttattcatatttatggttcatggttgattgtaccttcccaagcccgcccagtgggatgggaggaggaggagaaggggggccttgggccgctgcagtcacatctgtccagagaaattccttttgggactggaggcagaaaagcggccagaaggcagcagccctggctcctttcctttggcaggttggggaagggcttgcccccagccttaggatttcagggtttgactgggggcgtggagagagagggaggaacctcaataaccttgaaggtggaatccagttatttcctgcgctgcgagggtttctttatttcactcttttctgaatgtcaaggcagtgaggtgcctctcactgtgaatttgtggtgggcgggggctggaggagagggtggggggctggctccgtccctcccagccttctgctgcccttgcttaacaatgccggccaactggcgacctcacggttgcacttccattccaccagaatgacctgatgaggaaatcttcaataggatgcaaagatcaatgcaaaaattgttatatatgaacatataactggagtcgtcaaaaagcaaattaagaaagaattggacgttagaagttgtcatttaaagcagccttctaataaagttgtttcaaagctgaaaaaaa

SEQ ID NO: 352524 - DNA, 1963 bp, Homo Sapiens
ggaacgactgggcatttagctatggagacattattatcccttacttctaaacgagcaggagactggtttaaagaagaactccggcttttgggtggtctggatcatattgtagataaagtaaaagaatgtgtggatcatttaagtagagatgaggatgaagagaaactggtagcctcactatggggagcagagagatgtttacgagttttagaaagtgtaactgtgcataatcccgaaaatcaaagctacttgatagcatataaagattcccaacttattgtttcatcagctaaagcattacagcattgtgaagaactgattcagcagtacaaccgtgctgaggacagcatatgcttagctgacagtaagcctctgcctcaccagaatgtaactaaccatgtaggcaaagcagtggaggactgcatgagggccatcatcggggtgttgcttaatttaactaatgataatgagtggggcagcaccaaaacaggagagcaggacggtctcataggcacagcgctgaactgtgtgcttcaggttccaaagtacctacctcaggagcagagatttgatattcgagtgctgggcttaggtctgctgataaatctagtggagtatagtgctcggaatcggcactgtcttgtcaacatggaaacatcgtgctcttttgattcctccatctgtagtggagaaggggatgatagtttaaggataggtggacaagttcatgctgtccaggctttagtgcagctattccttgagcgagagcgggcagcccagctagcagaaagtaaaacagatgagttgatcaaagatgctcccaccactcagcatgataagagtggagagtggcaagaaacaagtggagaaatacagtgggtgtcaactgaaaagactgatggtacagaagagaaacataagaaggaggaggaggatgaagaacttgacctcaataaagcccttcagcatgccggcaaacacatggaggattgcattgtggcctcctacacggcactacttcttgggtgtctctgccaggaaagtccaatcaatgtaaccactgtgcgggaatatctgccagaaggagacttttcaataatgacagagatgctcaaaaaatttttgagttttatgaatctcacttgtgctgttggaacaactggccagaaatctatctctagagtgattgaatatttggaacattgctagctgctttacctttgcttcaggtgctcggtaatgctggagctatccttagacaaagaaaagtcaagtcatgaaagaagtccttgaagatataccaagaacattcatcagtatcattcgtgtttggatttttaaggccacctgatttcttcgtcatgcattcggcatttgctaaatgacagttactacatcaatctgcaactatcaaaaatgaggggaaaaggttcaggctgttaacaattccatgcagtatttaaatacatttactttggcagagtttataccctccccttgttttcttgctttattctgggcaagtttgaaggggaaaatttgtgctgctgttagtgcaactgctgtgtatgttgagccactgttgtcatgccagccaggtgcaaaggcagcttagctactgaggtagcgaatgttctgaggacattctagacaacagcttagttcctttttcaggctcatttgcttttgcttttttgttgaatgattccaatcgtaaataaagcttttaataattttgtgaactctctaggttgtcgttccctgaactactgtctatatttaaaattagatggaatccaaagatacacgggattaatagtatatttttttattcttgattaggtttgggttattgaactattttttacttttgagaccacaaccatattcaatatcataccataatgtgtcatagctataggcaccaagaaaaacaacagtttgaggaggaatattatataag

SEQ ID NO: 352525 - DNA, 322 bp, Homo Sapiens
acaagttcatttgtgaaaacagccttcctcctgccaccggctccctatacaacctgcttaggaaatatggaggtgaatcatcccccttacctcttccctaccagggcttggttctccccaaaatccaaaggagaaataaatgtcttccgttgcctcttcccatttttacagtcagcttctaaccccttgcaaagccctgaatcagagccaagcacctcagaaaatgagggtcccttggttctcttattgaagttgggcacatgtggtcagagaagccccaaggaaggccacagggactgacacctttacttttggaatttgt

SEQ ID NO: 352526 - DNA, 815 bp, Homo Sapiens
  misc_feature (785)..(785): n is a, c, g, or t
agcggataagtgtatactggtgaccgatactaggattaaggttttgccaggcttaaggctggactttggagctggccaaggggtggggtttgtggctagggctggggtttgtggctggggctgggttttgtggcagggatccaagcaggagctggtgcccctgactgatgctaaggctggacatggagctggtgatggtgctagcactggctgaggttgggtgcaaggcctgtatttggggatggtgcaggttttgggggccgagttggatttaggctagggttggagctggattggtgtcttgggttgacttaggttgtggaagatgctgaggtttaggattgagtttgggaaagtactaaaccaatgcccttctcatccctgtttccccaggctcctggctgtttatctgccccaaaggagaagcctcatggggttgacataggtcctttctgccatctctgttccagctgctgtcagggattaacaacagagtgtaggggagattaactgcctcccttccaatagacactatcagcagggacagatgtgtgggagtgcagggctgcagagggtatggggggaggaggctgctaaaccctatcccccagcctcccccctgccctgaagatcttccatttgcttccactcagctggaggctcaagagggcttgatggctgtcccctgcccccctccttttgttttgtacacagagaccaagaggcctcagtttagcaccttagtacctccgctgcttcacttgctttagccaaagccataaaanacctgcaacgtagagaaaataatgcagata

SEQ ID NO: 352527 - DNA, 1360 bp, Homo Sapiens
  misc_feature (6)..(6): n is a, c, g, or t
  misc_feature (14)..(14): n is a, c, g, or t
  misc_feature (32)..(32): n is a, c, g, or t
  misc_feature (41)..(41): n is a, c, g, or t
  misc_feature (51)..(51): n is a, c, g, or t
  misc_feature (58)..(59): n is a, c, g, or t
  misc_feature (74)..(74): n is a, c, g, or t
  misc_feature (82)..(82): n is a, c, g, or t
  misc_feature (86)..(86): n is a, c, g, or t
  misc_feature (92)..(92): n is a, c, g, or t
  misc_feature (94)..(94): n is a, c, g, or t
  misc_feature (102)..(102): n is a, c, g, or t
  misc_feature (121)..(121): n is a, c, g, or t
  misc_feature (132)..(132): n is a, c, g, or t
  misc_feature (179)..(179): n is a, c, g, or t
  misc_feature (186)..(186): n is a, c, g, or t
  misc_feature (189)..(233): n is a, c, g, or t
  misc_feature (400)..(415): n is a, c, g, or t
  misc_feature (691)..(691): n is a, c, g, or t
  misc_feature (703)..(703): n is a, c, g, or t
  misc_feature (710)..(710): n is a, c, g, or t
  misc_feature (793)..(793): n is a, c, g, or t
  misc_feature (795)..(795): n is a, c, g, or t
  misc_feature (797)..(797): n is a, c, g, or t
  misc_feature (799)..(800): n is a, c, g, or t
  misc_feature (802)..(802): n is a, c, g, or t
  misc_feature (811)..(813): n is a, c, g, or t
  misc_feature (815)..(816): n is a, c, g, or t
  misc_feature (818)..(818): n is a, c, g, or t
  misc_feature (841)..(841): n is a, c, g, or t
  misc_feature (843)..(843): n is a, c, g, or t
  misc_feature (845)..(845): n is a, c, g, or t
  misc_feature (847)..(847): n is a, c, g, or t
  misc_feature (875)..(875): n is a, c, g, or t
  misc_feature (888)..(888): n is a, c, g, or t
  misc_feature (894)..(894): n is a, c, g, or t
  misc_feature (936)..(936): n is a, c, g, or t
tttttngtttttgngccttttctgtgggctgnggaatttgnctttttattnaaaatcnngttataaggctcttncatacaantganccaagntnccaacgantccatcttgcagcaaactncccttacccanttcaggcctgcccaagtccccacccctacagcagctcccaaccaagntccagcntcnnnnnnnnnnnnnnnnnnnnnnnnnnnnnnnnnnnnnnnnnnnnngggatcagaacctaccccagatcctggaggagtccaggtctgaatgagtcagaagggcttctgggaccaattccagctcctgacattccccccagtcctgcctctcccccatcctatcagggacatttggctcctcttagctggctctgctcatccagaggatattnnnnnnnnnnnnnnnnatcaagtttggtgggcagagctacagatgggacccaagggagtggccgagcctcactgcctaaaccaatgcccttctcatccctgtttccccaggctcctggctgtttatctgccccaaaggagaagcctcatggggttgacataggtcctttctgccatctctgttccagctgctgtcagggattaacaacagagtgtaggggagattaactgcctcccttccaatagacactatcagcagggacagatgtgtgggagtgcagggctgcagaggnttttttgggagnaggctgntaaaccctatcccccagcctcccccctgccctgaagatcttccatttgcttccactcagctggaggctcaagagggcttgatngntntnncntgccccccnnnanntnttttgtacacagagaccaagagncntnantttagcaccttagtacctccgctgcttnacttgctttagcnaaagcnataaaaaacctgcaacgtagagaaaataatgcagataccctnactagccagccctctactcctccaaccttttccaagatatgcaatggcctttgtgcctgcccaaaggcttcgccccctccagtgcatgaggaaccctctttcctccgctcagagatgctgcttcatttacccaggaggtcatattctttatatatattttttgttgcaaagtgtctctctagagaaactctatatattattcgaatttttaaattatttgtttatatataaaagaaaagctcaattggctgtgctgtcctgtgctgtgctgtgcccacagtctgtagtttgcctttcctgtgttggaagtgtcgtgagtcctgctggtcacccaccagcctggtccggcctccactctgaagcagggttgagcctgctgtgctctcagacgcggagccgttccaataaagcagagtggaagagc

SEQ ID NO: 352528 - DNA, 892 bp, Homo Sapiens
  misc_feature (203)..(218): n is a, c, g, or t
gggatatcgtcgacccacgcgtccggccctggcccccgggatcagaacctaccccagatcctggaggagtccaggtctgaatgagtcagaagggcttctgggaccaattccagctcctgacattcccccagtcctgcctctcccccatcctatcagggacatttggctcctcttagctggctctgctcatccagaggatattnnnnnnnnnnnnnnnnatcaagtttggtgggcagagctacagatgggacccaagggagtggccgagcctcactgcctaaaccaatgcccttctcatccctgtttccccaggctcctggctgtttatctgccccaaaggagaagcctcatggggttgacataggtcctttctgccatctctgttccagctgctgtcagggattaacaacagagtgtaggggagattaactgcctcccttccaatagacactatcagcagggacagatgtgtgggagtgcagggctgcagagggtatggggggaggaggctgctaaaccctatcccccagcctccgccctgccctgaagatcttccatttgcttccgctcaggctggaggctcgggagggcttgatggtgtcccctgcccccctccttttgtttgtacacgagaccagaggctcagtttggacctttgtactccgtgttccctggctagccaagcataacaagctggcgtgcagaaactatgggatcctggtagcagccctttctcactttccggttgcaggctgggcggccaggtgcctccggtgggaccctttccccggatgggctacccgggggtctctaatttggcggcccacaccttttctctgtttgcgcccaaggcggcctgcgcccttgtactattcggcgggtctccactgtt

SEQ ID NO: 352529 - DNA, 880 bp, Homo Sapiens
  misc_feature (81)..(81): n is a, c, g, or t
agatagagtatgtgagtgagtgtaagtatgaatgtgtgtgtgtgtagtagctagatggttaaagtatgtagtatatgagantgtacatgttgaggtactatgatgtgtatgaagatagagtaggttagaaatacggattaagagtgttagggtttgggagaggggtatggggtgaaggtaatgtagccaatgtatggccttgtagagggtagatggttgtgttggaagcaggtcttgagcagacaccagacacctcccacaggcatagggacgaggccacctctggcaccacccacctcaagtataggccatcttgatgcacacccagggccgggtcatcagacactccgtcgacaccagcctggtgggctccacgaagacacactcccctggacctgcgatggtgaacgtgtccggatcaaacgggtcaccgttgacccagtggaattcgtccccaactctgcgtagtccaatccagggctccctccgcgtgaacttgaacataaattccagctccttctggctctgaatcacagccagcaccgcctcgtgggtgtggcagtactgcctgcctgtgttccagtctctgggttcctcggaaaagaagtagcacttccttccgtagagcagccagtcctccgggcagggcgcttcgcacttgatgcagcccttggaagctgcagggaagagaccagctcggccctgcccgcccccccagcccgagtcccactctgctttctgtggctccctcccctgcctcagctttggcgtcctgcagggacactgcagatgtggctgtcctctcctggtgcctggaggtaaaagggtgcccactaaatgaatgagaaaggggatctgtgggaagcctggcagggtatca

SEQ ID NO: 352530 - DNA, 728 bp, Homo Sapiens
agaatttgttttaaaattcacacacttttgatgaggttaatgtcaagtatctgaaggtaatctttcttcctgtaaacacatgccattgggtttatttctctttctagtggctacagtgtatcaccaaagaagtgagccaggattcttaagttaggctttatgactctgaatccccttcccagttgcaggccaaaaatatttacaaaaattgcaaatatcttataaaaatgcttgatcactgtaagattctgaacagaagattcagactgagaaaaaaagtgaggcacattaatgaacacaaattgtataggcacatctctggtttttgttattgttttaaaaggcacacattatgcaattccatataaaaataaattaaatctacagcattaattcatcaaaaaaatcacaactcctataaagttaactaactgcagaagtaaatgtctctgctgtcatttgcaagcttattttaaaacacattgcacttgagaattttttttaaaaatcatataaaacatcacttatactttattaatatgtttatgagaatcaaattatagattttttgcatacaacttggactctggtctgattaccttatggcacatagctcaatttgattaagtgttctgagttaacattacccaaaacttagaattcatgttctatttgtatccactgaatatcaaacttatgaaatttcaaagttatctctgactctaaaa

SEQ ID NO: 352531 - DNA, 1123 bp, Homo Sapiens
ccctccgcaggcggaccgggggcaaaggaggtggcatgtcggtcaggcacagcagggtcctgtgtccgcgctgagccgcgctctccctgctccagcaaggaccatgagggcgctggaggggccaggcctgtcgctgctgtgcctggtgttggcgctgcctgccctgctgccggtgccggctgtacgcggagtggcagaaacacccacctacccctggcgggacgcagagacaggggagcggctggtgtgtgcccagtgccccccaggcacctttgtgcagcggccgtgccgccgagacagccccacgacgtgtggcccgtgtccaccgcgccactacacgcagttctggaactacctggagcgctgccgctactgcaacgtcctctgcggggagcgtgaggaggaggcacgggcttgccacgccacccacaaccgcgcctgccgctgccgcaccggcttcttcgcgcacgctggtttctgcttggagcacgcatcgtgtccacctggtgccggcgtgattgccccgggcacccccagccagaacacgcagtgccagccgtgccccccaggcaccttctcagccagcagctccagctcagagcagtgccagccccaccgcaactgcacggccctgggcctggccctcaatgtgccaggctcttcctcccatgacaccctgtgcaccagctgcactggcttccccctcagcaccagggtaccaggagctgaggagtgtgagcgtgccgtcatcgactttgtggctttccaggacatctccatcaagaggctgcagcggctgctgcaggccctcgaggccccggagggctggggtccgacaccaagggcgggccgcgcggccttgcagctgaagctgcgtcggcggctcacggagctcctgggggcgcaggacggggcgctgctggtgcggctgctgcaggcgctgcgcgtggccaggatgcccgggctggagcggagcgtccgtgagcgcttcctccctgtgcactgatcctggccccctcttatttattctacatccttggcaccccacttgcactgaaagaggcttttttttaaatagaagaaatgaggtttcttaaagcttatttttataaagctttttcat

SEQ ID NO: 352532 - DNA, 2041 bp, Homo Sapiens
  misc_feature (1953)..(1953): n is a, c, g, or t
  misc_feature (1989)..(1989): n is a, c, g, or t
ccggccacggtggaacaccatggacacgtgtctgatgccagcatcagcttgggggagtctgtgtcagacatggctcccacccggccacggtggaacaccacggacatgtgtctgacaccagcatcaggcttggggagaacgtatcggacgtggctcccatccggtcacggtgcaacacccatggacacgtgtccgacgccagcatcagcttgggggagcctgtgtcggatgtggtttccacccggccacggtggaacacccatgtacccatccctccgccccacatggtgctgggggctctctcaccagaagctgagcccaacacacccaggccccaacagagcccccctggccacacgtcccagtcagcgctcagcctgggagcacagagcactgtgctggactgtgggccacggctgcctgtagaagtggggccatctctgtcctcccccagctcgggctgcggggaggggagcatcagcgtgggggagaacgtgtcagacgtggctcccacccaaccatggtggcccaacaccccgggagacagtgtctctgaagaactaggccctgggaggagcggggacactgaggacctctctccaaattggcctctcaactcacaggaagacacagctgcccagagcagcccaggccgtggtgaggaggcggaggcatcggcggcggaggctcagggtggggagcaggcctacctggcaggcctggcagggcagtaccacttggagcggtacccggacagttacgagtccatgtccgagccgcccattgctcatcttttgcgccccgtgcttccccgggccttcgccttccccgtggacccccaggtccagtctgccgctgatgagactgctgtgcagctgagcgagttgctgacgctgcccgtgctcatgaagcgctccatcacggcaccgctggccgcccacatctccttggtgaacaaggccgctgtcgactacttcttcgtggagctgcacctggaggcgcactatgaggcactgcggcacttcctgctgatggaggacggcgagttcgcccagtccctcagcgacctgctctttgagaagcttggagctgggcaaacgcccggagagctgctcaacccgctggtgctgaactctgtgctgaccagggccctgcagtgcagcctgcatggggacaccccgcacgcctccaacctctccctcgctctcaagtacctgcccgaggtgtttgcccccaacgccccggatgtgctgagctggcctgggagcttcaggtacaaggtgggactggcctcttcaacattgtcatcaccgagggctgcctgagcaagtacagcggcgtcttctccttcctgctgcagctgaagctcatgatgtgggcgctcaaggacgtctgcttccacctcaagcgcacagccctgctgagccacatggccggctctgtgcagttccgtcagctgcagctgttcaagcacgagatgcagcatttcgtgaaggtcatccagggctacatcgccaaccagatcctgcacgtcacctggtgcgagttcagggccaggttggccaccgtgggcgacctggaggagatccagcgtgcgcacgcagagtacctgcacaaggccgtcttcaggtgaggcctgggcagcggctgcgtccctgtggtcacggctcagcccacccagcagcactgcttccccccaggggcctgctcacggagaaagcggcgccccgtcatgaacgtcatccacagcatcttcagcctcgtgctcaagttccgcagccagctcatctccccaggccctgggggccccctgggggcccccggggtgcagagcaccccaactttgcactcatgcagcagtcctacaacaccttcaagtactactcccactttctcttcaaagtggtgaccaagctggtgaaccgcggctaccagccccacctggaggacttntctgctgcgcatcaacttcaacaactactaccaggnacctctgacgctgctctgcgggggacgtgacacaatataaggtgttctcgcg

SEQ ID NO: 352533 - DNA, 740 bp, Homo Sapiens
  misc_feature (184)..(198): n is a, c, g, or t
  misc_feature (412)..(412): n is a, c, g, or t
  misc_feature (650)..(658): n is a, c, g, or t
ttatcccatctggccaccctaatttataattcagtaatgactttaataggcaaaataaggaggaaaggaggctcgcagttacaaactgtgagctacaaactcacagttcatctcttttcacaaggaattcatcatctggaaaaacttacttctaacagattttaatggagtttaccttttaatnnnnnnnnnnnnnnntagacagagagtaaaccaacaaaggaacaagagaaatttaacggtgatacaatgcacagctctttgttccttacttcatatggctaattggagattgatttgggttaattaaaagaaagcaaatctgggaaactctgtggaaggtgataaccataaacaaatttctacccacagagctagaagaggggtttctgtgcccgtggctgctccaaancctggacatctgcctgcacagtggtctttttggcccaggctgtgtgctactttggccagtctgtgtgaaatgttgattccgacatttccagggaagaaggtggtcttgtcagcatcttctgtgccttggagctattgtgatcattttgttagaaatcatcaagttttgagagttaaagagaaactgctgaaaggtacggtttgtgaaggagaatattgttcctctttatagaaacagnnnnnnnnncatgatcagtgtcccaaggaggtacaggcataaatctaaggaagataactcgcatttgtaatggtcataataataatatatg

SEQ ID NO: 352534 - DNA, 537 bp, Homo Sapiens
agttcgacggagactctccattctcttgagatgtacacaagtaccatcttctgagacaagctttctgtcttatctatggatcaacggattatagatgggttgaaaccagctttgattatcccatctggccaccctaatttataattcagtaatgactttaataggcaaaataaggaggaaaggaggctcgcagttacaaactgtgagctacaaactcacagttcatctcttttcacaaggaattcatcatctggaaaaacttacttctaacagattctaatggaggtattagggtggggctcaggcaaaaagatcaataacaaatgtaaattttatgatgttgttctccatggcggaacctctgccaagcaaacaataaaagcacacactttgtgctctcttcacaacccatttctggactctctgtcactcaaatgtttatcatgaaagaaaatgtgtttcaggcacaactattaaacttctgagtgacagagagtctccgtcgaactgaaaagggatgggtcaggcaggggatct

SEQ ID NO: 352535 - DNA, 2262 bp, Homo Sapiens
  misc_feature (22)..(22): n is a, c, g, or t
  misc_feature (248)..(256): n is a, c, g, or t
  misc_feature (359)..(383): n is a, c, g, or t
  misc_feature (390)..(579): n is a, c, g, or t
tttatctaaactgaattgaganaaaattacagtattattcctcaaaataacatcaatctatttttgtaaacctgttcatactattaaattttgccctaaaagacctcttaataatgattgttgccagtaactgatgattaattttattttacttaaaataagaaaaggagcactttaattacaactgaaaaatcagattgttttgtagtccttccttacactaatttgaactgttaaagattgctgcnnnnnnnnngacattgtcaataacgaaacctaattgtaaaacagtcaccatttactaccaataacttttagttaatgttttacaaggaaaaagacacaagaagagtttaaannnnnnnnnnnnnnnnnnnnnnnnngagacannnnnnnnnnnnnnnnnnnnnnnnnnnnnnnnnnnnnnnnnnnnnnnnnnnnnnnnnnnnnnnnnnnnnnnnnnnnnnnnnnnnnnnnnnnnnnnnnnnnnnnnnnnnnnnnnnnnnnnnnnnnnnnnnnnnnnnnnnnnnnnnnnnnnnnnnnnnnnnnnnnnnnnnnnnnnnnnnnnnnnnnnnnnnnggtttaagttaaattttttaaaaaactaaagtgactggcactaagtgaacttgagattatcctcagcttcaagttcctaagataagggctttcttaagctttcaggtgtatgtatcctctagatgtagacaataatgtcccatttctaagtcttttccttttgcttctccttaaattgattgtacttccaaatttgctgttatgtttttttcctaatactgtgatctatctgatctgcagacaagaaccttgtctctgttgaagagcatcaaggggagattatgtacacattgaaactgaagtgtggtgttactgacggaatgtgcagtaactcctcagatatctgttaaggcatttcccagatgtgatgccagccttcttacctgtactgaaagatgcttagcttagaaaaaaacaaaacagatgcaaaatcagataattttattttgtttcatgggttttcttatttactttttaaacaaggaaggaatattagaaaatcacacaaggcctcacatacatgttatttaaagaatgaattgggacggatgtcttagacttcactttcctaggctttttagcaaaacctaaagggtggtatccatattttgcgtgaattatgggtgtaagaccttgcccacttaggttttctatctctgtccttgatcttctttgccaaaatgtgagtatacagaaattttctgtatatttcaacttaagacatttttagcatctgtatagtttgtattcaatttgagaccttttctatgggaagctcagtaatttttattaaaagattgccattgctattcatgtaaaacatggaaaaaaaattgtgtagtgaagccaacagtggacttaggatgggattgaatgttcagtatagtgatctcacttaggagaatttgcaggagaaagtgatagtttattgttttttcctcgcccatattcagttttgttctacttcctccccttccttccagatgataacatcacatctctacagtaagtgcctctgccagcccaacccagggagcgcaagttgtctttgccatctggtctatagtacagtgcgcggcgttaggccacaactcaaaagcattatcttttttagggttagtagaaattgttttatgttgatgggaggtttgtttgattgtcaaaatgtacagccacagccttttaatttgggagcccctgttgtcattcaaatgtgtacctctacagttgtaaaaagtattagattctactatctgtgggttgtgcttgccagacaggtcttaaattgtatattttttggaaaagtttatatactctcttaggaatcattgtgaaaagatcaagaaatcaggatggccatttatttaatatccattcatttcatgttagtgggactattaacttgtcaccaagcaggactctatttcaaacaaaatttaaaactgtttgtggcctatatgtgtttaatcctggttaaagataaagcttcataatgctgtttttattcaacacattaaccagctgtaaaacacagacctttatcaagagtaggcaaagattttcaggattcatatacagatagactataaagtcatgtaatttgaaaagcagtgtttcattatgaaagagctctcaagttgcttgtaaagctaatctaattaaaaagatgtataaatgttgttg

SEQ ID NO: 352536 - DNA, 438 bp, Homo Sapiens
aaaattgccatattttttgggaaaaagtttaataaaaccccccctaggaatccattgtgaaaaaggatccaagaaaatccaggatgggccccatttaatttaaatatccccattccatttccatgttaagtgggacctattaacttgtcacccaagcaggactctatttccaaacaaaatttaaaactgtttgtggccctatatgtgtttaatccctggttaaagataaagcttccataatgcctgtttttattcaacacattaaccagctgtaaaacacagacctttatcaagagtaggcaaagattttcaggattcatatacagatagactataaagtcatgtaatttgaaaagcagtgtttcattatgaaagagctctcaagttgcttgtaaagctaatctaattaaaaagatgtataaatgttgttgaaacatt

SEQ ID NO: 352537 - DNA, 612 bp, Homo Sapiens
  misc_feature (60)..(60): n is a, c, g, or t
ctgttgacctacatgtggtcgggcacacctcacactacaaggctacccctgggcccatcnctgccccttccacggcccccacctgtggtcaggtgttgccaccccctcaggacctggtctcaaggcagccccactcgagtcttctggagtccaaggcacgccactcgcccaaaagggagggggtgtttgggggggctttgactgtctccagacctcaggggagctgggcaggctctaaccagtggtcctccagagagcagcgttgaccacctggacccctgcgccacgtgacaggaggctctggtcctgcaggcctggtcttgcccagctgggccgcctcaggtgtcaggaaggggatgggtgtccctggctcccaggccaggcagctgctgacctccagcaccccgcacttgctcatgaggaccccacccccgcaggccctcccgggtcctgaccagcctctggtgcagcatctgctttggcctccgggccccctcgctccccacccacccgggccccttcctccggtgctcacctggggcctccatcccagaagcgcagggcttatttttctgattaaagaaaataaaaagtgccgtgccactatttttt

SEQ ID NO: 352538 - DNA, 1175 bp, Homo Sapiens
  misc_feature (36)..(36): n is a, c, g, or t
  misc_feature (77)..(77): n is a, c, g, or t
  misc_feature (107)..(107): n is a, c, g, or t
  misc_feature (507)..(507): n is a, c, g, or t
atggtctccacctgtgcttggaaccagtgtaactgnctgctccctgctcccagggactgacacggggatcatctctntaaccgccctccgtcgggcccctgcctgcnttctcccctccacgcaaggctgtgctcttcctctggtttctgtgtgtccgtttgagtgtctgcgccccgcctccccatacttcctgggatgatgtgtgaaacctgacacctagatttatttggaaatattctatgaccactttacagatgaggaaactgaggcctcaagcgtggaggggtagagtgaagagtagaacccaggtctgatgccaaagctgctttcttctctgcctcctcctcacgcaactcacacctccttttcttctagctttgttgtcctcccaggaaccaaaaaaccccagctattttctgaccaaaatgtgtttcataacaaaccatctggtgcctttccacacagaactggcaggagcctcgtgtcctgctagctgtctctcttgtngatttccgtgaaaatgcaagtgtttgaggtctgctcattccgagggtgaaacaaaatccaaccctgtcagaatcatgctgttctctttgctgacactgtgaccctgggtcgggacagaccagcagcaatctgtctttagaatcgctttccttcctccccttttgcccccgtggggctcccggcatcctgaaagccagcaaagcctccagcatcttttccatcctgaggtgcctcccagtggcctggcttgtcggagcaagtttcatcagccctagggaaaacacggccctcctgggaacctccttacctggagtaaccggacaccttagacggaggtgcctgagggtggggtgggatttgcagggtcattatcagaacatgaggataacttccttgcccctgctctgtagccacctccttggcaccggcctctatttgtcataaggcggcgtgggcgaagcctgacacaggccagccttggcacgaggggggccaggggttctgagaagcgctgccctgtgagagccacgctggccttcgtctccatctctggttgacgggctgtccgtgtgcctcctgtgtgtctgcagacaagtcttgctgtgctttatttgtgaaactttaatgaggaaaaaacaaataataaatgttctcgttttgaaactcaa

SEQ ID NO: 352539 - DNA, 556 bp, Homo Sapiens
  misc_feature (23)..(23): n is a, c, g, or t
  misc_feature (30)..(30): n is a, c, g, or t
cccccacaaaaagggaaatgtcnagaatgnggataaatatgcagtgccaggaagcccaataatccaggcctgagaaattaatcaccttcggttaacaaaaagtgcagtaaacagaaacatttgcccctacatttaataaattgcctcaaaaacctttgcctaaagatcttacaaattcagtaatattacagaacaattcctaatcaatatttaataaggttaactacatccttagttagatatttgataaactttgcttttcaataatgccaatagatcttgggagaatgggtagaaaggcttaattaagctacttattaaataactttgaaaatgaaggtccttcactcagttcatggaactggttgaggtcatactgaaacagaacatcccatgtcgaatttgctttatggcccatgttatggcagaggacgtctccatccttctcatgactcaggtaggaggggaaaggtttattctgccatcaagccatctaggatattttatgtaaatgcccattatctataataggagctaagaatacaactgtgttagg

SEQ ID NO: 352540 - DNA, 964 bp, Homo Sapiens
atgcggctgaccaggactctttagatgcatgaatttatttatatgaaggctctcacagagacacacacagcacttcagtagcatttgcattcctggttaaagaatcaccaatatttaaaataaaaactttcctgaaattgggactgtcatgttatccagaagggctggtacatccgcccaccatgtccccctgctgggtcaggagccaacacaggaccctgcgtgtgagcgtgcctgacatctcacgcacggccactccagagccggtccctgtccttggaaagctgtgaagccttgcgttgagttccttctcgatactgacggctccgtgctgacattctgagctctggagtcacaccagcgcaggggcgtggaggaactgaggtttggaaggaatgccaggtctcgcacagcttggcctcgagaaggtgagaggaaggcaaaggccagggaggggacccagagaggcctggcacacaaggcccaagcaccaccgtcaacacagcccagtccatacagaaatgggtttcatgcctgaaaagctttttacagaaagatgccgcctgtagccagtgacagccgcaaccctacaggcctcagttccttgcagaggtgaggggtagagagtcagcctctctcccttccagcagcgacccagcttccctccacttccaggtggtgctgggctcaccgagggagcactggtgggtgctctgaaaacccacaggatcccacctccaggcccacctgggtcccatctcactctcttcttctttcaccaattgctaacatagaccttgttgggatcacgatggcttcacaagccagctgttgggtttgctatgtcactgtggctcagtcacatccctgcgtgtatactgtctgcggggcacatatgtatccatttagagctaaaggaatcagtgtacactacagctaatcctaataaatccgatgttttcgg

SEQ ID NO: 352541 - DNA, 341 bp, Homo Sapiens
  misc_feature (220)..(220): n is a, c, g, or t
gtgtgttgaaggtcagtgcttcactgggagggctcacaggactcagaatatagtgtacttacagctatgatttattacagtgaagggaaataaagcaaaatcagcaaagggaaaaagcatattgggggaaatcaggtacaaacttctgagttctctcccagtggagttacgtaggatatgcttaattcctccagcaaccagctatgacaacatgtttgangtgttgtctaccaaggaagcttcaactagacactcagtgatcagaatttttattgggaggatggccacatagggcaccctctgtataggtactcttcggactgggcatgtacccagaattt

SEQ ID NO: 352542 - DNA, 547 bp, Homo Sapiens
ctcatttcccacttcaatgcaatactgaaaactggctaaaaataccaaatcaatatactgctaatggtactttgaagagtatgcaaaactggaaggccaggaggaggcaaataatatgtctttccgatggtgtctcccaagtgttggtgctttgggtttttataagttgtgaaaaggaagatgcacatttcttcattctccatggtgtgcatggaaatgtgtttgagtgtggatgtaaaagaaatcgagtaataaagaattagctggcttgtgaaatagtgcagtgttggatgcttcaagaggtataatcctattttattagcacaaacttgctagctaattagagtttatctttttagaaaggacaccgtataggttcgtaaaaaatatttacaggaagcaaaatagatctattactactttaccgactttaccccctttctttaatttgtataatttttgtactatatatcgatgtgtaaatgtttagagtcttcattatgaaaatatcaataaatatttcattagtttacattaacccgggttt

SEQ ID NO: 352543 - DNA, 435 bp, Homo Sapiens
  misc_feature (105)..(105): n is a, c, g, or t
cccgaaggtgtcccccccaagggtgggtgccttgggtttttaataaagttgtgcaaaaggaaagatgccacatttcctacattccccccatggtgtgccatgganaatgtgtttgaagtgtggatgtaaaaagaaatcgagtaataaagaattagcctggccttgtgaaatagtgccagtgttggatgccttcaagaggtataaccctattttattagcacaaacttgcctagcctaattagagtttatctttttagaaaggacaccgtataggttcgtaaaaaatatttacaggaagcaaaatagatctattactactttaccgactttaccccctttctttaatttgtataatttttgtactatatatcgatgtgtaaatgtttagagtcttcattatgaaaatatcaataaatatttcattagtttacattt

SEQ ID NO: 352544 - DNA, 798 bp, Homo Sapiens
  misc_feature (565)..(565): n is a, c, g, or t
gctcccgagtgaaagaatcaatatcaaattctgagctctttccaacaactgatcctgtgggtaacttgctccaagttccagaacagatctctgctcatctacctcagccagctgggcagatagctacacagccaactcaagtctctctcccacccaccgcagagccagcaaaaacagctcaggcttgtcttcaggatcaggttcacaagaaaccaagatcccaatcagtctagtactaagattaaggaattccaaaaaagaactaaatgatattcgatttgaatttactcctgggagagatacagcagagggtgtctctcaggaactcatttctgctggcctggtcgacggaagggatttagtaatagtggcagctaatttgcagaaaattgtggaagaacctcagtcaaatcgatctgtcactttcaaactggcatctggtgtcgaaggctcagatattcctgatgatggtaaactgataggatttgcccagctcagcatcagcctaaaccacaacccgtggaagaggcggcctaaggagattccacacatgcgtatctctgtngcttctatgtggcctaaacccactacgtgccaaagaaccccagcaacaaacctcccggctaggagctttagaagtctttatgtcttcctgccatcattcctcctttttcccacagggaaaagaaaagttggatcactaggtggcagcatccccagagttccgtcagtaaccttacttcatatgtccctgtcttcctccatctgagaagtggcccatgtgcttcaaggccaggg

SEQ ID NO: 352545 - DNA, 644 bp, Homo Sapiens
  misc_feature (483)..(491): n is a, c, g, or t
gttactgaatctctctatgaactttccattcaaaactttccaagtttttccttatgtggaaccgaaatctttctttctcccgtgaaactttactactatcagataattgaagacagatctctttgtattctcttcaagcccaaaccaattctgttccttcaatctaaatagtggtaatatgaatgtttaagaaatgaaataagaaacatgtgcaggcactttggaaggtgctaagtgactgccctaaggaatgaaaagcaagggccaggtgggagtagcccagcgaaggcactttgggctgccaggaacaggaggcgtgggaaactctggcttaggaaaacatgaacacaggggcaacagaggcaaactgttgttcgagttaaatataaatctcaggctctttaaaggtaaaaggtttaaggataatccatttggaagaagaaaagagtgaggctgaaagtaaagccacatgacaagcatatnnnnnnnnntgcagatgatacaaatatgaaagaggccttcagtgtttgtttattaagaatcttaatgcagtttactgatggattaaaaacagctaacattgtctgaaaattatgttacctataagaagttggaaataaataaaagcataatcactaaaaaaa

SEQ ID NO: 352546 - DNA, 263 bp, Homo Sapiens
  misc_feature (69)..(69): n is a, c, g, or t
  misc_feature (121)..(121): n is a, c, g, or t
  misc_feature (179)..(179): n is a, c, g, or t
  misc_feature (217)..(217): n is a, c, g, or t
  misc_feature (227)..(227): n is a, c, g, or t
  misc_feature (235)..(235): n is a, c, g, or t
tcttaactgggagcaattttgtaccccataaggcatttgggaatatctggagactttatggcttgccanatttgcaggtgttgtggggtggggcggggggtgttactggcatctaatgganagaggtaaggaatgttgctaaacatcctacagggcacaggacagtacccatgacaaanaatgacctggctacgtacatcatggatctgaagttganaaacctgtantcatatantcatctgtatcgatagatttatttcaag

SEQ ID NO: 352547 - DNA, 2076 bp, Homo Sapiens
  misc_feature (578)..(600): n is a, c, g, or t
  misc_feature (827)..(827): n is a, c, g, or t
  misc_feature (987)..(987): n is a, c, g, or t
agtgagtgatagttgcttcaggaatcttgcagaagaccgcagtgggataaatctcaaagatctcgtacaagatccttctttgttgggtgggactatatcagcatacaagatagtaccagatgaaatagaagaaatcaaggaaaccctgatagattggtgtgatgaaaaggaacttaatttgatattaacaactggaggaacaggatttgcaccacgagatgtcactccagaggccacaaaagaagtaatagaacgggaagcaccagggatggccctggcaatgctgatgggatcacttaatgttacacctctgggcatgctctctaggcctgtatgtggaatcagagggaaaacgctcataattaacctgccaggtagcaagaaaggatctcaggaatgctttcaattcatactgccagctctacctcatgccattgaccttttacgtgatgccattgtaaaagtaaaggaggtgcatgatgaacttgaagatttgccttccccacctccccctctttcccctcctcctactaccagcccccataaacagacagaagacaaaggagttcaatgtgagnnnnnnnnnnnnnnnnnnnnnnncagtggtgttgcttcaacagaagatagttcctcatcacatataactgcagcagccattgctgccaagattccagactccatcatttctcgtggtgttcaggtgctcccacgagacacagcctccctcagcactactccttcagaatcgcctcgtgctcaggctacatctcgcctctctacagcttcctgcccaacaccaaaacaaattagacggccggatgaaagcnaaaggagttgctagtagagttggatccctcaaagtccagtccaggtgcagcagcaaggagaacattctcagagccagtcacagtgctgtcgatatcaccaaggtggctagaagacatcgcatgtctccttttcctctgacatctatggacaaagcctttntcacagtcctggagatgactccggtgcttgggacagaaatcatcaattaccgagatggaatggggcgagtccttgctcaagatgtatatgcaaaagacaatttaccccccttcccagcatcagtaaaagatggctatgctgtccgagctgctgatggcccaggagatcgtttcatcattggggaatcccaagctggtgaacagccaactcagacagtaatgccaggacaagtcatgcgggttacaacaggtgctccaataccctgcggtgctgatgcagtagtacaagtggaagataccgaacttatcagggaatcagatgatggcactgaagaacttgaagtgcgaattctggtgcaagctcggccaggccaagatatcagacccatcggccatgacattaaaagaggggaatgtgttttggccaaaggaacccacatgggcccctcagagattggtcttctggcaactgtaggtgtcacagaggttgaagttaataagtttccagtggttgcagtcatgtcaacagggaatgagctgctaaatcctgaagatgacctcttaccagggaagattcgagacagcaatcgttcaactcttctagcaacaattcaggaacatggttaccccacgatcaacttgggtattgtaggagacaacccagatgacttactcaatgccttgaatgagggtatcagtcgtgctgatgtcatcatcacatcagggggtgtatccatgggggaaaaggactatctcaagcaggtgctggacattgatcttcatgctcagatccattttggcagggtttttatgaaaccaggcttgccaacaacatttgcaactttggatattgatggtgtaagaaaaataatctttgcactacctgggaatcctgtatcggctgtggtcacctgcaatctcttttgtcgtgcctgcactgaggaaaatgcagggcatcttggatccttggccaaccatcatcaaagcaaggttatcatgtgatgtaaaacttgatcctcgttcacgataccatcggtgatactaacttggattaacaagaacccatacctttggcacagagtccagtaat

SEQ ID NO: 352548 - DNA, 366 bp, Homo Sapiens
aaaacataggagaaaaaagtgaaagcagagaagaaaagttaggagactcattgcaagatttatacagggcactggagcaggccagtctgtcaccactaggagaacatcgtatttcaaccaagatggaatacaagctatcatttataaaaagatgtaatgatcctgtaatgaatgaaaaactacaccggctgagaattctcaaaagcactttaaaggccagagaaggggaagtagccattatcgataaagtcctagacaatccagacttgacatctaaagaattccaacaatagaagcagatgtacctcgaccttttcttggatatctgtcaaaataccacctcaaatgacccactgagtatttctt

SEQ ID NO: 352549 - DNA, 980 bp, Homo Sapiens
  misc_feature (911)..(911): n is a, c, g, or t
  misc_feature (946)..(946): n is a, c, g, or t
aggcctgggtggcgaattcggcacgaggaagaaattggacgaggccttggcccagtactttgggaatgggacagagttggcccagcaagaagatatctacccagccatgccagagcccatcaggaagtgcccacagtgcaacaaggacatggtccttaagaccaagaagaatggcgggttctacctcagctgcatgggtttcccagagtgtcgctcagctgtgtggcttcctgactcggtgctggaggccaccagggacagcagtgtgtgtccagtttgtcagccacaccctgtgtacaggttaaagttaaagtttaagcgcggtagccttcccccgaccatgcctctggagtttgtttgctgcatcggcggatgcgacgacaccctgagggagatcctggacctgagattttcagggggcccccccagggctagccagccctctggccgcctgcaggctaaccagtccctgaacaggatggacaacagccagcacccccagcctgctgacagcagacagactgggtcctcaaaggctctggcccagaccctcccaccacccacggctgctggtgaaagcaattctgtgacctgcaactgtggccaggaggctgtgctgctcactgtccgtaaggagggccccaaccggggccggcagttctttaagtgcaacggaggtagctgcaacttcttcctgtgggcagacagccccaatccgggagcaggagggcctcctgccttggcatatagacccctgggcgcctccctgggatgcccaccaggcccagggatccacctaggtgggtttggcaaccctggtgatggcagtggtagtggcacatcctgcctttgcagccagcccctccgtcacacggactgtgcaaaaagatggacccaacaaggggcgccanttccacacatgtgccaagccgagagagcagcagtntggctttttccagtgggtcgatgagaacaccgtt

SEQ ID NO: 352550 - DNA, 1040 bp, Homo Sapiens
  misc_feature (44)..(44): n is a, c, g, or t
  misc_feature (131)..(131): n is a, c, g, or t
tcccctctctgtgccattctactactggcttgtttgggtttaanacaatcctggggtgccctcagagacactcggctggtgtcctatggtttctgtggcgcaggcctgtgtccccagccacacgagcttcnctgagccacggctgccagctggttggcccagtgtccatccacagttgccaggatgtggtagaccagcgtgtggaaatggaacctggtgagatccgaggctctgcttttactcctcccatgttctttcaagatccagaagaggatgtcactgaccatgcccacatcaggaacaccgttccaggaagagagagaagagtgaggtccagaggctgactgggtgagaaataacagctcctgttcattcagcccaagggaagtcaccgcgggaaagacctgctgatggacaatgctgctcatgagctccctgttagtcatactggcccagctctaggtgaaactggaataccagtggggatgtcaagaaatggaggttacaacctccaagagtctcttcctctggagctccttgctttgtccctccatcatgtgcaatccagagaggaccaccaggtctggctgaaactcctccaggctagacacaaacacctccagcatattcatggccccgttggagaggtcgtgagagaagatgaatcggttggcatggggagcttttaactggccccactcctcccctgcttgatactctaaaatgaggtggaactcatccacttcctgcaatgactctggtggaacaaagacattgtcatcaagaagctcatgtagctttggaccaactggaccgcaaagaagaaccccactgccacgcggcgccagcgccggactggccgcacgataagcgcgtcccaggctgccgccaaccggccctcgggggagacgggtcccgggggcgcaggcgcgggccccagacacagcgagctccagagagagcgcagcgccgagcctggcagctctggctccagcaggaagacgcagcccacggccagcgccaggaagcccgcgtacccc

SEQ ID NO: 352551 - DNA, 1128 bp, Homo Sapiens
  misc_feature (973)..(1031): n is a, c, g, or t
gcaccccgtacatcccaggctgggccggtccggaattctcgggatgcgcgggctaggaaaggagttggttcgcgcaggtgcggcgcctgggtccccatggcgctgtggcgcggctccgcgtacgcgggcttcctggcgctggccgtgggctgcgtcttcctgctggagccagagctgccaggctcggcgctgcgctctctctggagctcgctgtgtctggggcccgcgcctgcgcccccgggacccgtctcccccgagggccggttggcggcagcctgggacgcgcttatcgtgcggccagtccggcgctggcgccgcgtggcagtgggagtcaatgcatgtgttgatgtggtgctctcaggggtgaagctcttgcaggcacttggccttagtcctgggaatgggaaagatcacagcattctgcattcaaggaatgatctggaagaagccttcattcacttcatggggaagggagcagctgctgagcgcttcttcagtgataaggaaacttttcacgacattgcccaggttgcgtcagagttcccaggagcccagcactatgtaggaggaaatgcagctttaattggacagaaatttgcagcccaactcagattttaaagggtcttctttgcgggccagttggtccaaagctacatgagcttcttgatgacaatggctttgttccaccagagtcattgcaggaagtggatgagttccacctcattttagagtatccaccaggggaaggagtgggggcccagttaaaagctcccccatggccaacggattcatccttctcttcccgaccttcttcaaaggggggcattgaattatgctgggaggggggtttgcgggccaaaccctgggagggaggttttcagcccggaccctgggggggtccctcctcctgggatgggcaccatcaatgggaggggaaccaaaacgccaggggcctccccctagggaacgagannnnnnnnnnnnnnnnnnnnnnnnnnnnnnnnnnnnnnnnnnnnnnnnnnnnnnnnnnntattcccgagatgtcccccctaaaaaacttgggccccggagcggacccaaacccggggggcgggttccttgggagccccgccatttggctccgcatc

SEQ ID NO: 352552 - DNA, 913 bp, Homo Sapiens
  misc_feature (50)..(86): n is a, c, g, or t
aatgtatagactcatatagggcgactggaggctctacgcggtggcggcgnnnnnnnnnnnnnnnnnnnnnnnnnnnnnnnnnnnnnatcaggccaaatcggccgagctcgaattcgtcgagagcggaggggcggcgcctgggtccccatggcgctgtggcgcggctccgcgtacgcgggcttcctggcgctggccgtgggctgcgtcttcctgctggagccagagctgccaggctcggcgctgcgctctctctggagctcgctgtgtctggggcccgcgcctgcgcccccgggacccgtctcccccgagggccggttggcggcagcctgggacgcgcttatcgtgcggccagtccggcgctggcgccgcgtggcagtggggtgagtgccaacggggcctgggtctctgagcctccgaggtcggccttggaggtcgggcggagccgcgcagaaacagggcttctcagaggtccccgggaggcgctgctgtccgcgctggccccttggcgagaagtgtcggacgtctgagtggaacccggttcgtcaccgctgctctttccactcggctggcctctgcgcctttctctcatcccggtaggaccagccctaacagcttctggcaaatcccgcttggtctgacacctttctccgagccttcttcctcgtcccaacttttagccccttctcttctggcgactgtggttttgcaatcaaagatacttgaccttacccactatgacaacactcttcctctttcttctgaacttcttgaagacgcgtgatgtcggcctttacccactttcgaaacgccgtgtagtctagaaaccacacgacggtactgcaactcctctcagatttgccttttagaatcttcattatctactctgcagccttccacgcagaacgctcctaat

SEQ ID NO: 352553 - DNA, 1011 bp, Homo Sapiens
  misc_feature (59)..(80): n is a, c, g, or t
  misc_feature (881)..(881): n is a, c, g, or t
ttacatgactcttcacacgccgcgggccgcgggccgtactccttatccacccttatttnnnnnnnnnnnnnnnnnnnnnnacatccacacaacacgctggtaccggtccggaattcccgggattgagaatggaggggggctggaggctgtgtgtgggtcataggagctgctcggtgaggacaccatcgaccaggagctggagcagctctacctgtctcacctgagccgcctacgggctgctgtggctgcgggtggggcagggggtggtggggagggctccacagatggagggatgtcccccagccatcccctgggcatactgacggaccgcgacctgatcttgaagtggcctggccctgagcgggccctgaacagcgccctggctgaggagatcacgctgcactatgcccggctggggcgtggcgtggagctcatcaaggacaccgaagaccctgatgatgaaggggagggtgaagaggggctctctgtcacaccctccagcccagaaggggacagccccaaggaatcgcctccagaaatcctctccggggcccgttctgtggtagccacgatgggagatgtgtggctcccatgggcagagggctcaggatgtgacggccctgtggttctgggtacagagggtcagttcattggggatcctgagaaagggatgggcaaggacaccagctctttgcacatgaatagggtgatagctggggtgactgagtccctgggggaggccgggacagaagcccagatagaggtcaccagtgagtgggcaggcagcttggatcccatatctggcaaggagccagcctctcccgtccttctgcaggggcaaaatcccaccctcctcagtcccttgggggccgaagtctgtntctctagtgtagccaggcctcatgtgagctcccaggatgaaaaggatgcaggcccaagccttgaacccccaaagaagttttcccaccctagcagtccctgcagaatgttgtgtttgcaatgcctcctcag

SEQ ID NO: 352554 - DNA, 959 bp, Homo Sapiens
  misc_feature (504)..(521): n is a, c, g, or t
ttaaatattccctcctcctagaaggttctagaccccccccttccagcaggggtgcccaagagtccctggaccctcaaaattgcaaaggagacccaagcggggctcgctgacctcccagggcccagcaagatgggatagccagccttaggtggccccacgagcccaagcctggggaagggcccctccccagccagacgagaggcagccaccccagagaccacaggagccgtaccatggcctgcgcagtcaggccctatcaggatgtgtctgtcccaagcctggccaggctccagtcctgtgccagtagctcactgctgtcctatgtgcaggtcccccaacacttggagcctgtggttaaggcctcctgggagaggcagtgagcatgagtcaaaggtgacatggacttgaatctccccaccccgccccgcctgcagtagccgggccaggtaggaggcaaggatcattccctgctcccagaggttccagatgacctagtttcgtttnnnnnnnnnnnnnnnnnngtcacccagacgtcactgtgatatcacctagtgaatctatttctggccctgtcttcgtcggcccagtttctgtaacttgcagccaatttgccctctcccctgtggctgccagcccatctgcccctctgtgtccttgctgccctggccctcctctgttttctgtaacagatgctccagtcattgcctttcagagtggagcagatgacagatggggtgcacgcattcagacacctctgatgcccttagccagggcagggatcgtccttaaagtgaaggcctggacaggaggagtcagggacttgggaggaggtggagctgtggggatgggagtggaggaaatcaaatgagggaaactgaaaatagaatggaaacgatgactaacaggcaggaagtgccaggtatggggggaataggaactatgagctaaatatacttatt

SEQ ID NO: 352555 - DNA, 541 bp, Homo Sapiens
  misc_feature (23)..(23): n is a, c, g, or t
ggaaattgaatctttcaactcangtccctttctgctgttttctccaaactgggaactctaaacgaacttccatctttcttccccaaattgccctcccctgggtgctcaaagcccttgaccctgggcctccgtgctcgctgtgaagttgctgaacgtctctctcaggccccgcagctcctcctgcagctgggagttttgggatccgatcacacagacaaccacaagcagcaggaggctgaggcccagggagagcaggaggaggcgaggtccggagcagagacgctgcaggaggggctggggaggaggtggccctgcaagaggagggggtgtcaggagcgcggggacagaggggaccctggcacagctccagggtcctaaaagggtagcaagctaaggcggccctagtagtctaggaggaaccatgtacatgaagaaatgcgggcggtgggcgaccctgcagggccagaggcaactggaaatcggggagaaaagagggctggggaagggggctaagcgctgagccgccccaatctcgtgcccg

SEQ ID NO: 352556 - DNA, 634 bp, Homo Sapiens
  misc_feature (107)..(107): n is a, c, g, or t
  misc_feature (151)..(151): n is a, c, g, or t
aaagtcctcggggatttcggatagagatctgtggcacctcatggggatactagtgggggcaaataacaagttactgctgaagtgatccaccccagggactctccccntcctccctttgctgccacacagtaggggcttcacctctgctggnacctgaagcaccagagtgaagcagacatactgtgaatcctggtcctctgcagtggcaggatgcaaagtgatgtagatctcccatggtgtaagttctgcaggatggatcaagtggacacgctagatgtgactgggtaggggcttgggggctggggaggatggggctgagacagtgaagtgggcaaaggaagtacacattggactctttcttttggggtaggattaaaggaatagcttttgtctacacaagagaaatattatctctgaatcaaggctcacaatgtcttaagacccaaattcagcatagaacctctcctcattactagggggactcctgcccaccactggttgaatacatacctgccatttcctttaatcacctgtagttcatctagatagatggactccaatacttcaacttccagagggaaggacccagtcctcctcccctgcagctgcagacgcagacgccgccatatcttca

SEQ ID NO: 352557 - DNA, 1535 bp, Homo Sapiens
aaacgacgctagctgcccacccctcttagttttccgcctccgacttccctaagggcatttccggttccggctgcgggccggtgaagatatggcggcgtctgcgtctgcagctgcaggggaggaggactgggtccttccctctgaagttgaagtattggagtccatctatctagatgaactacaggtgattaaaggaaatggcagaacttcaccatgggagatctacatcactttgcatcctgccactgcagaggaccaggattcacagtatgtctgcttcactctggtgcttcaggtcccagcagagtatccccatgaggtgccacagatctctatccgaaatccccgaggactttcagatgaacagatccacacgatcttacaggtgctgggccacgtggccaaggctgggctgggcactgccatgctgtatgaactcattgagaaagggaaggaaattctcacagataacaacatccctcatggccagtgtgtcatctgcctctatggtttccaggagaaggaggcctttaccaaaacaccctgttaccactacttccactgccactgccttgctcggtacatccagcacatggagcaagagctgaaggcacaaggacaggagcaggaacaggaacggcagcatgctacaaccaaacagaaggcagtcggtgtgcagtgtccagtgtgcagagagcccctcgtgtatgatcttgcctcactgaaagcagcccctgaaccccaacagcccatggagctgtaccagcccagtgcagagagcttgcgccagcaagaagaacgcaagcggctctaccagaggcagcaggagcggggggggaatcattgaccttgaggctgagcgaaaccgatacttcatcagccttcagcaggctcctgcccctgcggaacctgagtcagctgtagatgtctccaaaggatcccaaccacccagcacccttgcagcagaactatccacctcaccagccgtccaatccactttgccacctcctctgcctgtggcgacccagcacatatgtgaaaagattccagggaccaggtcaaatcagcaaaggttgggcgaaacccagaaagctatgctagatccccccaagcccagtcgaggtccctggcgacagcccgaacggaggcacccaaagggaggggagtgccacgcccctaaaggtacccgtgacacccaggaactgccacctcctgaggggcccctcaaggagcccatggacctaaagccagaaccccatagccaaggagttgaaggtcctccacaagagaaggggcctggcagctggcaggggcccccaccccgcaggactcgggactgtgttcgctgggagcgctctaaaggccggacacccggttcttcctaccctcgcctgcctcggggccagggagcataccggcctggtactcggagggagtccctgggcctggaatctaaggatggttcctagcaggacttggtggggggaacagggaattggggatgggagggaggcaataaagatatttggccttca

SEQ ID NO: 352558 - DNA, 409 bp, Homo Sapiens
  misc_feature (359)..(359): n is a, c, g, or t
tttattttttaaagaaatctatttcataccatggaggaaggctctgttccacatatatttccacttcttcattctctcggtatagttttgtcacaattatagattagatcaaaagtctacataactaatactcacagctgagctatgtagtatgctatgattaaatttacttatgtaacttttattgtctttggcattaacagtgtttcaaaaaattttctgggtaaacccatcagtgattcattcccaaatcttctaaaagcataagggtctcaatatattaaaacatattgaataatccttgttagagttatccctgcaggagtccttagtgctcctttatccaatttgtacttgangccctctaggcagggtgtacagctagctgttgctctggtatttcctataa

SEQ ID NO: 352559 - DNA, 712 bp, Homo Sapiens
  misc_feature (478)..(478): n is a, c, g, or t
acttcaaaggaatgagtgggatccaatcatcgaatgggctgagaaaagatccagaagtggggcaacattgagtgggcccatgactatgagctgcaggagctgcgggcccgcaccgccgccggcaccctcttcatccatctctgctccgagagcaccacagtcaagcacaagctcctgaaggagtgaggcctgggcagagcacactcagcaggatagaggcagtgcagccacagctcccccggccttcagggctccccagcctgtggggctggcttccttggcttttggggactcggcctcagcgtcaccctgagattccccccgagacacagtgcgctagtacggctgtccggaggtcagcctgatttcaacccaggtgcccctggcctggccagcagtgaatgtaggagatgaattgtgcaagtgactttctctcgactctgattttattaaatatttctccaccctggaaatgtgntgagccctgttttcacgtatgcctctgcacttctccattcttcctgttttgtctaggttccagagggttaaacagcttatctcccatggcgtgtttggatatctgctgcctgtggtcaggaaccttgcactggggaaacaatcatgtaatccacagacaactctatttgtgttcttcagcctcagcctgaaggcttttttttggctggcttttaatcaaacaatcttttgaaac

SEQ ID NO: 352560 - DNA, 1321 bp, Homo Sapiens
ggtccggaattctccggatcggcgtccaagggaggttgagggctctgaggaggcgttgagaggtttccgtacagcccgaccgtgcggctttggggatcccatcgctctgtgtttcctgctccaggtttcgcgtctcgcatcttcccagaccctcgggcgcgatgtggaggagctgcctccggctgcgggacgggggacgccgtctcctgaatcggccggcgggtggccccagcgcttctatgagtccggggccaaccatcccgtctccagcccgggcttacgccccgccgacagaaaggaagaggttttatcagaatgtcagcatcacacagggtgaaggtggctttgagataaacctggaccacaggaagctgaaaactccccaagccaagctctttaccgtccccagcgaggccctggccattgcagtggctactgagtgggattcccagcaggataccatcaagtactacaccatgcacctgaccacattgtgcaacacatcattggacaacccaacccagagaaacaaggatcagctgatccgggcagccgtgaagtttctggacaccgacaccatctgctacagggttggaggagcccgagacattagtggaacttcaaaggaatgagtgggatccaatcatcgaatggggctgagaaaagatacggcgtggagatcagctcctccaccagcataatgggacccagcatccctgccaaaactcgggaggtgctcgtcagccacctggcatcttacaacacatgggctttacaagggattgagtttgtagctgcccagctcaagtccatggtgctaaccttgggcctgattgacctgcgcctgacagtggagcaggccgtgctgctgtcacgcctggaggaggagtaccagatccagaagtggggcaacattgagtgggcccatgactatgagctgcaggagctgcgggcccgcaccgccgccggcaccctcttcatccatctctgctccgagagcaccacagtcaagcacaagctcctgaaggagtgaggcctgggcagagcacactcagcaggatagaggcagtgcagccacagctcccccggccttcagggctccccagcctgtggggctggcttccttggcttttggggactcggcctcagcgtcaccctgagattccccccgagacacagtgcgctagtacggctgtccggaggtcagcctgatttcaacccaggtgcccctggcctggccagcagtgaatgtaggagatgaattgtgcaagtgactttctctcgactctgattttattaaatatttctccacccggaaaaa

SEQ ID NO: 352561 - DNA, 470 bp, Homo Sapiens
  misc_feature (14)..(14): n is a, c, g, or t
  misc_feature (37)..(37): n is a, c, g, or t
  misc_feature (384)..(384): n is a, c, g, or t
  misc_feature (386)..(386): n is a, c, g, or t
ttgaaactgggcancctaacaaaatcaaacccctttntcctcaaacccccaatccgaatgaatgggaaccccactcaattccctttgaaattcccaactaaatgtcctcgggctccctcccaccctgtaagcaagatggtgtcggtgtcccagaaaacttccacggctgccccggatcagctgatccttgtttctctgggttgggttgtccaatgatgtgttgcacaatgtggtcttcaccctgtgtgatgctgacattctgataaaacctcttcctttctgtcggcgggcgtaagcccgggctggagacgggatggttggccccggactcatagaagcgctggggccacccgccggccgattcaggagacggcgtcccccgtncncgcagcggaggcagctcctccacatcgcgcccgagggtctgggaagatcgagacgcgaaacctggagcaggaaacacagaggat

SEQ ID NO: 352562 - DNA, 1718 bp, Homo Sapiens
  misc_feature (505)..(515): n is a, c, g, or t
  misc_feature (796)..(796): n is a, c, g, or t
  misc_feature (798)..(798): n is a, c, g, or t
  misc_feature (864)..(864): n is a, c, g, or t
  misc_feature (886)..(886): n is a, c, g, or t
  misc_feature (954)..(954): n is a, c, g, or t
  misc_feature (963)..(963): n is a, c, g, or t
  misc_feature (994)..(994): n is a, c, g, or t
  misc_feature (1015)..(1015): n is a, c, g, or t
  misc_feature (1043)..(1043): n is a, c, g, or t
  misc_feature (1051)..(1051): n is a, c, g, or t
  misc_feature (1058)..(1058): n is a, c, g, or t
  misc_feature (1064)..(1064): n is a, c, g, or t
  misc_feature (1076)..(1076): n is a, c, g, or t
  misc_feature (1090)..(1090): n is a, c, g, or t
  misc_feature (1113)..(1113): n is a, c, g, or t
  misc_feature (1178)..(1179): n is a, c, g, or t
  misc_feature (1185)..(1185): n is a, c, g, or t
  misc_feature (1578)..(1580): n is a, c, g, or t
  misc_feature (1582)..(1582): n is a, c, g, or t
  misc_feature (1589)..(1589): n is a, c, g, or t
  misc_feature (1591)..(1593): n is a, c, g, or t
  misc_feature (1602)..(1602): n is a, c, g, or t
  misc_feature (1604)..(1604): n is a, c, g, or t
  misc_feature (1606)..(1606): n is a, c, g, or t
  misc_feature (1689)..(1689): n is a, c, g, or t
  misc_feature (1704)..(1704): n is a, c, g, or t
cctctaccgcctggggaacggaggccccaagcctgggagtcggtttccctaaaagtgtggaaagacatcccttgctaagcccctaaagggcccttaagcaggcctcccctcccctgtggcaaattttttaagggtcctgaagcctaaataagggcccttggcttgccccccccaatcccagttctcaatcccccttttgaaaatgccccctgccaaggaccttggaaggccaaagggtagctcccgggggcgtgggccccttctcctcaaagcgggtttagcccttttggggtcagcttcaccagattcctggaagaagccctgccttcaaatcccccaagtgtgggtcccttgggtcccgaaaaaagcctgctcgcgtgggcaaaggccccgaggcgtcgagtgcgccttccaggccagtgcggaagctccctgccctcctccttcctccccacttctgcctcctcctcccccagtgttcacttgaagcaaattctagtgggcnnnnnnnnnnncaatactgtttcaaaacagttgttacagcaaataactgcagacgggtctgctggacgcggtggagaggggctggcagctgcccagcacaggcgcctggccgctgggcagctcccgcaataccaaaataagctcccgagttcccctggaagacttgggccgccgggagctcaggctggcgatctgctcagaggaaacccccctactttccttttttactcttcctgctgtccagagctaacaaatgtttttaatttcagaggaacatggtgtggggatctgnanacttgccttccactgggggagagggccagcgaggggaacagagggggaggaaaaggagaggggatnaatagaccccgagggtcagtgnttgatggctggaggggcccaaggtctctggaagttccctgccagcttttgcagggtgtaggcggggcntgcaaagtngaggcttaggcactgtgggacaaccccagtnggggccctaggaactagtgcncagggagtgggccattgaaccccgcacnctttgatncccctcntcccangcacggatcttnggagtacactttcncatggggcactgggcatacaacncactcccaagattttgcccctcgtggcgctgggggagacagattaaccccccgccccatcataanntctatntgcttcttttacacctagtcaggccggctcacatcaccctttaacgcacactatattcacacacacacttgtgcacagtcttgaatgtgtgcccacacatctgcctgcacacactcatgtgcccacatgtgaatcacttggaagtgtacacaaaaccaaacccacagcacagatgggcagacaggtgagcctcgtgcagcatgtgacactcccacatgcacaagacatgtgtgcagaggcatatcacacacgcagaagcactcccgagaactgccttctcccttccagcctaggggcccctgttcccccacaaccgggcccagccctggagccccctccagcactcctctcccacccccacgctccccaagagcagcagatgtaggtctcccnnntnccaaacntnnnagatgcagntntntctgaaatcatcatataaataatcattttttaatacaagggggtgggggtgtcaggcaagttccatgaaattgtgaattagcnctgctccaaataaanacctgttcgcccga

SEQ ID NO: 352563 - DNA, 1391 bp, Homo Sapiens
  misc_feature (638)..(646): n is a, c, g, or t
  misc_feature (1227)..(1248): n is a, c, g, or t
  misc_feature (1262)..(1276): n is a, c, g, or t
cataatcaaagtttatgattaaatgtaaggaagtggtatctagtcagtccataaagattgtgctaatttttttgtggaaaagtagccattagttcaggaaactcagtgctgccttcagatgtcattgatgtttctcctgttggaaagctgatgtgtccagctcaacctttgtgctgacatcataccatttctgatcatgaaatattggctactggtgtatgtagcagttcttaaatcagcagtattatgaaaaaaaattccccctcattagaatgtttaagaaatctttttaaaaagtaaaattctgtcagactacaaatgtttagctgttactcatttctagggaagaaattctaaatccctccttcactttgagcagtgttctaattggataaatgaaggagagtagttttattctgaaggtgattaaatttagactatgtagtatgtgacagaatttttttaaaattataaaaagattttatttagtaattgggatttacttaaaataattttggaataatgctcccagacttgcccagatttgtgtattgtacttattgccactggccgccactttgacttattttctctaatagtttatttgccacagtctttattttgaatatgctcctagnnnnnnnnnagggtgctgttcattatgaaggcttctttatagagggcctaataagaatccctttttataaagcctgtgcatttaggtaggttgaagctaggaggattttctttagaatgctcttttgcatgtaaagcacaaagtatgtttcagtttaaatgcacttcttccggtctaatttttatggggaagacaagtgagtcacaaacattctgttgaagggaaatctagtcagttgcttgaaagagcacagcccaaataaaacaaggactgactaggtgtaatgaaataacctgtgatttaaaagaagagctgcagctttgacagtgcttatttaaagaaaaatactgctggaaaatttccaatttctactacgttcaccatctctagtaagatctgacatatgctgaagttatgttttgatttggcacacagcatgttcaatgatggttactcgcctagtacaagacatggagaagaaacctttggacacagagcagatgacacctccttctgttttgtagtgtatcctggtgtcattttctgtgaatgtggtcaggtagagttgtttttgttgttgttgttgggcnnnnnnnnnnnnnnnnnnnnnnggtctcttttggtnnnnnnnnnnnnnnncctaaagccataggaagaaaaatgtgatgtatgtgtccagtatgtactattttgtttttgttttgcaagaaaagttgaactatttttgataacaagagtaaatggtggaaaatga

SEQ ID NO: 352564 - DNA, 2433 bp, Homo Sapiens
tcccttaggcgccacggacagccgagcgttacctggtcccgggcagcggagttctttacccaccccagttctggttctgacgccctagctcattccgcaaatttagggcttgggtctggcttgttcccctccggctcgaaccacctcttctctgagccgagccagctaccggggctcctggaattgccacccctccctgggcacccttgaggcctccgtggagggacgtcacggggcagagcgggacgtgagcctgagtttgctgcaggcgtgctctgtgtggtggctgggttctgccaatccccgtgcccaccgggtgggcgcggccgggaagctcctgcccctccctgctggtcggcgtcacgcgtgacgtcccgcgtgatggctgggagggcccggcggcgacagcggaggcagagaggaaggcggttctgagagcttcagagagcgatggaaagcaaaatgggtgaattgcctttagacatcaacatccaggaacctcgctgggaccaaagtactttcctgggcagagcccggcactttttcactgttactgatcctcgaaatctgctgctgtccggggcacagctggaagcttctcggaacatcgtgcagaactacagggccggcgtggtgaccccagggatcaccgaggaccagctgtggagggccaagtatgtgtatgactccgccttccatccggacacaggggagaaggtggtcctgattggccgcatgtcagcccaggtgcccatgaacatgaccatcactggctgcatgctcacattctacaggaagaccccaaccgtggtgttctggcagtgggtgaatcagtccttcaatgccattgttaactactccaaccgcagtggtgacactcccatcactgtgaggcagctggggacagcctatgtgagtgccaccactggagctgtggccacggccctgggactcaaatccctcaccaagcacctgccccccttggtcggcagatttgtgccctttgcagcagtggcagctgccaactgcatcaacatccccctgatgaggcagagagagctgcaggtgggcatcccggtggctgatgaggcaggtcagaggcttggctactcggtgactgcagccaagcagggaatcttccaggtggtgatttcaagaatctgcatggccattcctggccatggccatcccaccactgatcatggacactctggagaagaaagacttcctgaagcgccgcccctggctgggggcacccctgcaggtgggactggtgggcttctgcctggtatttgcaacccccctgtgctgtgccctattcccccagaagagctccatacacataagcaacctggaaccagagctgagagctcagatccatgagcaaaaccccagcgttgaagtggtctactacaacaaggggctttgaggagggtcagcctctgtcccctccctcacttccttgggctgctgctttagtggagtcatgtcacccctaccacttggctatctgcctagcactgggcaggggccttggtgggcagatggcaattgagggtagcaacctattagggtgggggagggacctccataaggcttttcctcccttctctggtttcaaagatcagagcacataacccctcctgtgcttgagtgtccatgcatatacatacatgatacacatgtgtatgtgtacattgggtcctgaaagctagaagcaggcatgctagcctagtatgttctgacatctggcttcccttctcagcctcatgtccacctgcctgccagccaggctacaggtgtgacttccttctctaaactgttacaccagccaagttatttttgatggcacctcatcccttctagaaataggaggagccccaggatctcaggacagagacttatagacactagtaggacaaagcgggctgaatccttcaggtttctgatacctagctccccaagctgactgggctggcagaggagaacatgttgagacaagggaggcaggggacttatgcatccctcagtgccatcccttgtatcctggaatagctccatttcccctcctcctctctaccagacaaaggagtgcctggtgtcctgaactgccctcgctgtctcccccaccaccctactttgacagcgtgggcatcttcagcaacaagccttgggagttcctggtgtgctctgacatcatgacctcaaatctaaatcctccaatcccaactccctttcccaaacaaaaagccacagaggcagagcaagcattcccctttaagagcttccactgcaccccctcccaagggacacagcggtaggaatggtgcttaaactccacaggtatcagagagggtgtaactaggacatcctcaagggcagctaggccccgaatgtacaatgttaagacagggaattttgtgttccattgac

SEQ ID NO: 352565 - DNA, 758 bp, Homo Sapiens
agcaaaatgggtgaacgcctttagacatcaacatccaggaacctcgctgggaccaaagtactttcctgggcagagcccggcactttttcactgttactgatcctcgaaatctgctgctgtccggggcacagctggaagcttctcggaacatcgtgcagaactacagggccggcgtggtgaccccagggatcaccgaggaccagctgtggagggccaagtatgtgtatgactccgaccttccatccggacacaggggagaaggtggtcctgattggccgcatgtcagcccaggtgcccatgaacatgaccatcactggctgcatgctcacattctacaggaagaccccaaccgtggtgttctggcagtgggtgaatcagtccttcaatgccattgttaactactccaaccgcagttggtgacactcccatcactgtgaggcagctggggacaagcctatgtgagtgccacacactggagctgtggccacggccctgggactcaaatccctcaccaagagtccctcaacagcccatggcccttagggcccacttgaacaagcaaccttcctccccagcaactgccccccttggtcggcagaatatgtgcccatttgcaagcagtggcagctgccaactgcatcaacgatccccctgatgaggcagagagagctgcagggtgggcatacccggtggctggtgaggcaggtcagaggctggctactcggtgacctgcagccaagcaggaatcttccaggtgg

SEQ ID NO: 352566 - DNA, 823 bp, Homo Sapiens; identical to SEQ ID NO: 255261

SEQ ID NO: 352567 - DNA, 2435 bp, Homo Sapiens
  misc_feature (1402)..(1415): n is a, c, g, or t
  misc_feature (1488)..(1497): n is a, c, g, or t
  misc_feature (1718)..(1726): n is a, c, g, or t
  misc_feature (1846)..(1846): n is a, c, g, or t
  misc_feature (1911)..(1911): n is a, c, g, or t
  misc_feature (2011)..(2011): n is a, c, g, or t
  misc_feature (2033)..(2033): n is a, c, g, or t
  misc_feature (2083)..(2083): n is a, c, g, or t
  misc_feature (2144)..(2144): n is a, c, g, or t
  misc_feature (2149)..(2149): n is a, c, g, or t
  misc_feature (2176)..(2176): n is a, c, g, or t
  misc_feature (2218)..(2218): n is a, c, g, or t
  misc_feature (2272)..(2272): n is a, c, g, or t
  misc_feature (2348)..(2348): n is a, c, g, or t
cggagcccagagccggttcggcgcgtcgactgcccagagtccgcggccggggcgcgggaggagccaagccgccatggcctaccacagcttcctggtggagcccatcagctgccacgcctggaacaaggaccgcacccagattgccatctgccccaacaaccatgaggtgcatatctatgaaaagagcggtgccaaatggaccaaggtgcacgagctcaaggagcacaacgggcaggtgacaggcatcgactgggcccccgagagtaaccgtattgtgacctgcggcacagaccgcaacgcctacgtgtggacgctgaagggccgcacatggaagcccacgctggtcatcctgcggatcaaccgggctgcccgctgcgtgcgctgggcccccaacgagaacaagtttgctgtgggcagcggctctcgtgtgatctccatctgttatttcgagcaggagaatgactggtgggtttgcaagcacatcaagaagcccatccgctccaccgtcctcagcctggactggcaccccaacaatgtgctgctggctgccggctcctgtgacttcaagtgtcggatcttttcagcctacatcaaggaggtggaggaacggccggcacccaccccgtggggctccaagatgccctttggggaactgatgttcgaatccagcagtagctgcggctgggtacatggcgtctgtttctcagccagcgggagccgcgtggcctgggtaagccacgacagcaccgtctgcctggctgatgccgacaagaagatggccgtcgcgactctggcctctgaaacactaccactgctggcgctgaccttcatcacagacaacagcctggtggcagcgggccacgactgcttcccggtgctgttcacctatgacgccgccgcggggatgctgagcttcggcgggcggctggacgttcctaagcagagctcgcagcgtggcttgacggcccgcgagcgcttccagaacctggacaagaaggcgagctccgagggtggcacggctgcgggcgcgggcctagactcgctgcacaagaacagcgtcagccagatctcggtgctcagcggcggcaaggccaagtgctcgcagttctgcaccactggcatggatggcggcatgagtatctgggatgtgaagagcttggagtcagccttgaaggacctcaagatcaaatgacctgtgaggaatatgttgccttcatcctagctgctggggaagcggggagaggggtcagggaggctaatggttgctttgctgaatgtttctggggtaccaatacgagttcccataggggctgctccctcaaaaagggaggggacagatggggagcttttcttacctattcaaggaatacgtgcctttttcttaaatgctttcatttattgnnnnnnnnnnnnnntgcccccaaagcactatgctggtcatgaactgcttcaaaatgtggaggtaataaaatgcaactgtgtataagnnnnnnnnnngcaaagacgaatcaaaccgtgtcgggccgccctccggcccctcgagaaacttttctagaaccatttcgtttatggagcgaggagccccaatttaggaaaagtgaaaaaatggctcattcaacctgtttttccctaaagaaaaatcccttgggcccatccaacttaacgcggccctcggggaatctccctccccccccacacaaagataacacggccccgcnnnnnnnnntataaccaccggatggccttgttatttgggtaaacacaaaatattctctacaaagataatgcggaaaatcctcacgcccgaaacgggcccaccatatctaaacctctgggcgaaatttcnctatatatttcacaaagcatgcggctgggggatgtctcccccacaccacaacccgtcgtaaaaangctttttcttgggcaatattactttcccaaaaaatatattattcacgaagtgcctccccctcgcgctcccctctccctggaggtcgcaaaatactatctngatatgtgtgcccatagaatanaaacaccatgatgaaacacgcgcgggaaaaactctctcgccacctcgttntaagagggacgatattttttggtcttgtcgtctagacgaaaaaaataaagtgggggtcatnaaacnctgaccaacgttgtctcgcggccactnacacccctgggccgcctatcttctctccttgttggaaataancctccctcttggtttattcttcatccaccgccgctgccgccgcggggtgctccncctcccctcatcgttctacacacctccttctgtgtggaccagcggccactacctctgagggcggccgtttgcttcnaacgaggtctgttgttttgtgcgcgcccctccccggtcgggtagaggagaaaaaatacagacgcctggtggagtgggcggcccatag

SEQ ID NO: 352568 - DNA, 1056 bp, Homo Sapiens
  misc_feature (1013)..(1013): n is a, c, g, or t
gcccgccccccgcccacgaggaagtggctgctgctccggcgcggagcccagagccggttcggcgcgtcgactgcccagagtccgcggccggggcgcgggaggagccaagccgccatggcctaccacagcttcctggtggagcccatcagctgccacgcctggaacaaggaccgcacccagattgccatctgccccaacaaccatgaggtgcatatctatgaaaagagcggtgccaaatggaccaaggtgcacgagctcaaggagcacaacgggcaggtgacaggcatcgactgggcccccgagagtaaccgtattgtgacctgcggcacagaccgcaacgcctacgtgtggacgctgaagggccgcacatggaagcccacgctggtcatcctgcggatcaaccgggctgcccgctgcgtgcgctgggcccccaacgagaacaagtttgctgtgggcagcggctctcgtgtgatctccatctgttatttcgagcaggagaatgactggtgggtttgcaagcacatcaagaagcccatccgctccaccgtcctcagcctggactggcaccccaacaatgtgctgctggctgccggctcctgtgacttcaagtgtcggatcttttcagcctacatcaaggaggtggaggaacggccggcacccaccccgtggggctccaagatgccctttggggaactgatgttcgaatccagcagtagctgcggctgggtacatggcgtctgtttctcagccagcgggagccgcgtggcctgggtaagccacgacagcaccgtctgcctggctgatgccgacaagaagatggccgtcgcgactctggcctctgaaacactaccactgctggcgctgaccttcatcacagacaacagcctggtggcagcgggccacgactgcctttcccggtgctgtttcactatgacagcccgccccccggggaatgctggaccctcccggcggggccgggctgggaacgttcctaagcaaaaactttcgcaaanccgtggcctttgaaccggccccggcgaacggctttccacgaaa

SEQ ID NO: 352569 - DNA, 1251 bp, Homo Sapiens
  misc_feature (19)..(19): n is a, c, g, or t
  misc_feature (74)..(74): n is a, c, g, or t
  misc_feature (239)..(262): n is a, c, g, or t
  misc_feature (264)..(387): n is a, c, g, or t
  misc_feature (404)..(530): n is a, c, g, or t
caaaggcccacaggcatgnctgtgactctctttcattaaggtcttgaagtcaggctgccccctcccaaaccccnaattctctccccaccccctcaccccacccggggctcactcagcctggcagaggaagaaggaaggcagacatctccgcagccactcctgggccttttatgtgccgagttaccccacttgccttgggcgtgtccactgagccttccccagccagtcttgttctcaannnnnnnnnnnnnnnnnnnnnnnngnnnnnnnnnnnnnnnnnnnnnnnnnnnnnnnnnnnnnnnnnnnnnnnnnnnnnnnnnnnnnnnnnnnnnnnnnnnnnnnnnnnnnnnnnnnnnnnnnnnnnnnnnnnnnnnnnnnnnnnnnnnngtgcatgccaccatggnnnnnnnnnnnnnnnnnnnnnnnnnnnnnnnnnnnnnnnnnnnnnnnnnnnnnnnnnnnnnnnnnnnnnnnnnnnnnnnnnnnnnnnnnnnnnnnnnnnnnnnnnnnnnnnnnnnnnnnnnnnnnnnaatcgtgcccagccttgtacttaattttgtatcatccagtcatcgctaatattacacgcaccttctcacttaatcctcacgacaagcctgtgaggcagatgctcattgttcccatcttgatgaaacttgagtctcagggaagtgaagtgacttgcccagggtcactcaggtagagttgagattcaaacccacatgtggctccaaagtctgcatctggatttgggggtgttttttggcatggcaccctcacctctctccctgcctgttttccccaaagtggaaaggaaggcctttcaaaccagagtgtctcactcccctctgacctccagaccagatggggcatgagccagccagctcagccaggctccctgtgtcctgggaggaagtgtccccatcccccatgccccttatggggagggagggcgtctgatgctctctctctgcctcccccccatcctgtcaggcacaggtgacgggggcagcccatgcgagcccttctcctgctgctctgggagggccagttccacattgagccagcctggtcccatggaaaatgatggcctgggctttctgaggccttatctgatgcctctgcagttcatgtcccccaccaggcctcgaggctcagggtgggagagggccccgggctgccctgtcactcctctaacacttccctcccctgtccccaacatgccctgtaataaaattagagaagactaac

SEQ ID NO: 352570 - DNA, 2423 bp, Homo Sapiens
  misc_feature (953)..(953): n is a, c, g, or t
  misc_feature (1931)..(2054): n is a, c, g, or t
  misc_feature (2077)..(2101): n is a, c, g, or t
  misc_feature (2114)..(2195): n is a, c, g, or t
  misc_feature (2202)..(2261): n is a, c, g, or t
  misc_feature (2296)..(2305): n is a, c, g, or t
gcagaaccccgggtcatctcatgtcagaaacctttaatccaggcctaaatttgcatagacctgacattcagctgccttgcagttgcttcctcccatgagccaaggtggtgtcagagggcaactggatgactcgcagtaccacagcactgggacagacagaagccacacctttcttttgggtttttgccaagcctcctccatctcccatcagtgctgtgggctggctgcaagcttcgaaacagttctcctggaagggaggtttttgctttacccccgccagcacttccgcacacaatcatagagaacctctctgctctctgctggcctacagcttgtctgtttctcaagcagaggcaggaagagctagtcttagcatttatattttaatagaaagttgactcccagcatgtaaaagtgatccacggcagccggagtgtatgccgggagctaagtggtctatgggtgaacatatcccaccttgcttcctgagtccttggtcccaatcttctcatttgttcctctcgttttaaattttttccccccaactcttttgatgtaagagttcagtttgtcttcgggagtgggtctctgcaagggctctgggatgagtcttggcttccaagaggacaggctattaggttcttggacttttttctgtgctaccgctgctgcttggtggaagtaacaggacgtggattctgcctcataagtggcagtttcccttttctctctgacttgtcctaggccgatttctctatggcttccctgagaaaggtgaggcccaaaggagagaggccttcaaactgtcccaggtcctgcgcagctcagtgcgtatcttcttgcttccatgtgtcttttcccctgcctgcctcactccccacccccacttgccaggtgtttgagccatttctacaccaaagcaaagtacggcctcaggagggagtaaaaagggntgccatcttgtgtctggaggggcagctgtgttcatgccctgtgctactggacatttcacaattctggcaccttgcgattggtcagtcaacctcagaaagtaactatcttgaaggtttgaaaaacaaccaaagaaagggagtgaggactatggctgcatgtcctctgcttgcccggctgcagagcagagatgtgcagccctctggtcagctggtccaggctggtccccgccggtccccttccagtccagccaccaagagtccacttgtcccgggcttccacctggctgacaggaagaatttctgagagctggatgtgcatgccctgtggacgaaggtacagctcgcctgcctgccccaatcccagccccgacaatcacatgcagctgactcggacactggccttgggaacaatgttcgagagaacacttgccccttgactgtaggagccagaaggggacccaggtgtgcatagctctctgtagacatttttacccaaacctgttggtaaagtgcccatctggtgctcaagagagcctgggggtctaacagggagcccggctgcctcacctggccacagcctccacaccagatctccacattgtcttgatccagaccagctctgtgatcagaaggaaattgggtccagtgtaggagcgagctggtcctgggcctggcaggcaagagtgtgggcatcctttcctggcctttctccactctccctcaagcctgtgctcaggttgccttgaatgtggactctggaagagccaggggcccagaatgccgggggaggcttctgggtggcactcatggaacaccgtccctctgccagccataggccctgcctccagtgtcagggaatggaggctgggctgcgagagtgttgctgccccctgtgtcgttcttctaatccaatgtagaaattgtacgtaatgtatttaaatcaacgcaaatgtatgaataacaaatacagttctgacnnnnnnnnnnnnnnnnnnnnnnnnnnnnnnnnnnnnnnnnnnnnnnnnnnnnnnnnnnnnnnnnnnnnnnnnnnnnnnnnnnnnnnnnnnnnnnnnnnnnnnnnnnnnnnnnnnnnnnnnnnnnttttgcggccccccccgcccccnnnnnnnnnnnnnnnnnnnnnnnnnggggccggggccnnnnnnnnnnnnnnnnnnnnnnnnnnnnnnnnnnnnnnnnnnnnnnnnnnnnnnnnnnnnnnnnnnnnnnnnnnnnnnnnnncccccgnnnnnnnnnnnnnnnnnnnnnnnnnnnnnnnnnnnnnnnnnnnnnnnnnnnnnnnnnnnncaaaggggatccaaggggattccaaattaaattannnnnnnnnntggccttttttgggaaagggggggaatttattaagacttcgggcgaagtggaaacccctccaaacgggtgtgaaaaacctgaatacccccggggattacaacccctgggccgccttgg

SEQ ID NO: 352571 - DNA, 795 bp, Homo Sapiens
  misc_feature (239)..(250): n is a, c, g, or t
  misc_feature (252)..(514): n is a, c, g, or t
tttcagcacacgtaattgctttccctctcttcttgtgattaggtgtaaacctctatttaactcaagtcctagattagaatgtcctttgtcctgatgtttgcagtaattgcttccttggttaataaagatatttttgaaatatactctggactgttggtgaaagaggcaggcatggctttactggtactagtttggcactgaactgtttgggtgcccatgaggtaggcagaccttatgcnnnnnnnnnnnngnnnnnnnnnnnnnnnnnnnnnnnnnnnnnnnnnnnnnnnnnnnnnnnnnnnnnnnnnnnnnnnnnnnnnnnnnnnnnnnnnnnnnnnnnnnnnnnnnnnnnnnnnnnnnnnnnnnnnnnnnnnnnnnnnnnnnnnnnnnnnnnnnnnnnnnnnnnnnnnnnnnnnnnnnnnnnnnnnnnnnnnnnnnnnnnnnnnnnnnnnnnnnnnnnnnnnnnnnnnnnnnnnnnnnnnnnnnnnnnnnnnnnnnnnnnnnnnnnnnnnnnatgagctaccgtgcctggcctaaaccttacgctttttgaggttgagtgcaggcctgtgataactaagcgctacttttgacgagccttcaacaagctgcccagtcctctcctcagcagacgcttcaggttgtagttgcatctttacaggggtcttccttttattaaatctatagcaggaatatagatttgattcaactttttagttacgtctctcaagaatcctaatcaatttcagttagcctcttaaggaaagggaaaaaaatggtgctgccgtcattcca

SEQ ID NO: 352572 - DNA, 823 bp, Homo Sapiens
ccatactcaggacttgtgcgcacgagcttgaacttcttctgggcagtcttgggggcttcttcatccgagttttcccctgttggaccgagcacgagcagcttttcttctccttttgagtccggccgtgtcgttgtgcctttgcctggaaaagctgtcatagtcacttgactcaatgcggtttctccttgagatcagcctcaaaacgggccaggtctgtgtccagccgccgaatgtgtttgtccaccatctcataggtctgcatggcaagctgcaccttgtcgtcaccaaattccttgcacttgccataggcttcctggatctgtttgagaagggccaatttttcctcggagctcaggctgcgggcactactcatatactcagtggccaacttgtcaatttcagccttcaggtcattcggcaggcagttctcagggaactatgtccagggtttttgatgatgttcaccttttcatgtgtaaactcagagtaacttaagacacagcttcatgtatctcaaaaccagtctgttacatccttgaacatggctacatagaatgaagacaagactacagatccttcagtgggtatgggaatagctccaacagacatctttgaagaaaccaagtgaatgccccaatgcagccaaatttgctcaatgttccaggctggagatggtatctaatgcttcctctgttctttggtctaggtccctcatgagctgaaagtttctctgtaattcaaagggaaggttttcaatactgtccagataatgttccaaatacatccccgcagccatctcgaagcaaacaaagcaacttccgat

SEQ ID NO: 352573 - DNA, 1434 bp, Homo Sapiens
atcaggccaaatcggccgagctcgaattcgtcgagagcggccggggcggatcggaagttgctttgttttgcttcgagatggctgcggggatgtatttggaacattatctggacagtattgaaaaccttccctttgaattacagagaaactttcagctcatgagggacctagaccaaagaacagaggacctgaaggctgaaattgacaagttggccactgagtatatgagtagtgcccgcagcctgagctccgaggaaaaattggcccttctcaaacagatccaggaagcctatggcaagtgcaaggaatttggtgacgacaaggtgcagcttgccatgcagacctatgagatggtggacaaacacattcggcggctggacacagacctggcccgttttgaggctgatctcaaggagaaacagattgagtcaagtgactatgacagctcttccagcaaaggcaaaaagagccggactcaaaaggagaagaaagctgctcgtgctcgttccaaagggaaaaactcggatgaagaagcccccaagactgcccagaagaagttaaagctcgtgcgcacaagtcctgagtatgggatgccctcagtgacctttggcagtgtccacccctctgatgtgttggatatgcctgtggatcccaacgaacccacctattgcctttgtcaccaggtctcctatggagagatgattggctgtgacaaccctgattgttccattgagtggttccattttgcctgtgtggggctgacaaccaagcctcgggggaaatggttttgcccacgctgctcccaagaacggaagaagaaatagataagggccttggattccaacacagtttcttccacatcccctgacttgggctagtgggcagaggaatgcctgtgctggggccaggggttcagggaggagtggatggcacagtgctgtcatcccttctcctcccctctccccactcccggtgctgaggctgcatcagaccctggtagggaggggtgccgcagccactaacggtatgtgctctccttcagccctctcccttcggagggacgtggtcttgcccactgtccttttgcctccatgctgaggtcggtgctgtatttcagagggagggtccttttcattctccttgctttgtatttaaggactggggcatagcatgggggcagtcccccagacctcttcattccccctcctgtggtgagggctaggtgtgatcaacacttttcttctccattcccttcctgcttttttcatggtgggggatccaccaggtcatctaggctctggccctagttgaaggggcaccccttcctctgtgccaagaggattcatcctgggagagggggcaaggtggaatgcagataactcacatgtaaaaggaacttgggtaggtaaataaaagctatacatgttaaaaaaa

SEQ ID NO: 352574 - DNA, 1052 bp, Homo Sapiens
  misc_feature (970)..(1006): n is a, c, g, or t
aggtctgaccagcttcagcacgcgagtgggagaggggagaaaaggggatgaacagcacttgtgccatccattctgcgttgaaccctgggcccaagcacagcaatcctctgcccactagccccagtcagggatttggaagaaactgtgttggaatcccaggccttatctattcttttccgttcttgggagcagcgtgggcaaaccatttcccccgaggcttggttgtcagccccacacaggcaaaatggaaccactcaatggaacaatcagggttgtcacagccaatcatctctccataggagacctggtgacaaaggcaataggtgggttcgttgggatccacaggcatatccaacacatcagaggggtggacactgccaaaggtcactgagggcatcccatactcaggacttgtgcgcacgagctttaacttcttctgggcagtcttgggggcttcttcatccgagtttttccctttggaacgagcacgagcagctttcttctccttttgagtccggctctttttgcctttgctggaagagctgtcatagtcacttgactcaatctgtttctccttgagatcagcctcaaaacgggccaggtctgtgtccagccgccgaatgtgtttgtccaccatctcataggtctgcatggcaagctgcaccttgtcgtcaccaaattccttgcacttgccataggcttcctggatctgtttgagaagggccaatttttcctcggagctcaggctgcgggcactactcatatactcagtggccaacttgtcaatttcagccttcaggtcctctgttctttggtctaggtccctcatgagctgaaagtttctctgtaattcaaagggaaggttttcaatactgtccagataatgttccaaatacatccccgcagccatctcgaagcaaaacaaaagcccgctctcgacgaattcgagctcggccgatttggcctgatnnnnnnnnnnnnnnnnnnnnnnnnnnnnnnnnnnnnncgccgccaccgcgtaagcctgcggtcgcctatatgatctatcatct

SEQ ID NO: 352575 - DNA, 462 bp, Homo Sapiens
  misc_feature (26)..(26): n is a, c, g, or t
acccctgtaaaggaaagggttcccgnaaagcccaactaaaggtaatgtgctctcccttaaacccctactccccttcggaagggaacgtggtcttgccccaactgtcccttttgccctcccatgctgaaggtcggtgcctgtatttcaaaagggagggtcccttttcattctccttgcctttgtatttaaggactggggcatagcatgggggcagtcccccagacctcttcattccccctcctgtggtgagggctaggtgtgatcaacacttttcttctccattcccttcctgcttttttcatggtgggggatccaccaggtcatctaggctctggccctagttgaaggggcaccccttcctctgtgccaagaggattcatcctgggagagggggcaaggtggaatgcagataactcacatgtaaaaggaacttgggtaggtaaataaaagctatacatgttg

SEQ ID NO: 352576 - DNA, 681 bp, Homo Sapiens
aatggaaatcggacctatagttccaaaagttacaaagggctagaagggggtctgctaaatctaaatcatgcttccagcaggggacccactgatctcagcatgaagagacaattggcgactagctcaggatcctccagcagctcaaactccagaccccagctgagtccaactgaaatcaatgccgtgagacagcttgttgcaggatatcgagaatcagctgcatttttattgcgatctgcagatgaactggaaaatctcattttacaacagaactgagacagacgaccaccatattcactgaggtctaaatttgcagtttccactaatgacattttgatttcccaacagagatacttctggtcttactgcacagtcttttaagagaaatacttccattatgccacattgtccttgatccgtaagtgatgtgttaaggtgcttcaaaggaactctgacctctgaagtacttgagctactttagtatgtccagcctattgctttttgttttagtgtgtcaccataaatatcaggggcataaaaggctatctattcttaattcaaggataaaacagaagaagcttgtggtataaaacaatagttcaagatccagctgaaatattagtggaatttgctactgactcattggactgaaagctgaagtacctgcccgggcggccgctc

SEQ ID NO: 352577 - DNA, 1972 bp, Homo Sapiens
  misc_feature (53)..(89): n is a, c, g, or t
  misc_feature (1882)..(1882): n is a, c, g, or t
  misc_feature (1914)..(1914): n is a, c, g, or t
  misc_feature (1933)..(1933): n is a, c, g, or t
  misc_feature (1944)..(1944): n is a, c, g, or t
ccccacggagatagactcatataggcgacctggagctcacgcggtggcggcgnnnnnnnnnnnnnnnnnnnnnnnnnnnnnnnnnnnnnatcaggccaaatcggccgagctcgaattcgtcgagagcggggggttctcccgcgttgctggcacctgctggcgccgcggtctcgtagcgcatgggcctcctccgaggcgggctcccatgcgctcgggccatggcgcgcctgggcgctgtgcgctcccactactgcgccctgctgctggccgcggcgctggccgtctgcgccttctactacctcggctcagtgccgggagaccttctccagcgccaccaagaggctgaaggaggccctgcgcctggggctcccgccgcgccctcgccgcccgcgctggagctagcgcggggctccgtggcgccagcccccggcgcgaaggccaagagcttggagggcggcggtgccgggccggtggactaccacctgctgatgatgttcaccaaggcggagcacaatgccgcgctgcaggccaaggcccagcgtcgcgctgcgctcactgctgcgcctcgccaagttcgaggcgcacgaggtgcttaaccttcacttcgtgagcgaggaggccagccgcgaggtggccaagggcctgctgcgggagctcctgccgcccgccgctggcttcaagtgcaaggtcatcttccacgatgttgctgtgctgacggataagctcttccccatcgtggaggccatgcagaagcacttcagtgctggcttgggaacctactacagtgactccatcttcttcctctcggtcgccatgcatcagatcatgcccaaagagatcctgcagatcattcagctggacctagacctgaagtttaagaccaacatccgggagttgtttgaggaatttgacagtttcctgccaggcgccatcatcggcatagcccgggagatgcagccagtttacaggcacacattctggcagttccgccatgagaacccccagacccgggttgggggcccgcccccgaggggctgccgggcttcaacagcggggtgatgttgctgaacctggaggccatgcgccagtccccgctctacagccgcctgctggagccggcgcaggtgcagcagctggccgacaagtaccacttccgcggccacctcggggaccaggacttcttcaccatgatcggcatggagcaccccaagctcttccatgtgctggactgtaccccgaaccggcagctgtgcacctggtggagggaccatggctacagtgacgtcttcgaggcctatttcaggtgtgagggccacgtcaagatctaccacgggaactgcaacactcccatcccggaggactaggcgctccccgtgccttgcccccggggcctccagatctgggggaaggacagggttccttgggacagacccaagggcagtgtctgacccgctagagagacaccgcaggaaagtcctgtgattaaggtgctgagacctcctgccgggcaggtcactgtgctgaggccacccgccaaggactggcctgtgcactgctggtgcttgggaccttattcctccagggagcaggcgacacaaaggacacgcatgtccagtgggctgggaagcaagcacttgaagagaaggaaggggagaaagggtcccccttgctgtctgcctctgaggaattggaaatcctttagacccggccttttttggaccaatataaatttaatttaaattgacagccttccatttttcgagaaagtacaaacagaactgctttagcacccatcgagccccaaacgggtaaggtaagccaaggttttaatgaccagcccagtatctaagcttccaaacggatgccagcccatcacatactnaccctgggaggctgctgcacgggcattctccngatgctcacggcacttggngtaggtttcangatcgcctctttgaggaaggacttcagg

SEQ ID NO: 352578 - DNA, 941 bp, Homo Sapiens
tccgccacagaacggcatccctgccgagtacgccccgcccccaccgcaccccacgcaggactactccggccagaccccggtccccacagagcatggcatgaccctgtacacaccagcacagacccaccccgagcagccaggctccgaggccagcacacagcccatcgccgggacccagacagtgccgcagacagacgaggcggcacagacggacagccagccgctccacccctccgaccctacagagaagcagcagcccaagcggctacacgtctccaacatccccctccggttcagggaccccgacttgcggcaaatgttcgggcaattcggaaaaattttagacgtggagatcatttttaacgagcggggctccaagggttttgggtttgtaacttttgaaactagctcagatgctgaccgagcccgggagaagctgaatgggacgatcgtagagggacggaaaattgaggtcaataatgccacggcccgagtgatgaccaacaagaagacggggaacccctacaccaacggctggaagctaaatccagtggtcggcgcagtctacgggcctgaattctatgcagtgacggggttcccctaccccaccaccggcacagccgttgcctaccggggcgcacatcttcggggccggggccgggccgtgtataatacatttccggctgcgccacccccaccccccatcccgacttacggagcggtcgtgtatcaggatggattttatggtgctgagatttatggagctacgcagcctacagatacgctcagcccgctgcagcggcggcagcctacagcgacagttacggcagagtctacgcagctgccgacccgtaccatcacaccatcgggcccgcggcgacctacagcattggaaccatgtgaaaccttccaccgtttccttctcggaccatgaagggcaa

SEQ ID NO: 352579 - DNA, 1641 bp, Homo Sapiens
ggagaggagaacggctgtgagtgcaccaaggccgtgaactttgccatgcatgaacttcagctcatccgggtggagaagcagtaccttcaccacaacctcgaccacctggtcgaggagctcttccttggtgacattcacactgatgccacccagaggatgttctaccggccctccagttaccagccccctctgcagaatgccaagaaccacgaccatgcctgcatcgcctgtcggatcatctatcggtcagacgagcaccaccctcccatcctgcccccaaaggcagacctgaccatcggcctgcacggggagtgggtgagccagcgctgtgaggtgcgccccgaagtcctcttcctcacccgccacttcatcttccatgacaacaacaacacctgggagggccactactaccactactcagacccggtgtgcaagcaccccaccttctccatctacgcccggggccgctacagccgcggcgtcctctcgtccagggtcatgggaggcaccgagttcgtgttcaaagtgaatcacatgaaggtcacccccatggatgcggccacagcctcactgctcaacgtcttcaacgggaatgagtgcggggccgagggctcctggcaggtgggcatccagcaggatgtgacccacaccaatggctgcgtggccctgggcatcaaactacctcacacggagtacgagatcttcaaaatggaacaggatgcccgggggcgctatctgctgttcaacggtcagaggcccagcgacgggtccagcccagacaggccagagaagagagccacgtcctaccagatgcccttggtccagtgtgcctcctcttcgccgagggcagaggacctcgcagaagacagtggaagcagcctgtatggccgggcccctgggaggcacacctggtccctgctgctggctgcacttgcctgccttgtccctctgctgcattggaacatccgcagatagaagttttagaaagttctatttttccaaaccaggattccttactattgacagatttgctttaccaaaagaaaagacatttattcttttgatgcacttgaatgccagagaactgtccttctttttctcctctccctccctcccagcccctgagtcatgaacagcaaggagtgtttgaagtttctgctttgaactccgtccagcctgatccctggcctgagcaacttcacaacagtaattgcactttaagacagcctagagttctggacgagcgtgtttggtagcagggatgaaagctagggcctcttatttttttctcttaattattattatatttctgagttaaacttagaagaaacaactatcaagctacaacttttcctgccattttcctgtggttgcagcctgtcttcctttgaaattgttttactctctgagttttatatgctggaatccaatgcagagttggtttgggactgtgatcaagacaccttttattaataaagaagagacacaggtgtagatatgtatatacaaaaagatgtacggtctggccaaaccaccttcccagcctttatgcaaaaaaaggggagaatcaaagctttcatttcagaaatgttgcgtggaaaagtatctgtaattaaagtttcgaagtaatttaacctaaga

SEQ ID NO: 352580 - DNA, 481 bp, Homo Sapiens
aaaagttaatgtgaatactgaggaattttggtccctcagtgacctgtgttgttaattcattaatgcattctgagttcacagagcaaattaggagaatcatttccaaccattaatttactgcagtatggggagtaaatttataccaattcctctaactgtactgtaacacagcctgtaaagttagccatataaatgcaagggtatatcatatatacaaatcaggaatcaggtccgttcaccgaacttcaaattgatgtttactaatatttttgtgacagagtatgaaagaccctatagtgggtaaatttagatactattagcatattattaatttaatgtctttatcattggatcttttgcatgctttaatctggttaacatatttaaatttgctttttttctctttacctgaaggctctgtgtatagtatttcatgacatcgttgtacagtttaactatatcaataaaaagtttggacagt

SEQ ID NO: 352581 - DNA, 470 bp, Homo Sapiens
  misc_feature (12)..(12): n is a, c, g, or t
  misc_feature (398)..(398): n is a, c, g, or t
  misc_feature (436)..(436): n is a, c, g, or t
cgcatcgcaagnccttcaaccccatgctggggagaccttcgagctggaccgcctcgacgacatgggcctgcgctccctctgtgagcaggtgagccaccaccccccctcagctgcgcactacgtgttctccaagcatggctggagcctctggcaggagatcaccatctccagcaagttccggggaaaatacatctccatcatgccgctaggtgccatccacttagaattccagggccagtgggaatcactacgtgtgggaggaagagcacctcaactgttcacaacatcatcgtggggcaagctctgggatcgaccagtcagggggacattcgagattgtgaaccataagaccaatgaccggtgccagttgaagtttcttgccctacagttaatttttncaaagagggcagcccggaaggttgacagggattggttnagtgacagccagggcaaggccttttacgtgtttt

SEQ ID NO: 352582 - DNA, 1626 bp, Homo Sapiens
  misc_feature (74)..(93): n is a, c, g, or t
  misc_feature (215)..(260): n is a, c, g, or t
  misc_feature (1459)..(1510): n is a, c, g, or t
  misc_feature (1528)..(1573): n is a, c, g, or t
  misc_feature (1616)..(1616): n is a, c, g, or t
tccccggcctcgggcccgacgacgaccggcccggcgcccctcacagcaagacgcccgccatccgccaaaaccannnnnnnnnnnnnnnnnnnngccggcaccggcccggcaattttcgcaccactccttcaaggactgctttctccccggcattcgctcaccggccactcggacatccggctgcccccaacagagtttgcacagcttattaaaannnnnnnnnnnnnnnnnnnnnnnnnnnnnnnnnnnnnnnnnnnnnnagaataccaggaactgttcaggcacatgaaccaaggggatgcggggagtctggctcccagccttgggggacagagcatgacagagcgccaggctttatcttatcaaaatgctgactcttatcaccatcacaccagcccccagcatctgctacaaatcagggcacaagaatgtgtctcacaggcttcctcacccaccccgccccacgggtatgctcaccagccggcactgatgcattcagagagcatggaggaggactgctcgtgtgagggggccaaggatggcttccaagacagtaagagttcaagtacattgaccaaaggttgccatgacagccctctgctcttgagtaccggtggacctggggaccctgaatctttgctaggaactgtgagtcatgcccaagaattggggatacatccctatggtcatcagccaactgctgcattcagtaaaaataaggtgcccagcagagagcctgtcatagggaactgcatggatagaagttctccaggacaagcagtggagctgccggatcacaatgggctcgggtacccagcacgcccctccgtccatgagcaccacaggccccgggccctccagagacaccacacgatccagaacagcgacgatgcttatgtacagctggataacttgccaggaatgagtctcgtggctgggaaagcacttagctctgcccggatgtcggatgcagttctcagtcagtcttcgctcatgggcagccagcagtttcaggatggggaaaatgaggaatgtggggcaagcctgggaggtcatgagcacccagacctgagtgatggcagccagcatttaaactcctcttgctatccatctacgtgtattacagacattctgctcagctacaagcaccccgaagtctccttcagcatggagcaggcaggcgtgtaacaagaaacagagagttttgtgtacagcttgggaatgaaaaggttgattgtaaacccacagtatctagcagcgttgtgccaaattgcccttgtgtttctctccacccaaaatatcacagctgctttcctcacatttggttcatccgtgtgctgttcttttgggttctgagagggttttgccatgtttgcttgtatgaccaagtcaccaaggaaataaacaggaaggaaatccatgttctccatcttttgtgaaagtatatttgagttggtgnnnnnnnnnnnnnnnnnnnnnnnnnnnnnnnnnnnnnnnnnnnnnnnnnnnncttccagaggtgatatannnnnnnnnnnnnnnnnnnnnnnnnnnnnnnnnnnnnnnnnnnnnngaaacaggagagcaaagcagttagagttcagaggccagcggcncaggggccac

SEQ ID NO: 352583 - DNA, 762 bp, Homo Sapiens
  misc_feature (271)..(385): n is a, c, g, or t
  misc_feature (615)..(615): n is a, c, g, or t
ggagaaacagagagttttgtgtacagcttgggaatgaaaaggttgattgtaaacccacagtatctagcagcgttgtgccaaattgcccttgtgtttctctccacccaaaatatcacagctgctttcctcacatttggttcatccgtgtgctgttcttttgggttctgagagggttttgccatgtttgcttgtatgaccaagtcaccaaggaaataaacaggaaggaaatccatgttctccatcttttgtgaaagtatatttgagttggtgnnnnnnnnnnnnnnnnnnnnnnnnnnnnnnnnnnnnnnnnnnnnnnnnnnnnnnnnnnnnnnnnnnnnnnnnnnnnnnnnnnnnnnnnnnnnnnnnnnnnnnnnnnnnnnnnnnngaaacaggagagcaaagcagttagagttcagaggccagcggcctcagggccactccctccctagccttcatcagcagagcaccctccatccccctgcattgctcttctgtgaaagcaaatactaaaggatgccatcctctggaatcctaatggcaggcaaagggagagaggaagggtgacggcttctggcacttagaaaaccaaaagaaccaaaaaagagaaaccccccnagcctgggaacgccaaaggaggtcttttactgctggggatcccacggaaaaacatgttctggttcttaagccaaagaatcattatggaaaaaggttttgggcaaccggaaaggcttggaaaaaattgacccttggggccataaagaa

SEQ ID NO: 352584 - DNA, 805 bp, Homo Sapiens
  misc_feature (48)..(67): n is a, c, g, or t
ccaacagcagcacaggatgtattaagaattatatgaagtcaggtttgnnnnnnnnnnnnnnnnnnnncaaagcacagtactgttagctgtttttgtggacaggattcgattaagtattccctcttgtcaaactggaagctaggggaaaaagagggatttttatcctttactcttctagagtactgttaatgcccctttcccacagtcttttatataattaaatatatgtcaatacacattagaatcagatttgaaaaagttaaaacaatttcattgttgtaattgttccctttctgttttcatatagtgaataacctttaaagggttgttttgttttgttttgaattataggagttataatctttggagatgattgcatatctcattagatatgcaatataaatttatctgagtgaacaaagtgctaaataaatagatctacattttgtacatatttatataaaatttacctttaagtatttactttaaaaaatttaatggcttaactcgaacttgaagacacatacttcaactgtccttattgtccattaaactgataattttgatttttcttgcttttatagattttactatataggaatcaagatttaagaaattttgcattaaaaatagtgtaccaatgcttcatatacgttagttatttgctattatgtagggaagaggattgttatttcaaagatatattaaagaacagttgcatctgaatataatcatgatgcattcaatgaagttcatatccatgaattcactcctaatataccctaataaagtggttgaaactgca

SEQ ID NO: 352585 - DNA, 2010 bp, Homo Sapiens
ggagagtacctggatgctacaggtggaaccctgcacccctatcaaatggagggcctgaattggttgcgcttctcctgggctcagggcactgacaccatcttggctgatgagatgggccttgggaaaactgtacagacagcagtcttcctgtattccctttacaaggagggtcattccaaaggccccttcctagtgagcgcccctctttctaccatcatcaactgggagcgggagtttgaaatgtgggctccagacatgtatgtcgtaacctatgtgggtgacaaggacagccgtgccatcatccgagagaatgagttctcctttgaagacaatgccattcgtggtggcaagaaggcctcccgcatgaagaaagaggcatctgtgaaattccatgtgctgctgacatcctatgaattgatcaccattgacatggctattttgggctctattgattgggcctgcctcatcgtggatgaagcccatcggctgaagaacaatcagtctaagttcttccgggtattgaatggttactcactccagcacaagctgttgctgactgggacaccattacaaaacaatctggaagagttgtttcatctgctcaactttctcacccccgagaggttccacaatttggaaggttttttggaggagtttgctgacattgccaaggaggaccagataaaaaaactgcatgacatgctggggccgcacatgttgcggcggctcaaagccgatgtgttcaagaacatgccctccaagacagaactaattgtgcgtgtggagctgagccctatgcagaagaaatactacaagtacatcctcactcgaaattttgaagcactcaatgcccgaggtggtggcaaccaggtgtctctgctgaatgtggtgatggatcttaagaagtgctgcaaccatccatacctcttccctgtggctgcaatggaagctcctaagatgcctaatggcatgtatgatggcagtgccctaatcagagcatctgggaaattattgctgctgcagaaaatgctcaagaaccttaaggagggtgggcatcgtgtactcatcttttcccagatgaccaagatgctagacctgctagaggatttcttggaacatgaaggttataaatacgaacgcatcgatggtggaatcactgggaacatgcggcaagaggccattgaccgcttcaatgcaccgggtgctcagcagttctgcttcttgctttccactcgagctgggggccttggaatcaatctggccactgctgacacagttattatctatgactctgactggaacccccataatgacattcaggcctttagcagagctcaccggattgggcaaaataaaaaggtaatgatctaccggtttgtgacccgtgcgtcagtggaggagcgcatcacgcaggtggcaaagaagaaaatgatgctgacgcatctagtggtgcggcctgggctgggctccaagactggatctatgtccaaacaggagcttgatgatatcctcaaatttggcactgaggaactattcaaggatgaagccactgatggaggaggagacaacaaagagggagaagatagcagtgttatccactacgatgataaggccattgaacggctgctaaaccgtaaccagggatgagactgaagacacagaattgcagggcatgaattgaatatttgagctcattcaaagtggcccagtatgtggtacgggaaagaagaaatgggggaggaagaggaggtagaacgggaaatcattaaacaggaagaaaagtgtggatcctgactactgggagaaattgctgcggcaccattatgagcagccagcaagaagatctagccccgaaatctgggcaaaggaaaaagaatccgtaaacaggtcaactaccatgatggctcccaggaggaacgaaaatggcaggaccaccagtccgacaacaagtcccgattaatcagggcctttcaaaggaaaggggataaaactttgaatgaacgttcagaa

SEQ ID NO: 352586 - DNA, 529 bp, Homo Sapiens
atctacgaggcctccagcctctatggcatctcagccatggatggggttcccttcacactccacccacgatttgagggcaagagctgcagccccctggccttctctgcttttggggacctgaccatcaagtctctggcggacattgaggaggagtataactacggcttcgtggtggagaagaccgcggctgcccgcctgccccccagcgtctcatagtccctcacccttccgcggaaagagcccccttactccacctccccgccagcctggggccaccccccctcactgcatcctgggaaccttcgccctgcaaggcgtttgctatcttcagccactgggcggagctgcagccctggaggagggggcgggtcgaggctgcgtggtgatggggtctccgcccccacgccctgccgggcagggctggagctggacagaagccagtgcctttaagtcatttgtgtcaaaaccctctggggtccggaggctgtgcgggtgtcctcctggcaataaacactacccggttctcgca

SEQ ID NO: 352587 - DNA, 1373 bp, Homo Sapiens
  misc_feature (46)..(82): n is a, c, g, or t
tgcatctgactatagggcgactggagctcaccgcggtggcggccgnnnnnnnnnnnnnnnnnnnnnnnnnnnnnnnnnnnnnatcaggccaaatcggccgagctcgaattcgtcgagagcggggtcgcgagcgctgccgtcgggaggcgctccgaggttcgaggctgtgccccgcgaccccgccttcggcgctcggctcgcaggatggatcccgtacccgggacagactcggcgccgctggctggcctggcctggtcgtcggcctctgcacccccgccgcgggggttcagcgcgatctcctgcaccgtcgagggggcacccgccagctttggcaagagcttcgcgcagaaatctggctacttcctgtgccttagttctctgggcagcctagagaacccgcaggagaacgtggtggccgatatccagatcgtggtggacaagagccccctgccgctgggcttctcccccgtctgcgaccccatggattccaaggcctctgtgtccaagaagaaacgcatgtgtgtgaagctgttgcccctgggagccacggacacggctgtgtttgatgtccggctgagtgggaagaccaagacagtgcctggataccttcgaataggggacatgggcggctttgccatctggtgcaagaaggccaaggccccgaggccagtgcccaagccccgaggtctcagccgggacatgcagggcctctctctggatgcagccagccagccaagtaagggcggcctcctggagcggacagcgtcaaggctgggctctcgggcatccactctgcggaggaatgactccatctacgaggcctccagcctctatggcatctcagccatggatggggttcccttcacactccacccacgatttgagggcaagagctgcagccccctggccttctctgcttttggggacctgaccatcaagtctctggcggacattgaggaggagtataactacggcttcgtggtggagaagaccgcggctgcccgcctgccccccagcgtctcatagtccctcacccttccgcggaaagagcccccttactccacctccccgccagcctggggccaccccccctcactgcatcctggggccacccccactcactgcatcctgggaaccttcgccctgcaaggcgtttgctatcttcagccactgggcggagctgcagccctggaggagggggcgggtcgaggctgcgtggtgatggggtctccgcccccacgccctgccgggcagggctggagctggacagaagccagtgcctttaagtcatttgtgtcaaaaccctctggggtccggaggctgtgcgggtgtcctcctggcaataaacactacccggttctcgccaaaaaaaa

SEQ ID NO: 352588 - DNA, 1604 bp, Homo Sapiens
  misc_feature (257)..(357): n is a, c, g, or t
  misc_feature (675)..(686): n is a, c, g, or t
  misc_feature (1505)..(1505): n is a, c, g, or t
gctgggtggcgaattcggcacgaggctcggtttgctggtggcatcctcagtagctgggactacaggcaataaattcttttatacgtcgctttttaaacgtattgtgcctgtgaacaaatcttcaagttatacccaagatttcaaagctcatgatggtccatagtactcgctctttaaatcaatagctgcgtatcccacagatgatttcctttgggatgatttcccagaactggaattgcagattcttcacaatgcannnnnnnnnnnnnnnnnnnnnnnnnnnnnnnnnnnnnnnnnnnnnnnnnnnnnnnnnnnnnnnnnnnnnnnnnnnnnnnnnnnnnnnnnnnnnnnnnnnnngcgtcagccactgcgcgcggccacaaagctcccaacttttccgttaagcaccgagcttttttctagactagcagctgaggccggaaggaattctggggaacgtagtgcagacttgcagagaacgagtctcttggtcctgtgccgtagcatttccggcggaagttgctgggcgcggaaagccggcaagacctttttttccgccatcatcgctcacgcgcgcaaccctggcgacgcgtggtggcgaggctccgcctccccacgccattggccagcagctcctcgggcacgcgtatactgcgcttccgggcaatctccggnnnnnnnnnnnngcatggccttctgggagttgtagttcggtcgcgagcgctgccgtcgggaggcgctccgaggttcgaggctgtgccccgcgaccccgccttcggcgctcggctcgcaggatggatcccgtacccgggacagactcggcgccgctggctggcctggcctggtcgtcggcctctgcacccccgccgcgggggttcagcgcgatctcctgcaccgtcgagggggcacccgccagctttggcaagagcttcgcgcagaaatctggctacttcctgtgccttagttctctgggcagcctagagaacccgcaggagaacgtggtggccgatatccagatcgtggtggacaagagccccctgccgctgggcttctcccccgtctgcgaccccatggattccagctttgcacacgccgccttcctctgcctggggcactttttctctccctttttagagctaattctccgtcctccggcagatgtcaccttcacccgtccctacccctcctcgtctgggcccacaacccgtagcggcaggccttcccaggcccccgccgtgagacttttccccaccctttgtcttggtggatgttgttacttttccactccagggctataacttcgttttcccttccctaaaatcttgggtccaccgcggcgttttcttcctcgtctgcccgtgtcggttccaaaacgggggttttcgggcggccttgtttggccgcccagcagtgcggggctggtccgtggatggccggcgcgctcggcagtttcctctttctatgggctggcttatgcccctcccaccttcatatggccttacctnactacgcttcgcggcgtgcgccgggggtgcctattggggggcggcgggtgcgctcccgttctttctccctttgatccacctcgtcttcaactattactg

SEQ ID NO: 352589 - DNA, 523 bp, Homo Sapiens
  misc_feature (42)..(42): n is a, c, g, or t
  misc_feature (123)..(123): n is a, c, g, or t
  misc_feature (135)..(135): n is a, c, g, or t
  misc_feature (137)..(137): n is a, c, g, or t
  misc_feature (156)..(156): n is a, c, g, or t
ctatcaaaaaagtcttgcggcatgtaaagattgaaaacctanggaagaatgggggacagaatgacaggtgttgtttcccctggtttcaaaatttaaaagtgaacaaatttagtgcctaatggnaggatgaggaantnaacagttgtacacatggantttcctaattgatctaaccagaaaccgtgcagactccccatggtcttttggtattggcacctcagctcttgcttggaaatttcactgtactccctgggacaggatacggtgcttcccaggctcaccaaacagtgcttggaaaaaaatcagaattctgccaatgagaatatggatggcagttgaaaaacttgactttatttcccttactttaatgcatcacttgggcatctatcttcttgaagttcagagccagttacattttcaatcatgttcaatgaaagaggacaattctcctggactttcaccttctgctaggaaattaactccagatggtatacctgaaacagcaacatcagccagagttcac

SEQ ID NO: 352590 - DNA, 1083 bp, Homo Sapiens
  misc_feature (807)..(895): n is a, c, g, or t
gatccgctgggtccccgcgccgttgtcaagaccggggacctggacgcagcggagagaggtgccgccgcccgccccgtccagtcgccgcgcgcaggcactgcagtcagcggtgaactgacttcatcccaatccctcagcccccaccaggaccagtctggagtccctcccctgcccccattgaaatttcccttccgtccccaaacttacctctgatctagaccttactcacctccttcctgtttcctaagactccttcctgccgtccacagaccgagccttttatctttgtccaccctgtgccagacacctccttttccagaaccttctccttactggtgaccttacttatctctgttgctttctggggtcctaggaaatgccagcactcccacccacattgcctgaactttccaacactccctaactgcgctgtgtcctatctcaacactttctcatgtatttcttgtggcttctagaacattcccccgccattattacttcaatatggctacacatacttcctaattgccctggaaaccatctccttctcaccattgcccagcgatgctttcgtctcctccataaacactcccggagaccaatttttgtgtcacccccatactccctcgttgacacactgactccctacataacctccttgaaaaacctctttattaatctcaccatccttcagatttcccctctggcataattccatccctcctccaagtttttcctctcaagctctgccctttcccaggccaccccagcctacccaaacctcctctccttccccgggagaacaannnnnnnnnnnnnnnnnnnnnnnnnnnnnnnnnnnnnnnnnnnnnnnnnnnnnnnnnnnnnnnnnnnnnnnnnnnnnnnnnnnnnnnnnacaagtcccccgcgggggcccaggggaaatcgcccccaaaaagcccgaactgcgcccacaatggggggaaaccacacctttgggagagggccttcccaaccggggaccttcctgtgatgggaactaccttttttttccgcccaccccctctaaaaatccttttgacccaccccgcatatgggggctcg

SEQ ID NO: 352591 - DNA, 926 bp, Homo Sapiens
tggctgctcttcaccccaccgcagcccggcgctgccgtgaagtggtggtcaggacccggaatgacaacatgctggggtgacctggagacctacctggaggaagaggcaccccagcggctctgggctcactgccaggtgccccacttctcctggttccttgtggtttcccgccctgtgtccaatgcctgcctggctgccacctggagtgggacactgctgtgctcctcgcggtcatcctggggtcaaagtcatcttcccccctggggccactgaggagcctcgtcgagtctccatgcaggtggtgcgcatggctggccgagcagctgcaggccctcctgggagaaccagcaggctgcagtgagccccctgctgtgcctgtcacagcagcggtccccccagcttcctccaaccggtcaccgtgcagctgcctctgccctctggcatcacaggcctcagtctggaccgctcccgcctgcacctgttgtactgggcccctcctgcagccacctgggatgacatcacagctcaggtggtcctggagctcacccacctgtacgcacgcttccaggtactggctctggtacaccaccaagaactgtgtgggaggcctggctcggaaggcctgggagcggctgcggctgcaccgtgtgaacctcatcgctctgcagcggcgccgggaccctgagcaggtcctgctgcagtgcctgccccgaaacaaggtggacgccacccttcggcggctgctggagcggtaccggggccccgagcctctgacacggtggagatgttcgagggcgaagagttctttgcggccttcgagcgcgggcatcgacgtggattgctgaccggcctgactgttgtggagggcaaatctgcttgtcttctactcgcacctgaagaatgggaacggacgtgtccttctaacg

SEQ ID NO: 352592 - DNA, 1585 bp, Homo Sapiens
  misc_feature (19)..(19): n is a, c, g, or t
  misc_feature (808)..(808): n is a, c, g, or t
  misc_feature (810)..(810): n is a, c, g, or t
  misc_feature (816)..(816): n is a, c, g, or t
  misc_feature (821)..(821): n is a, c, g, or t
  misc_feature (836)..(836): n is a, c, g, or t
  misc_feature (869)..(869): n is a, c, g, or t
  misc_feature (877)..(877): n is a, c, g, or t
  misc_feature (879)..(879): n is a, c, g, or t
  misc_feature (881)..(882): n is a, c, g, or t
  misc_feature (893)..(893): n is a, c, g, or t
  misc_feature (910)..(910): n is a, c, g, or t
  misc_feature (935)..(935): n is a, c, g, or t
  misc_feature (970)..(970): n is a, c, g, or t
  misc_feature (976)..(976): n is a, c, g, or t
  misc_feature (988)..(989): n is a, c, g, or t
  misc_feature (995)..(995): n is a, c, g, or t
  misc_feature (1002)..(1002): n is a, c, g, or t
  misc_feature (1038)..(1038): n is a, c, g, or t
  misc_feature (1098)..(1099): n is a, c, g, or t
tcatcttcccccctggacncactgaggagcctcgtcgagtctccatgcaggtggtgcgcatggctggccgagagctgcaggccctcctgggagaaccagaggctgcagtgagccccctgctgtgcctgtcacagagcggtccccccagcttcctccaaccggtcaccgtgcagctgcctctgccctctggcatcacaggcctcagtctggaccgctcccgcctgcacctgttgtactgggcccctcctgcagccacctggggatgacatcacagcttcaggtggttcctggagcttcacccacctgttacgcacggcttccagggtcacacacttctcctggtactggctctggtacaccaccaagaactgtgtgggaggcctggctcggaaggcctgggagcggctgcggctgcaccgtgtgaacctcatcgctctgcagcggcgccgggaccctgagcaggtcctgctgcagtgcctgccccgaaacaaagtggacgccacccttcggcggctgctggacgcggtaccgggcccccgagccctctgacacggtggagatgttcgagggcgaagagttctttgcggccttcgagcgcggcatcgacgtggatgctgaccgccctgactgtgtggacgggcagaatctgctttgtcttctactcgcacctgaagaatgtgaaggaggtatacgtgaccaccactctggaccgggaggctcaggctgtgcggggccaggtgtccttctaccgtggcgcggtgcctgtgcgggtgcccgaggaggctgaggctgcccggcagaggaaggncncagacnccctntggatggccactctncccatacaagctgccggtgggactgaggaacancaaaggcncngnncagtaccgagncccaggggttaccaggntgacatggtggagttgggggtggancccagggcttaatgcactttttccttccaacaganacttcnaggttccgaggnnccaccncgggggncttgcctctccttgtcaccctttaatctgggacatnccgagaccggctttctgacgctagagcaacctgctgagtgtggctgggcgtctgggtctnnactggccagccgtggccctgcacctgggggtgtcctaccgggagttgcagcgcatccggcacgagttccgggatgatctggatgagcagatccgtcacatgctcttctcctgggctgagcgccaggctgggcagccaggggctgtggggctcctggtgcaggccctggagcagagtgaccggcaggacgtggctgaagaggtgcgcgcagtcttggagctcggccgccgcaagtaccaggacagcatccgacgcatgggcttggcccccaaggaccccgctctgcctggctcctcggctccacagcccccagagcctgcccagcctaggccccacagacttttaggctggcccagatattccccagtggatgcagagcccccaccttcaagtctctccagtgtgtggggacgggtccctgtgagcaacaaaactgcactgtctctatcacctcagagcttgatattatttgatggatgacaggggg

SEQ ID NO: 352593 - DNA, 1007 bp, Homo Sapiens
ggcctgggtgggcgttcatactcgagggccatttgcaaggggcttcccaaaaagatcgcggcacctgccgagcgggtcgccgcctctgccgcggtccttggaccccgccgccgccctggcctgggagcttgccccgccgcagcggccggcagcgcggcgctccgcgggcggcaggcacgggccccgggccccctcacggcgcccagccgcgggcctcccgaggcaaaagcccgtgggccgccgcgatggccctcaagatggtgaagggcagcatcgaccgcatgttcgacaagaatctgcaggacttggtccgcggcatccgtaaccacaaggaggacgaggcaaaatacatatctcagtgcattgatgagatcaagcaggagctgaagcaggacaacatagcggtgaaggcgaacgcggtctgcaagctgacgtatttacagatgttgggatacgacatcagctgggccgccttcaacatcatagaagtgatgagtgcctccaagttcaccttcaagcgaattggctacctcgctgcttcccagagctttcacgaaggcaccgacgtcatcatgctgaccaccaatcagatccgtaaggacttgagcagccccagccagtacgacacaggtgttgcactgacgggtctgtcctgcttcgtcaccccagaccttgccagagacctggcaaatgacatcatgacactgatgtcacacaccaagccctacatcaggaagaaggctgtgctgatcatgtacaaggtggttcctggaagtaccccgagtcgcctgcgccctgcctttccccggggtgaaaggagaaactgggagggacccccgacccccgggggtttcagtccgggctggccggtcaattggccatcctgcggagcctggggcagaacagcacacccctaaagaaactacccggttcccctgggggcccccgctctttttttccaaagcctggaatgaacgttccctttacacccaaaacaaaccgggggg

SEQ ID NO: 352594 - DNA, 1337 bp, Homo Sapiens
  misc_feature (4)..(4): n is a, c, g, or t
  misc_feature (7)..(7): n is a, c, g, or t
  misc_feature (16)..(17): n is a, c, g, or t
  misc_feature (25)..(25): n is a, c, g, or t
  misc_feature (29)..(29): n is a, c, g, or t
  misc_feature (48)..(48): n is a, c, g, or t
  misc_feature (61)..(61): n is a, c, g, or t
  misc_feature (73)..(73): n is a, c, g, or t
  misc_feature (90)..(90): n is a, c, g, or t
  misc_feature (95)..(95): n is a, c, g, or t
  misc_feature (1159)..(1223): n is a, c, g, or t
  misc_feature (1324)..(1324): n is a, c, g, or t
aaanatnccacagggnntttccccnagcngcatgagtccaacagatgnacagtcgtcattntgacagccagcnctctggagtgcaactgnaaccntgcctccatgttccaaccacacgtagatagttcttgtgccgacgaattcgacgtgcacctcatgaaacaggtaacgcagctgcataaagatgaccaggctggccatggataaccagatgttgccaaataacaacatgtgaatatggtgcatgaggtccagggacaggagagtgagctccatgacaaagtctgtgtaatagacatacgtcccctttccttcccacgtcccttcgtggttgaggtcccagaggtgaattacgtatcgtaaaatcacatgagcagtcctcactgtcacaagaagagactctgcagccatgaaagccaaggtgtgcattccgtgggtgtagccggtgatggagcagacggccgccagtccacagcaggaaagcagcatggcaaccaacagggacaggactcgaccgtggctgctcatcggcgtggtgggcgagaaggaaagatattcaaatcgatccttgcagagctgaaccatcaggtgcagaaagacaagtccggcaaaccagaggcaccacatgaccacctcttccactgtctggacattcagcacaccaaagatgaaaatgaacttgtagaaaataaaattccaaaatttgtctttgagatgctgtctctcactcactcgaagagggccaaacacaatacactggatgagcttagccaccaacatcaaaacacagcaagcggtatttactagaacccacacgaagaggctgtctgagagcaggtactgggccacatcgcgggcccggggtcccccggcgctcggccgggcgggcgccggcggctcaggctgcagcgaggccgttagctggtccggctcgccggggccggcctcgggctggctgagcgcgcggtaggcgctgatgatggtgcccagcagggccaggccgctgaggcccgtgtaggtgcggaggctgggccaggggaagcgctcgaggaagagcagcggcatggcggcagcggcgacctctggcccccaggcttccctgcgctgcggccgggcctctgcggcggcctcgcgaacggcgcccacgggctctggcgtnnnnnnnnnnnnnnnnnnnnnnnnnnnnnnnnnnnnnnnnnnnnnnnnnnnnnnnnnnnnnnnnntcctggctgctggcgccgctccgccccgcgctgatcccgggaattccggaccggtaccagccggctggtctgatcgtagtagtgattcgggaatagtgtgnttaagaattgatt

SEQ ID NO: 352595 - DNA, 2233 bp, Homo Sapiens
  misc_feature (2191)..(2191): n is a, c, g, or t
  misc_feature (2199)..(2199): n is a, c, g, or t
  misc_feature (2218)..(2218): n is a, c, g, or t
ggctaggggcccctcgccaggtacccccgagggcgagcgcctggggggcgcggccttgctcgcgggagcgctgctgagggagagtggttctagtaaataccgcttgctgtgttttgatgttggtggctaagctcatccagtgtattgtgtttggccctcttcgagtgagtgagagacagcatctcaaagacaaatttcggaattttattttctacaagttcattttcatctttggtgtgctgaatgtccagacagtggaagaggtggtcatgtggtgcctctggtttgccggacttgtctttctgcacctgatggttcagctctgcaaggatcgatttgaatatctttccttctcgcccaccacgccgatgagcagccacggtcgagtcctgtccctgttggttgccatgctgctttcctgctgtggactggcggccgtctgctccatcaccggctacacccacggaatgcacaccttggctttcatggctgcagagtctcttcttgtgacagtgaggactgctcatgtgattttacgatacgtaattcacctctgggacctcaaccacgaagggacgtgggaaggaaaggggacgtatgtctattacacagactttgtcatggagctcactctcctgtccctggacctcatgcaccatattcacatgttgttatttggcaacatctggttatccatggccagcctggtcatctttatgcagctgcgttacctgtttcatgaggtgcaacgtcgaattcgtcggcacaagaactatctacgtgtggttggaaacatggaggccaggtttgcagttgcaactccagaggagctggctgtcaacaatgacgactgtgccatctgttgggactccatgcaggctgcgcggaaactgccctgtggacatcttttccacaactcctgtcttcgttcctggctagaacaagacacctcctgtccaacatgcagaatgtctcttaatattgccgacaataatcgtgtcagggaagaacatcaaggagagaacttggatgagaatttggttcctgtagcagcagccgaagggagacctcgcttaaaccaacacaatcacttcttccatttcgatgggtctcggattgcgagctggctgccgagtttttcggttgaagtgatgcacaccaccaacattcttggcattacgcaggccagcaactcccagctcaatgcaatggctcatcagattcaagagatgtttccccaggttccataccatctggtactgcaggacctccagctgacacgctcagttgaaataacaacagacaatattttagaaggacggattcaagtaccttttcctacacagcggtcagatagcatcagacctgcattgaacagtcctgtggaaaggccaagcagtgaccagggaagagggagaaacttctgctcagaccgagcgtgtgccactggacctcagtcctcgcctgggggagatgctggacttcggcgaggtggaagtggagcccagtgaggtggaagacttcgaggctcgtgggagccgcttctccaagcctgctgattagagacagcgcatgctggtgcagcgtaaggacgaactcctccagcaagctcgcaaacgtttcttgaacaaaagttctgaagatgatgcggcctcagagagcttcctcccctcggaaggtgcgtcctctgaccccgtgaccctgcgtcgaaggatgctggctgccgccgcggaacggaggcttcagaagcagcagacctcctagcgctcccttgccttcctcagctgcctcctgcgccctgtgcccgactgactggaggaggcctgtcccaattctgcccgctccatggaaaagcgggcttgactgcattgccgctgtataaagcatgtggtcttatagtgtttggacagctgataaatttaatccttctttgtaatactttctatgtgacatttctcttccccttagaaacactgcaaattttaactgtagggtatgacctcttctggggtttgactggactgcttggggtgggggacgatcaaggaggaagtgagcagtcgccttcctgcagcaggagcttctactcctgcctaatgcgtacgtccacaaatgaggtgtctgagaacacaaccagtggaagagtgtggggagcgacagttaagccgccccacgtgtggtaacatctgtntaaacttntgtgttgttgtggagattnggcttttcagaggag

SEQ ID NO: 352596 - DNA, 762 bp, Homo Sapiens
  misc_feature (72)..(72): n is a, c, g, or t
  misc_feature (98)..(98): n is a, c, g, or t
  misc_feature (136)..(136): n is a, c, g, or t
  misc_feature (193)..(193): n is a, c, g, or t
cgtagggcttttctccagtgtggatcccctgatgcgtgttaaggctggaacggttgccaaagctctttccanactcggggcacgagtagggtttctcncctgtgtgggtgcgctgatgtgcaatgaggttgggacncctgctgaagctcttgccacactcggcacactggaagggcttttcccccgtgtggancctctggtgggttatgaggttggcactccggctaaagctcttcccacagtctctgcatttgtagggcttctccccggtgtgagtggtttggtgtctactaaaatttgaaccatcactaaagctttttccacattcatcacatttgtagtatttctctcctgtgtgggtcctctcgtgtgtgatgaggtgggatttccggctgaaggtcttcccacactggggacattcgtagggcttctcccctaggtaggtgccctgcaggcctatgagctggccaacttccctgtcctgagaaaccacctccccgtggtcctcacctggggtgtgtccctggagcctctggatgccagcatctctctcaaagtcactttccccatcggagtgctgagcactttcaccttcaggcatttccgagaatatcttacgtgattcattctcaaacatgtcttgattacagttctccccattttcactctgtatctcaaaatcactgtcctgaagggtctgggtcaagtcttccaccaggccgctgcctcctcactgacaacgccttgggatcctctagaaca

SEQ ID NO: 352597 - DNA, 520 bp, Homo Sapiens
  misc_feature (33)..(33): n is a, c, g, or t
ttcctaactattccaacttctctaggtcccagnaaaaataacagctaactcagcactgttacagtatggtatgaggccaccacttctcctgttggccttcttagtttctctccaacctccccttttccctagtttataagacaggagaaaagggagaaagcaaaaagctggaaagaaacagaagtaagataaatagctagacgaccttggcaccaccacctggccctggtggctaaaataataataatattattaacccctgaccaaaactactggtgttatctgtaaatcccagacattgtatgagaaagcactgtaaaactttttgttctgttagctgatgtatgtagcccccagtcacgttcctcaagcttacttgatctattatgaccctttcacgtagaacccttagagttgtaagcccttaaaagggctaggaatttctttttcagggagctcggctcttaagacacgagtctgccaacgctcccggccgaataaaaaaacctcttccttcttt

SEQ ID NO: 352598 - DNA, 374 bp, Homo Sapiens
  misc_feature (103)..(103): n is a, c, g, or t
  misc_feature (211)..(211): n is a, c, g, or t
ggccgaggagagatctctaggggacctgatgtgcacttgacacatggccttgagcccaaagatgttaacagggaatttaggctaacagagagcagcacttgtnagccttctactgtggctgctgtcctatctcgagctcaaggctgcagatccccttctgctcctgacgtgaggacaggttccttcagccactcagctactgatggaagcntggggttaataggggtccctgagaaaaaggttgctgagaagcaagcaagcacagaacttgaggctgcctctttccctgcaggcatgtactctgagcccctgaggcagtttagggacagctctgtaggtgaccagaatgcacaggtgtgtcaaaccaattccag

SEQ ID NO: 352599 - DNA, 1134 bp, Homo Sapiens
ccagatcgccgcgcgagggtggtgggcatcgaggtcccagcagcggacgagggaggtgccgccgtcgcccaggatgggctgggaatgaagcgatgtagccttttaagagatttgctctgacccatctgaagtccatatggctctgtatgatgaagacctcctgaaaaatcctttctatctggctctgcaaaagtgccgccctgacttgtgcagcaaagtggcccaaatccatggcattgtcttagtaccctgcaaaggaagcctgtcgagcagcatccagtctacttgtcagtttgagtcctacattttgatacctgtggaagagcattttcagaccttaaatggaaaggatgtctttattcaagggaacaggattaaattaggagctggttttgcctgtcttctctcagtgcccattctctttgaagaaactttctacaatgaaaaagaagagagtttcagcatcctgtgtatagcccatcctttggaaaagagagagagttcagaagagcctttggcaccctcagatcccttttccctgaaaaccattgaagatgtgagagagttcttgggaagacactccgagcgatttgacaggaacatcgcctctttccatcgaacattccgagaatgcgagagaaagagcctccgtcaccacatagactcagcgaatgctctctacaccaaatgcctccagcagcttctgagggactctcacctgaaaatgctcgccaagcaggaggcccagatgaacctgatgaagcaggcagtggagatatacgtccatcatgaaatttacaacctgatctttaaatacgtggggaccatggaggcaagtgaggatgcggcctttaacaaaatcacaagaagccttcaagatcttcagcagaaagatattggtgtgaaaccggagttcagctttaacatacctcgtgccaaaagagagctggctcagctgaacaaaatgcacctccccacagcagaagcttgtctgcttgcgaaaagtggtgcagctcattacacagtctccaagccagagaggtttgtgcttggaaaggggactggccaaggggtagatgctacatccagatgaaaaagcaaagagtgatgctgtcttaagggatttttatgggg

SEQ ID NO: 352600 - DNA, 1052 bp, Homo Sapiens
cctcgtcaccacagacctcagtctctacaggttcctgcagacagcagagatggtgaagccctccaccccatcccccagccacgagtccagcagctcatcgggctccgatgaaggcaccgagtactacccccacctagtcttcttgcagaacaaagctcgccgagaggacttctgtcctcgggaagctgcggcagatgcacctgatgattgaccagctcatggcccactcccacctgcgttacaagggaactctgtccatgttacaatgcaatgtcttcccggggcttccacctgacttcctggactctgaggtcaacttattcctggtacccttcatggacagtgaagcagagagtgaaaacccaccaagagcaggacctggttccagcccactcttctccctgctgcctgggtatcgtggccaccccagtttccagtccttggtgagcaagctccggagccaagtgatgtccatggcccggccacagctgtcacacacgatcctcaccgagaagaactggttccactacgctgcccggatctgggatggggtgagaaagtcctctgctctggcagagtacagccgcctgctggcctgaggccaaggagaggaatgtcatgcaggggacctcctgggtccgcagtgtactgcgagggagcacagatgtccatcccccgctggggtggagagcggcagcaggcctgatggatgagggatcgtggcttcccggcccagagacatgaggtgtccagggccaggccccccaccctcagttggggctgttccgggggtgactgtgagcgatcccaccccaaacctgagatggggtagcccgtcctgtgtcctccacagggacaagcagtgggaggagtctgaatggtcaccaggaagcccgggctccatcttgacctcctttttcagggacaggagcaacaggcccctcttccctgactctaagcccttccctgtaaggtgaggcagggtctggagagctctttattggaacagatctggtggttcaaataaacacagtcatgcaagcctgaaaaaa

SEQ ID NO: 352601 - DNA, 2050 bp, Homo Sapiens
aacgacctcgactactcaaatggacctgttagaaggagcacagttattgaccagattccttttctggcagtagcaagagcacttggtgatttgtggagctatgatttcttcagtggtgaatttgtggtgtcacctgaaccagacacaagtgtccacactcttgaccctcagaagcacaagtatattatattggggagtgatggactttggaatatgattccaccacaagatgccatctcaatgtgccaggaccaagaggagaaaaaatacctgatgggtgagcatggacaatcttgtgccaaaatgcttgtgaatcgagcattgggccgctggaggcagcgtatgctccgagcagataacactagtgccatagtaatctgcatctctccagaagtggacaatcagggaaactttaccaatgaagatgagttatacctgaacctgactgacagcccttcctataatagtcaagaaacctgtgtgatgactccttccccatgttctacaccaccagtcaagtcactggaggaggatccatggccaagggtgaattctaaggaccatatacctgccctggttcgtagcaatgccttctcagagaattttttagaggtttcagctgagatagctcgagagaatgtccaaggtgtagtcataccctcaaaagatccagaaccacttgaagaaaattgcgctaaagccctgactttaaggatacatgattctttgaataatagccttccaattggccttgtgcctactaattcaacaaacactgtcatggaccaaaaaaatttgaagatgtcaactcctggccaaatgaaagcccaagaaattgaaagaacccctccaacaaactttaaaaggacattagaagagtccaattctggccccctgatgaagaagcatagacgaaatggcttaagtcgaagtagtggtgctcagcctgcaagtctccccacaacctcacagcgaaagaactctgttaaactcaccatgcgacgcagacttagggcccagaagaaaattggaaatcctttacttcatcaacacaggaaaactgtttgtgtttgctgaaatgcatctgggaaatgaggtttttccaaacttaggatataaaagggctttttaaaatttggtgccgatggttgaaccttttttaaaggggagaaaattaaaaaaaatatacagtttgactttttggaattcagcagttttatcctggccttgtactgactggtattgtaaatgtggattttgtagatgttagggtataagttgctgtaaaatttgtgtaaatttgtatccacacaaattcagtctctgaatacacagtattcagagtctctgatacacagtaattgtgacaatagggctaaatgtttaaagaaatcaaaagaatctattagattttagaaaaacatttaaactttttaaaatacttattaaaaaatttgtataagccacttgtcttgaaaactgtgcaactttttaaagtaaattattaagcagactggaaaagtgatgtaatctcatagtgacctgggtgtcacttaatgtttcttagagccaagtgtcttttaaacattattttttatttctgatttcataattcagaactaaatttttcatagaagtgttgagccatgctacagttagtcttgtcccaattaaaatactatgcagtatctcttacatcagtagcatttttctaaaaccttagtcatcagatatgcttactaaatcttcagcatagaaggaagtgtgttttcctaaaacaatctaaaacaattcccttctttttcatcccagaccaatggcattattaggtcttaaagtagttactcccttctcgtgtttgcttaaaatatgtgaagttttccttgctatttcaataacagatggtgctgctaattcccaacatttcttaaattattttatatcatacagttttcattgattatatgggtatatattcatcctaataaatcagtgaactgttcctcatgttgctgaatttgtagttgttggtttattttaatggtatgta

SEQ ID NO: 352602 - DNA, 1579 bp, Homo Sapiens
cttatccacccagctctcctggagctgttctggtctcagaggcttggttccatttctcacctgaacagatgagtcctgggagagaccctcagagatccgcccagacccctctcctgccctctgcacaccagcagcaggcatgaaccttgggtctgggaaaaagctttaacctgcagggcaccaggacccaaggcaggctgttccttggggcggtcagaccccagtcaggagcaatgactgactggctgcagccttcccacgccaagaggctggaacatagtgtctgcctcgcttcctggagatagtaactgagcaggggctacaaagaggtctcctgggaaccctgtctgccccttcccacctgtccttgggccacaccatcacactgaaccacaggacagaccctttctccaccacagccaaggcctggagactgggggcccagcagagcctgctcccaccctcctcccagcagcagacacccaccctctcactgactaacaggtccctgcacacagctggcctggtaaacccagctgggaggtttctaggcagcagcaaaactctgtgacagggtgtcctcacaccaggccttggacagctctcccagacaggagccagggttgagcaatggagagcccagcccccacgtcttacagtcgccatcctccaggcgtgtggtcccctccccattgggtgcacagtgcagaggggccgtggccccatgtgatggtgcgcagagaggaacctcttgggattcagcaccagacgtctgtgctgcctggtttgcatccggctcacagagcccagactgctggaacagccaaggactgtcaggctggacaaaaataactgcaaggaggggcaagagaaaggatgattcgaggcaccttggcccttcaaggtcatgcagtgggtcgagcgcctgagatcctgttcaacagggactccacagagctggctctgctcagaagccatttcattccccggctccaccctaggccactttttctaacagaggaaacaaatggtccagcagtcgttcccagcagaacagcggagcctggactgacacccagtgggaccagtgttgccacaccagttgataaaatgcagaaacccttctgtactcgttggtaaatatctactcccccaagtgactccaggtgccccccaccgcctggcacttcccccaggactcctacgatctggttactgcctggccgatccaaggctgtggagtcccagagccagcagttcactggtgctcattccacactggttagatacttcagttgtcacccctgggaagattctcccacctcctccctttgatggaaccaccctccccagaggctgcattgaggagactccacagactgaaaagtgagtttgcagaaaccttggggaaaagggcccttttcaaagaagtggataagagggaggagatcattgagtgacccagaaagctcttttgaaaaagacagactcctcaagggagagataaagagggaaagcaccctcttttcatttttttagtggtgagcttaattcccatcagaactggctgttcctcccg

SEQ ID NO: 352603 - DNA, 1666 bp, Homo Sapiens
  misc_feature (1532)..(1532): n is a, c, g, or t
  misc_feature (1540)..(1540): n is a, c, g, or t
  misc_feature (1580)..(1582): n is a, c, g, or t
  misc_feature (1605)..(1605): n is a, c, g, or t
  misc_feature (1615)..(1615): n is a, c, g, or t
  misc_feature (1620)..(1620): n is a, c, g, or t
  misc_feature (1622)..(1622): n is a, c, g, or t
  misc_feature (1630)..(1630): n is a, c, g, or t
  misc_feature (1636)..(1636): n is a, c, g, or t
  misc_feature (1639)..(1640): n is a, c, g, or t
  misc_feature (1651)..(1651): n is a, c, g, or t
  misc_feature (1657)..(1658): n is a, c, g, or t
agttgcacgggcgagctccgggccggctgcggagcgactccccgccgccaagtgggcggcgtggctgtcgggaaagaagggctggggcctgccgttcttcctcccgagtatcccctccagctggacgaccccacgctgcagcacgggcttccggcttctctcctcagtggccaattcgagggcacagcgggctccggaggcgcggcggcaagcctatcccgcctcccaaccacagcctccagcacccgagagaacggccgcccacagcacacgttctccggacaggagggcgaaggcccaagacctggagaggtgggctcgagggaaagatctgggtcccaccactacttcctggagacgccggggaaagcaggccatccttcgagccacccatctcttctccgattggttaactgccttcttattgcgctccgctggctggtgattggttgggatgcaccgtctatcacctgcttccttgtgagaatctaggtctctaagggaagcgttacttgaggctcggttgggaagagatggtcagctctcaaaaaaggcacaaacaattgaaggatggataccatggcatatgttaaaagcgtgttgaaaggaaaataagaaagccaggaatctcaggatgaatcagtctagatcgagatcagatggtggcagtgaagaaaccttacctcaagaccataatcatcatgaaaatgagagaagatggcagcaagagcgtctccacagagaagaggcctattatcagtttattaatgaactcaatgatgaagattatcggcttatgagagaccataatcttttaggcacccctggagaaataacatcagaagaactgcaacagcggttagatggcgtcaaggaacaactagcatctcagcctgacttgagagatggaacgaattacagagactcagaagtccctagagaaagttcacatgaagattctcttctagaatggttgaacacctttcggcgcacaggaaatgcaactcgaagtggacaaaatgggaaccaaacttggagagctgtgagtcgaacaaacccgaacaatggagagtttcggtttagtttggaaatccacgtaaatcatgaaaatagaggatttgaaattcatggagaagattatacagacattccactttcagatagtaacagagatcatactgcaaataggcaacaaaggtcaactagtcctgtggctaggcgaacaagaagccaaacctcagtgaatttcaatggtagtagttccaacattccaaggactaggcttgcttcaagggggcaaaatccagctgaaggatctttctcaacattgggaaggttaagaaatggaattgggggagcagctggcattcctcgagctaacgcttcacgcactaatttcagtagtcacacaaaccaatcaggtggtagtgaactcaggcaaagggaggggcaacggtttggagcagcacatgtttgggaaaatggggctagaagtaatgttacagtgaggaatacaaaccaagattagagcnataagatncgatctacttccatagtcgagccgttcacaattcagagannngtggcactgtttataataatccnaagggaagtngacantnagcaaccntagaanttnntaggggagagnagactnngtcttttt

SEQ ID NO: 352604 - DNA, 978 bp, Homo Sapiens
  misc_feature (869)..(916): n is a, c, g, or t
  misc_feature (947)..(947): n is a, c, g, or t
ttccgatggtccaggaagtggttggtggggagtcgcttcataaatgatttaaactcatctgaattctccaggtccttataagcttcaacactttgagtggcattccctgacttcctgtcgaggcgacttttgtccatatacatggtcaaagcctcctcccctcccaatgtggctgagatgagcaggtgggtgccgtactttttgatgatggtatcgatgaactgctgagtggtaggtctcctgccaagcaggcggatgctcctttgaaactccggcatgaggggcactggatggcggaccagatctctcctctcgatggctgtgttcctcaccttccaacgggcaaactccctgtatattgtatatctgcttgtaaatccttgacggtgtctttccacaaaggataggtagctcctggagtggtggaaaggccccctgtctgaaatgagccaatcaaattccttggagacatgttggtctgtcccagctggttcctggtgggagggctgcactgagatacggccccatataaacaggaagtagaggagctcaacaaacctccagttcatgcttttctgccggcctttttcctctcattcttgctccattctgtggagtcctggagtcaatgtccgtctttggcggagagctgcgggcggacgctttttattcggctcggtgggaacttgggagagccctgcgtccagctcgcattccgggcacggcgcggggactgcaggcgtgggggtacctggctcctagcagcctggctcatactcagccgtaaagtccccttcgctggtcccgaggacaggcatgaatcccggctccggaaggcggtcactactccctctgcctcccggctctcnnnnnnnnnnnnnnnnnnnnnnnnnnnnnnnnnnnnnnnnnnnnnnnnggttcgcatcgcctgcgctctcctcctcccngcgcgccagatcagatcccgggaattccgga

SEQ ID NO: 352605 - DNA, 1305 bp, Homo Sapiens
cagtctcatttgcagtaggttagtaccggagtcggactacgtaggtagatgtggacccgtctcgaaaaatgttttccaccgattgccccagcaaaagagtccagttgtagcactggctgttttggagacggatcttctccccagcgtgggtagccaagttccccgaagggcatgttccagccctccgaatggctcccgctaaaggggttgacatagacaaagaacatggggtccaggctgctgttgcgcatctggcagatgcgcatggacatgccgatcaccatgtggatgaagtccatgcggttcttgttgctcttgagagtgagggacatgcgcttgcgccaccgagggtcaaaagaaggtgtcgaggcggatctcgttgctgatgaaggtggtgtggacgtagaggcgtgagtccatcttctgcagcaggtacttcagctccaggtcctggaagtccaggtcagtctcaaagctgatgaactgcccgctccgctccgagtccacgttctgtggttcacagcggcctcgatacagcttgtagcccttgttgcaggagccgcagagggagatgttggccaggctgcacatggcgcagctgttgttcccgcctatcacgcaggggatggggcgctggcacagcgtggtgctgccgtggcacaacgactccgctggctctccaggaaggttccccaaaacccattctcattacagtagaggagtgactggacccttgcaagccactgctgaattgtcctctctctaggcagctggtggttgggattgtggcgacagcgtacactgaggccgaaaagcttgcgggcagtgcgttggatcttttgtctctgtgcctccgtggcactctgcaggagcttgtagcggttctgcaggtcccagtcattgccccagtgctgatggatgcttccgatggtcaggaagtggttgctggggaggcgcttcataaatgatttaaactcatctgaattctccaggtccttataagcttcggcccaagacttggccatgttggccagcgtgtactccatgatctggatgtcctggagtcaatgtccgtctttggcggagagctgcgggcggacgctttttattcggctcggtgggaacttgggagagccctgcgtccagctcgcattccgggcacggcgcggggactgcaggcgtgggggtacctggctcctagcagcctggctcatactcagccgtaaagtccccttcgctggtcccgaggacaggcatgaatcccggctccggaaggcggtcactactccctctgcctcccggctc

SEQ ID NO: 352606 - DNA, 1744 bp, Homo Sapiens
gattacagagaaaaaaccaacaccttcctgtgcagtcctgttggaattttcgtcattgaattttgagaagcattctgaaaactttgcatggacagagaatcgttatgatgtgaaccgtcgacgacacaactcttcagatggctttgattctgctattggacgtcctaatggaggtaactttggaaggaaagaaaaaaatggatggcgtacacatggaagaaatggtacagaaaacataaatcatcgaggtggataccatggtggaagttcccgttctcgtagcagtattttccatgcaggaaaaagccaaggactacatgaaaacaacatacctgacaatgaaaccgggaggaaagaagacaagagagaacgcaaacagtttgaagctgaggattttccgtctttaaatcctgagtatgagagagaaccaaatcacaataagtctttagctgcaggtgtgtgggaatatcctccgaatcctaaatctagagctccaaggatgctggtcattaagaaaggtaatacaaaagacttacagctatctggattcccagtagtaggaaatcttccgtcacagccagttaagaatggaactggtccaagtgtttataaaggtttagtccctaaacctgctgctccacctacaaaacctacacaatggaaaagccaaacaaaagaaaataaagttggaacttctttccctcatgagtccacatttggcgttggcaactttaatgcttttaaatcaactgccaagaactttagtccatctacaaattcagtgaaagagtgtaatcgctcaaattcctcttctcctgttgacaaacttaatcagcagcctcgtctaaccaaactgacacgaatgcgcactgataagaagagtgaatttttgaaagcattgaaaagagacagagtagaagaggaacatgaagatgaaagccgtgctggctcagagaaggatgacgactcatttaatttacataacagcaatagtactcaccaagaaagggatataaaccgaaacttcgatgaaaatgaaattcctcaagagaatggcaatgcctcagtgatttcccagcagatcattcggtcttcaaccttcccacaaactgatgttctttcaagttcacttgaggcagaacacagattgttaaaggaaatgggctggcaggaagacagtgaaaatgatgaaacatgtgctcccttaactgaggatgaaatgagagaattccaagttattagtgaacagttacagaagaatggtctgagaaaaaatggtattttgaaaaatggcttgatctgtgacttcaagtttggaccgtggaagaacagcactttcaaacccacaactgagaatgatgacacagagacaagtagcagtgatacatcagatgacgacgatgtgtgaaggatttcctaacagctttagaaatcttagtgtgatacatctctcatacagtttggggtgaattgtaaaaatgaagaactataatttatgtagtgaaataccccattagaagaggattttttgggggacttcaatatgaagaaaaccaagaatgttttgttgggctgtgttgaacattatttctttgtaaatgaatgttgtaggaatgaggacttgggttggtccaacattgactttcttcatcactgcaacatttctctgactagcaatgtgacgatgtaacaaatgagattttctcatttaataataaaaaattgtgtaatgttttgcaaaaaa

SEQ ID NO: 352607 - DNA, 852 bp, Homo Sapiens
gtatgggtagctgacttgaagtaactctatgtcaaatagtcgtaggttaagtatcttcaaagaacttcgatattatttcagaggatacaaaataaaaatacaaactggaaaataaagattacagagaaaaaaccaacaccttcctgtgcagtcctgttggaatttggacttgccatgaggtgttgaagccttgtttcactgagttggagagactggacctaaatggcgcacatgactttgctccagcctggcttaatttccctactccaccatcatcaacaaagtcgtcattgaattttgagaagcattcttgaaaactttgcatggacagaggaatcgttatgatgtgaaccgtcgacggacacaactcttcagatggctttgattctgctattggacggtcctaatggaggtaactttggaaggaaagaaacacaaatggatggcgtacacatggaaagaaatggtacagaaaacataaatcatcgaggtggataccatggtggaagttcccgttctcgtaagcagtattttccatgcaggaaaaaagccaaggactacatgaaaacaaatacctgacaatgaaaccggggaggaacgaaaggaccagagagaacgcaaaacagttgacagctgaggattttccgtctttaaatcctgagttatgagagagaacccaaattcacaaaaaagtctttagctgcaggtgtgtgggaatatcctccggaatcctaaaatctagaggctccaggaatgctggtcaattacacaaaaggtcatacacaaagcacttacacgttatctgaattccccgtaagtgagaaatcctccggccacagcaggtaacgaatg

SEQ ID NO: 352608 - DNA, 463 bp, Homo Sapiens
agaaccaaatcacaataagtctttagctgcaggtgtgtggggcctacacgcccagacacacacatacccaaccaaaaaaatctcccaagctcctctcttagaatatcctccgaatcctaaatctagagctccaaggatgctggtcattaagaaaggtaatacaaaagacttacagctatctggattcccagtagtaggaaatcttccgtcacagccagttaagaatggaactggtccaagtgtttataaaggtttagtccctaaacctgctgctccacctacaaaacctacacaatggaaaagccaaacaaaagaaaataaagttgggaacttctttccctcatgagtccacatttgggcgttgggcaactttaatggctttttaaatcaacttgccaaggaactttaggttccatcttacaaatttcagtcgaaaggagtgttattcggttcaatttcctct

SEQ ID NO: 352609 - DNA, 425 bp, Homo Sapiens
tcagctctacctacaaggactccaacactctgcacctccctacggagcgtttctcccctgcgcgccggttctcagatgaggctgcgagcatccaggccttcaaagctcacctggaaaaaatgggcaacaacagcagcatcaaacagctgcagcaggagtgtgagcagctgcagaagatgtacggggggcagattgatgaaagacccctggagaagacccagcagcagcatatgttataccagcagcagcagcaccatcaaattctgcagcaacaaattcaagactctatctgtcctcgtcagagatctcccactctccaggctgcatgtgaaattcagacagccctccttagccatcagctccagaggttaaggattcagccttcaaacactccctccaaccgccccaacagtcatctcttcagg

SEQ ID NO: 352610 - DNA, 1736 bp, Homo Sapiens
  misc_feature (198)..(245): n is a, c, g, or t
  misc_feature (303)..(303): n is a, c, g, or t
  misc_feature (1594)..(1659): n is a, c, g, or t
aggctggaccggtccggattcccgggatgggccgcctgccctgccttgccgctccccttggacctccaggggctcctgggttggagggaaccaccagcgttcccttctcccccttgtcttcccccctctcctcccagctgctttacttaaagttgattttgaactttttatttgaggagacgaagtgaaaacaaatcnnnnnnnnnnnnnnnnnnnnnnnnnnnnnnnnnnnnnnnnnnnnnnnnctcgtccccctccctgcccaaactccccttccctggggagccctcaggctccccaganactggctgggcccctggggacagagccaccccatgagctcggggtccaccagtgtgtgggggagattctgggtttgcccagtcctgggttgtttccaggagaaagccgggggaggggccctcaggccattccccaacggggtgggggagggtgacccacagctctgggcctctttttgccctttagggctgttgctagggagagggaagagggagaccaaatgtcggggttgggggtgggagggcgtcaggcagaggcaactgacttcatttgtgccacacgcatgggcattgcagccttgcgctgtcccaggcatgcagctgcctggggcccaagttgcagtgagcagggtggggtctgggagggggtgagaggcaggaatgggggtcagaagaagtgggagcagcttcttgggctgagtgcagccaaaggggagccagaaatgggcagttctcccagggagtgagcagctactgtaacttttttaaattaagacaaaaagccttgaagaaaatgactttatttttctaagtgtaacctcagtatttatgtaatttgtacaggggccatgccccacccccctcctccccctttggggtagaccttgagggtgggccagcataggggggagggtcttttaccctgtgtcagagcctaccttcaccacctatatccagaaggggagctttttcagaaacagggcagcagtggggtgaaattttcttaacccctaagactgccttcagtaggaacaagctggcttctgtgattaggtgaagggatgggggaagattttatgcacagcctagttatcaaggggatgatttgccgacatgtttgagaaccccctaacctctaaccctcattgctgtcttgccccagtttggggtgccaagatggaagtcacctttctgggctttctcctggagatagctggggcttatgggtggctttcaaggctggggcatggcaaatcaggggccagagagcaggggagcttgggactcaggtctgtaactgcccagccccttttctctgctcttgtttcactccaccatcactcactcactccccactcccccacccatggggaagagacctttgatgaattcttcctctccttcccaaaaaagacagacccagtgagtgaatcaggcaaagggcttataatgtgtgttgtgtgaaacgtggcccttgggaggacatgcgtgtgtcaagggattaagttgaagtgaatatttttatgtgcagcgacccttggtgtttcccttcctcggtggctctggggtannnnnnnnnnnnnnnnnnnnnnnnnnnnnnnnnnnnnnnnnnnnnnnnnnnnnnnnnnnnnnnnnnttctacttcccctgggatgctgacccaggaatagtggacatggtcacagtcctatgtacagagctttcttttgtatt

SEQ ID NO: 352611 - DNA, 666 bp, Homo Sapiens
  misc_feature (591)..(591): n is a, c, g, or t
gaggcggggaggaggaacgggcagccacaggactgagccctctcactccagccaaagaaatgggcctgcctgcctccacccgtcctccctcagcctccccttcttcccgccccacctcccatttctgttgctggaggggctgtcctccttcctgggaccccctcgccagcttggctcgatgtttgccatgagtattagcttacccaatgggaccgtgccccacctccccacacacaggccttctgtgtgggctgggccaccgtctcctcctctgaggaagcagttgggagccctcttgccagcctccttgctgaccccaggtcagaccctgtgtctgtcacaggctgggtcaaaaagatgcccctggactctgcccctcagaggggccagctggggacgatgggaggcattacttcctcactactgctgtcctctcccccttcagctcctgatgtagctgggcctgtgcactgggcaggtacctggggccgcctgacctgccttgccgctccccttggacctccaggggctcctggggttggagggaaccaccagccgttcccttctcccccttgtcttcccccctctccncccagctgctttacttaaagttgattttgaactttttatttgaggagacgaagtgaaaacaaatctataaatata

SEQ ID NO: 352612 - DNA, 316 bp, Homo Sapiens
  misc_feature (234)..(268): n is a, c, g, or t
ttacaggcgagagccaccgtgcgtggcccaccatagacgatttttaagccataaaaagaaacgaagcactgacatgggctccagcatggatgagccttgaaaacatcgcactaagtggatgaagtcagacacaaccgtctacgtgttgtatggctgcattcacgttcaagtccaaataggacacacggcagagacaaagccaggtcatggttgctcaggaccggaagcctgttnnnnnnnnnnnnnnnnnnnnnnnnnnnnnnnnnnnaagctcagaggtttgcgatttctttgggggtgatgaaaatgtaattgt

SEQ ID NO: 352613 - DNA, 914 bp, Homo Sapiens
  misc_feature (127)..(127): n is a, c, g, or t
  misc_feature (129)..(179): n is a, c, g, or t
  misc_feature (185)..(188): n is a, c, g, or t
  misc_feature (269)..(330): n is a, c, g, or t
  misc_feature (497)..(558): n is a, c, g, or t
taggcccctgccacccccaagactgggaggggacttctttttctaaaacacaaaattcagcccagccaggccccctccctggaggccagcccctccccgcagggggcaaggccggggcttcaaagcnannnnnnnnnnnnnnnnnnnnnnnnnnnnnnnnnnnnnnnnnnnnnnnnnnnacggcnnnntcagcccctccacccctcccttcatcctgttatttattcggaaggtttcaaatcacgacagagtccatgttggaggtgatnnnnnnnnnnnnnnnnnnnnnnnnnnnnnnnnnnnnnnnnnnnnnnnnnnnnnnnnnnnnnnccccaaaagggaaacttgcgggtgtggggttctaacacatattttattatccggggatctccacagggcgtgggccggggtgaccacgagacctttcaccggggaagtggtgtcaatttattgtggggccttttcacaagtgtgccaaaaacatctaaagcggttcnnnnnnnnnnnnnnnnnnnnnnnnnnnnnnnnnnnnnnnnnnnnnnnnnnnnnnnnnnnnnnggcgtgggcggcgcgcgccgcctacaaagacgatctcccccctgagggggggccacacaagatatcccgcgagacgacgccgcggtcttattgtgtgcggcacaagaggtggcgcgccccaaaaaatgaggaggagcgcgcgcgctcattcttatataacagagcgagaggcgagcgacggcggggcgcgcgacgcgcgcggtcgtaaagacaccgacgagggcgcgggacgagcgacgtgggagcagcaacaacgagcgtggttccccggcgtgggcgcacctaaccggggggagggagcgggcgcgaccacagctcaaccacaaggagggggggtggagggaagacaaaacaag

SEQ ID NO: 352614 - DNA, 986 bp, Homo Sapiens
  misc_feature (137)..(199): n is a, c, g, or t
  misc_feature (201)..(201): n is a, c, g, or t
  misc_feature (213)..(213): n is a, c, g, or t
  misc_feature (225)..(225): n is a, c, g, or t
  misc_feature (238)..(238): n is a, c, g, or t
  misc_feature (248)..(248): n is a, c, g, or t
  misc_feature (276)..(276): n is a, c, g, or t
  misc_feature (476)..(485): n is a, c, g, or t
  misc_feature (848)..(848): n is a, c, g, or t
aagattctgaacttttattttctggcatgaaaagtacaaataattaaacaattccatgtaaaagtctgttaccgcggccaggcctgtgatcccggtaataaatagtctaaacgcaacgcgaagtgttcttgttgggnnnnnnnnnnnnnnnnnnnnnnnnnnnnnnnnnnnnnnnnnnnnnnnnnnnnnnnnnnnnnnnancacccccaacanggactctgtcgngatttgaaacctnccgaataaanaacaggatgaagggaggggtggaggggntgagccttcccccctgggcctggcccctgcccccaagggacgtggaagccccaagtccccctcgcctgggagccccggcctggacccctgcggggaagggctggcctcccagggagggggcctggctgggctaagttttgtgttttagaaaaagaagtcccctcccagtcttgggggtggcaggggcctaggcctcggtnnnnnnnnnntgtgtggggaggtgccccctctctggagcctggccccccccagggtgggggacaaacccagcccttattgctcggacgccctgctgcaagcttcccacgcggacgtgcgtgttcccgaatgcagagggcggaggggagagagccccaagagacagcaggggagaggggtccctgccctgctgcaggggagaggagagagggcagggaggacttaaaaccacgagaataaataggttcgtgtatcaagaacaagctagggatttcaccagctaaataggactgaaaaaattctcaagacaagagcaaaaagaatcccattggtgacctggacgtcgctggccgtggggactgtcccgcagagcnaagcccccgcgtgccactcggctaccattactgttattaataattattattactttaatgattccacttccccttttataaataaattaggcataaccatgtctcggcaaaacttaaagaaacaaagagaacattgtc

SEQ ID NO: 352615 - DNA, 1072 bp, Homo Sapiens
ctgggcgggctatggcgcaggcgggttgtggggccggcgctggtgtgcggggcccggtgcatggcggtctgtcgtgctgtgagtctgccctcgtggggctgtcagatttgtgacccagaaggaaatctctgacctcagctgtgtgctcttgtgtgctggccagaagccaacttcatgtctgagtgcacgagcagcagtttgccatggagagcttgggtgctgcacacggtgacccttagtgatgggacaacagcctacgtccatgcaagctgtcaaaggagagaagcttcttgaagtggcaggtgatccagctcgaggatgggaccaccgcatacattcaccagtgtgacggtacagaaagaagctctctcctttgaggatggtcagcctgtgcagctggaagatggcagcatggcttacatacaccgcacacccagagaaggctatgaccccagcaccctggaagcctgtacaactggaagatggctccactgcctacattcaccaccctgtggctgtgccatcggagagcaccatcctggccgtacagacagaggtgggcttggaggacctggcagcagaggatgatgagggcttcagtgcagacgcagtggtggacctggagcagtatgccagcaaggttcttcatgacagccagattccccgtaatggaaaagggcagcaagttggagcacagagcattccgctgtggctacaagggctgtgggcgtctctacaccaccgctcatcacttaaagggtgcatgaacgagctcatacaggtgaccgtccatacagatgtgaccttccccagctgtggacaaggcctttgccacaggctatggactgaagagccacgttcgtacccacactggtgagaaaccatacaagtgcccagaggagctgtgcagcaaggccttcaagacctcaggagacctgcagaagcatgtccgtacccacactggtgaacgcccgttccagtgcccttttgagggctgtggccgctccttcaccacatctaacatccgcaaggtaatgtgcgcacccacacaggcgagagtctccgtcgaact

SEQ ID NO: 352616 - DNA, 711 bp, Homo Sapiens
gggcggggctccgaagagctcgtgttcagatcccggccgcctgggctccaggagccccggaaccaggataagttggatggctgccgcggcgaagcggggggcggggtggaccgtgcccggtattttctatacgggttccggggcccggtagaggcgcgccaagaggaaaggaaagtgcggcggccctggaacctggatatcgcgcgagatttgtgacccagaaggaaatctctgacctcagctgtggctcttggtgctggccagaagccaacttcatgtctgagtgcacgagcagcagtttgccatggagagcttggggctgcacacggtgacccttagtgatgggacaacagcctacgtccagcaagctgtcaaaggagagaagcttcttgaagggcaggtgatccagctcgaggatgggaccaccgcatacattcaccaggtgacggtacagaaagaagctctctcctttgaggatggtcagcctgtgcagctggaagatggcagcatggcttacatacaccgcacacccagagaaggctatgaccccagaaccctggaagccgtccaactggaagatggctccactgcctacattcaccaccctgtggctgtgccatcggagagcaccatcctggccgtacagacagaggtgggcttggaggacctggtagcagaggatgatgagggcttcagtgccggacgcggtgg

SEQ ID NO: 352617 - DNA, 978 bp, Homo Sapiens
ctatcaggtctttataatgaatgtggaaaggacttgcaggggatgggaatagacttcgtagagaaggcctgagaaggtgacgggagtccacgtggagagtcttagaaaggatgtggcttctttaaaggaaaaattgggtggagttttggaagtgggtcttagtggacccgagacggctctagataagtcaaataacttagcaatcatggtaggacttaaggaggaatccaggaggaacttacgggataatagtcatccaaacagcttacttgttgcggctttgctgtgcaccagcttaagtaggcacgttagcatttattgccacaaattttactttaattcctcgccaccactccatgagagagagcccccacataccactgtattccccgccaccatggatgacgtccccgccccaacccctgcaccagcaccgcccgccgctgccgcccccagggtcccgtttcactgcagtgaatgtggcaagagcttccgctaccgctcagacctgcggcgccactttgcccggcacacagcgctcaagccccacgcatgtccgcgctgcggcaagggtttcaagcacagcttcaacctagccaaccacctgcgctcgcacaccggggagcggccctaccgctgctctgcctgccccaaggggttccgcgactccaccggcctgctgcaccaccaggtcgtccacactggtgagaaaccctactgctgcctggtctgcgagctccgcttctcctcacgctccagcctgggccgccacctcaagcgccagcaccgtggggttctcccctctcccctgcagcccggccctggcctgcccgccttgagtgcgccctgctccgtctgctgcaatgtggggccctgctcggtgtgcgggggctcaggggccggcggcggagagggccccgagggggcaggcgcgggtctgggcagctgggggctggcagaggcggcagctgcggccgc

SEQ ID NO: 352618 - DNA, 449 bp, Homo Sapiens
  misc_feature (308)..(385): n is a, c, g, or t
gccaaaaggaacaaagcgcggtctatctaagtggaggcaaaacaaagagaggaagaccggatttaaactgaatttgtacaccccgccagaaacacccatggagcctgacgagcaggtaacagtggaagaacagaaggagacttcagaaggaaaaaccagccccagtcccatcaggattgaggaggaggtcaaggaaactggggaagccctgttgcctcaagaggaaaacagaagggaagaaacatgtgcccctgtaagtccaaacacatcgccaggtgaaaaaccagaagatgatctcatcaaacctnnnnnnnnnnnnnnnnnnnnnnnnnnnnnnnnnnnnnnnnnnnnnnnnnnnnnnnnnnnnnnnnnnnnnnnnnnnnnnaatgtagaaaaagatccagatggtgctaaaagccaagaaaaagaggaaccagaaatctccacgg

SEQ ID NO: 352619 - DNA, 333 bp, Homo Sapiens
gaaaaggtgagccgagccgacggaggggacgcgctgcggggcgcccccagtctatggagcggggtaagatggcggaggcggagagcctggagacagcggcagagcacgagcggatcctgcgagagatcgagagcactgacacggcctgcatcgggcccacgctcaggtctgtttatgatggtgaagaacatggacgtttcatggagaagcttgaaactcgtatccgtaatcacgaccgagaaattgagaaaatgtgcaactttcattaccagggctttgtggactctataactgaactgctgaaagtgagaggagtcgccctgtcatccggtt

SEQ ID NO: 352620 - DNA, 1142 bp, Homo Sapiens
  misc_feature (43)..(43): n is a, c, g, or t
  misc_feature (1066)..(1102): n is a, c, g, or t
aaaatcaaatgtccccaggttgagcaaaacgtggtggttgttnctctttccttatgatattgttgagttttctgcatcagcttctctggcaagccatcttcatcatcaaactgctccatggggttccacaatgactggacgagggggtcgttgttagcaagaatgccccatcaccacatctttccagagcctttcgtgcaggaggttgtgctgcaaactctacaaaaccttttcctgtagctctaccgcgatcatccacaaccacaacagctttctctactggaccaaactgagaaaatgcttgctctagcagctcattggaaacaactggagaaaggttcttgacagtcaaggctgctccatgtgtagcgaagcgaatccgtagaggtctgctcttgagaatggtgccgtccagctctgcttttgcaatttcagccagggttctggattccaagcggatgaagccgaagccacggtcccggttgatgaagacttcgctgggctcgccatagcgttcgaagagcctcttgaagtcctcctccgtgatgtcggtgggcagatttcccacgaagaggcggcagcgctgcgtgtacgtcttctcgcccggcttgaggaaactcttgatgtcgatagtgaaccccatctcctcgtccgggtggtcctctggaggcgcgggcgcgggcggtgccggctccccggcaagagcgagcgccatggctgccgcggccgccggctcgctctcgcccaccgcggactccagggcgcgaaggcgggccgggtttttctcaatgcgcacttgcttcaggtttcctcttaacatcatcttactgagttcgcctcggacaccggatacaggcctagatttaaagacagtgtgtctatatatatgtatacgtctctacataaacctatgccaacaaaatatcgacaatcaagagaccgctaggtaggcgagtcggcaacccgtcctcccccaactcacgcccgctgcagctgcacattcaaaatggcgctgccacaaactccgctctcgacgaatttcgagctcggccgatttggcctgatnnnnnnnnnnnnnnnnnnnnnnnnnnnnnnnnnnnnncggccgccccgcggtgaatgcaggtgcccatagatgtaca

SEQ ID NO: 352621 - DNA, 1132 bp, Homo Sapiens
  misc_feature (818)..(831): n is a, c, g, or t
ggtccggaattctcgggatctttaaccctggccatgttctcaacccaagtcccagccccagcaccaaccgctcaggccccagccagatggcccttctgccagtcaccaacatcagagccaagtcctggggtctttcagtcaatggcattggccactccaagcatcacaagagtctggagcctctggccagccctgcagtccccttccctggggggcagggcaaaaccaagaacagtcccagccttggtttccatggccgggcccgccgaggggccctccagtccagcgtgggccctgctgagcccacctgggcccagggccagtcagcctctctccttgcagagccagtgccctccctgacctccatccaggtgctggagaattcgatgtccatcacctcccagtactgtgctccaggggatgcctgcaggcctgggaacttcacctaccacatccctgtcagtagtggcaccccactgcacctcagcctgactctgcagatgaactcctcctcccccgtgtctgtggtgctgtgcagcctgaggtcaaaggaggaaccatgtgaggaggggagccttccacagagtctccacacccaccaggacacccagggcacctctcaccggtggccaataaccatcctgtccttccgtgaattcacctaccacttccgggtggcactgctgggtcaggccaactgcagttcagaggctctcgcccagccagccacagactaccacttccacttctaccgcctgtgtgactgagctggccctcctgaggcaacaccacacaggggaaccaggggtcgccccggnnnnnnnnnnnnnntggccggcaatgctgtttaccctggcaacccctctgtaccgccagattcgcctgtatccctggatatcaaaccgagaaatgggggaaaattgaaaccctttcctaaatggacccgcctttttccccccggactctccccccttagtccaccccatgaaactctccgccccaaaccaattccttcgggaattatcacgcctgccccaccccttataaggccgctggaacaggcccgaattggacctgcttttttcaaaatattgcgcacctccgagcgattaccccccactcgcacctccgg

SEQ ID NO: 352622 - DNA, 342 bp, Homo Sapiens
acctttgatcaggagtgagattttcgggttctgaaacctgggacacgagtctgcgaatagtcggttttctcagaataatttgaatctgttttcttagttttcaaatgaccatttccctgatgctctgagcttatgatcacacagagccagtccatcctcatttcctggtggcatctgttcatttacctttgtggactgtagctgatggcacagtgcgggttccctaccagccaggggtttccaagggacctttggaggccatgcttagacacattcctgtacctgagaacaaccacataggcaggaccagatccacatcgtgcagtcgtgtcataaaaaaac

SEQ ID NO: 352623 - DNA, 1854 bp, Homo Sapiens
  misc_feature (64)..(64): n is a, c, g, or t
  misc_feature (1761)..(1761): n is a, c, g, or t
  misc_feature (1767)..(1767): n is a, c, g, or t
tagcaggctggtaccggccccgcgtattggatatcgtcgaccaggccgtcgcctgtttgccagnggaaagaacctatagacttcgtgtgattgggaggggtggcagacaggaagaaaacatgtccaggcccctggtctccatagagaatggtgctttgtccaagaaaacgtatgactttctgattctccgggagccgttcaatggtgaggttgatgggaagacttccttcccaaagaaaatagatcctccatgcaggatctaggagagtgactgggtgtgccaaaatatgcccagggtcctgccctcagcactagatttaatggggccaagagggtccaaaccccttgctaacataccacttctttgtttaactcctttacctttccagccctttgaggagggaccatgagaacagaaattaccttatgaaaagctacttctgttcctgctttccctctcacgtattgacggtttatttctttgacctcccagagggctgaactctttcaactctgcgctgcccagccttctcagtggacttgcccctcctaagcagagaaggcctatgaggttgcttgctgctgggaagcctggcagagccaattaccaccctctgctgcttagtgcttgggtacctcttgcaataaccagctcttagttgttccctttccctggggcttttccatttaacacatggagcccttcccccagaaggctacttccttgttttagaggaaggtactgcccattgggagatggggacattgggacctcagcaatgaagaacccttgtgaagtaaccaggaggaatggggaaagaagcaagttgggcaggatatggcctacttccataggcttttcttttttcaggtttgatgtaagcatgggcttacatcccccaggtacatacttttacttattgtgggataacctggcactagtaggcaggtaaagtcacaaatttggtgtcttttcaccttttgactgttgacttaatagctcctctcactctgcctggagatacttcctgcctcagatgaggagccagaagaaacagagcccgacttgaatgaactcagctcagagttctaaggaccagcattctgggggccattttctctacaggcaaatggaattgcttttccataacatccaaattgtaatgtggttgctgctgaaggaggaggcagcagcgaggtcctgcggtacccatggggtgatgctacttctgcatgcatctacagggcatctgacacctaacatgagacgtggcatgtgagatgagacttggcatgtgagacatagggtcactagagacccttctgggtcagaggagagagactgaattggactaaacccgtcctctgttcccagcacgtttctcatatagccctcagtcactgagggagtcccccgcaggattggagaggcacattcccttgggacagaggctacaggttggagctttttttcccctgtcccccaaccccatccccacctccacttcagaacatggcaccccacccaactggccaagtgttaagtgatgtgcttattgagagcaactccgggtgtcttttaaaatgtagagaaaaggtgacagtttaaggaaaaatatatatagaataccagaaatgccgtttacccggagaatttttttctccccatttgttttgtttttactcaatgacaccatttttagttttatttcctgatagcaaaaggaaaaaaaacacccatccctcaaaaaggccaaggtncccgtnccccctgttgtcggtgatttgtttgtcctttctgataggttgaaaattgtgtaataaacttgatgacgctgtcaatctttaaaaaaa

SEQ ID NO: 352624 - DNA, 914 bp, Homo Sapiens
aggctggtaccggtccggagtttccgggatatcgtcgaccacgcgtcgaagctgcagagatcagcgtcagtcgcatccagttgcgtgcgcagacagccccattccgggggggccaggcagagacccttagggcaaagctcaagacccctgggcccctcctcctctcccctcgcagtgcccctgggcgatcacagactgtcaggacccgactgcagaggaagctacagggcttctgccccattggcccctctggtctccctgaggcccaaggaatctagtgctgtctgacccccctgcaggctggtgggcaggagtggggagtctaatttcggccttggggaggcctgtggagttctaagaagaggcagtgtctgctgtgcccagccttgaaggcgagttaggagttgcacagtgatgacaggcagaggcaggggcagaggatggaggcagaaccgggactgtttctcctgtgcgtgatggaaggttgcgagcagagcaaagccaggggcagaggatggagacagggccaggactgtttctcatgtgtgtgatggaaggttgcgagcagagcaaaggcaggggcagaggatggaggcacagctgcatgtgactgtttcttgtgtgcatgatggaaggttgcgagcagagcaggaattccaccggtttgggtgcagacaggtatgcctctgcctggaggggaagggaaggtggtggtggtgactgacagcctggagccctggggcggtgggtgctggattctaggtggctcagagggcacgcccgccccggctctaagcttcctgagagcagctcgtcatttcttgggggcctcatgggaagatcatggttgtggccccaccaatgcccacctgggtatggctcaaggagcaacagtgcagagaggggcggagcag

SEQ ID NO: 352625 - DNA, 988 bp, Homo Sapiens
catgccttccagccttccaagttgaaggccattgtggcgagtaaggccagccagttcacaggctatgcacagcatgatgcccaggagttcatggctttcctgctggatgggctgcacgaggacctgaatcgcattcagaacaagccctacacagagaccgtggattcagatgggcggcccgatgaggtggtagctgaggaagcatggcagcggcacaagatgaggaatgactctttcatcgtggacctatttcaggggcagtacaagtcgaagctggtgtgccctgtgtgtgccaaggtctccatcacttttgacccgtttctttatctgccggtgcccttgccacaaaagcaaaaggttctccctgtcttttattttgcccgagagccccacagcaagcccatcaagttcctggtgagcgtcaacaaggagaactccactgcgagcgaagtattggactccctctctcagagtgttcatgtgaagcctgagaacctgcgtttggcggaggtaattaagaatcgttttcatcgtgtgttcctaccctcccactcactggacactgtgtccccatctgatacgctcctctgctttgagctgctatcctcagagttggctaaggagcgggtagtggtgctagaggtgcaacagcgcccccaggtgcccagcgtccccatctccaagtgtgcagcctgccagcggaagcaacagtcggaggatgaaaagctgaagcgctgtacccggtgctaccgtgtgggctactgcaaccagctctgccagaaaacccactggtcctgaccacaagggcctctgccgacctgagaacattggctaacccttcctggtcagtgtacctgcctcacgcctcacttatgcccgcctcgctcagttgctagagggctatgcccggttactctggtgagtgtatttcaagccaaccctttcagcccagggccccatggccctttgggagtcctcaaaggccttg

SEQ ID NO: 352626 - DNA, 319 bp, Homo Sapiens
aagggagacctctccctgcggccagaggatggcgtgtgggcgctgcgcctctcctcctccggcatctgggccaacaccagccccgaggctgagcttatcccagcactgcggccccggagagtgggcatcgccctggattatgaagggggcaccgtgactttcaccaacgcagagtcacaggaactcatctacaccttcactgccaccttcacccggcgcctggtccccttcctgtggctcaagtggccaggaacacgcctcctgctaagaccctgagccctggacatcttgcccccagccccaaccctcagatgcttca

SEQ ID NO: 352627 - DNA, 258 bp, Homo Sapiens
  misc_feature (60)..(68): n is a, c, g, or t
ccgggtacctggaagcttgaggcagcttgggttcaaatccttgctccatttcctctctcnnnnnnnnnaaccaaagtccagttccaggcttaccacatatcctatttctctttatacctgtgacttcacctctctggatccttaattccctaagtgggatttttaagaggactgttgtgaaaattaaatatattaagtccaatttaaaaaaataaaacaaatatattaagtgctttgaggccaggcacagtggcttat

SEQ ID NO: 352628 - DNA, 735 bp, Homo Sapiens
  misc_feature (17)..(17): n is a, c, g, or t
  misc_feature (257)..(257): n is a, c, g, or t
  misc_feature (485)..(541): n is a, c, g, or t
  misc_feature (575)..(575): n is a, c, g, or t
  misc_feature (596)..(596): n is a, c, g, or t
gaattctccagttatgngaacaatcacagtcttttaagacaatacttagatctaaatgcaaaatctagcatgcagaggctttttaaggattttagactgtctccaaagaacttggctcgagatggattacacagatttacaaatgcagttttcaactgtgacatcaaactgatcttatctcatttcatgttactcaactgtgcccgtaggaccccaagaggtggaatatttggtctacattattttaaacatctatnagatatggtgtggatgtgtgaataatgcctaaatttctcatcttttaactagtttgtttttatcatacagacacagcctgttcataagaccagctttagacaacttagaactcaatgctctgaagattcagggaggccaacatagaaaaagatcttccaaaatatggggtggtccaacccatctcatccctctctagctggaaaactatagagaaagggctgtgactnnnnnnnnnnnnnnnnnnnnnnnnnnnnnnnnnnnnnnnnnnnnnnnnnnnnnnnnngctgaatcagtgaatagacaaaaaacatggattntgccttctgaaaatctcacanattttaccagcttatattatactgattgtcactatgatttctaagtttcatggttagaaccatattttgagtctatataaaaactttttagatgtatgaacttgaacattcattaaatacttttgggatacagagtttt

SEQ ID NO: 352629 - DNA, 1048 bp, Homo Sapiens
tcccgggattccggaaagctttaatgtgtgtgggagtgttctgggtctattaggtctgtgcgcatgggtgtgggcatttgcctgtgtccaccgggtgggtctcattatgaaatgtatgtttatgtagggctttaatggctgaaaatggcaaagagatgaatagaccacttggccccatgtgtaattgccaggccccttctgtgctcaaatgaggtgtccgagtgaaagtcagcccttcccttctgtatttggggcctatttatgccaccagtaattttataagaaatctgaatagttctcccctttgagtgcatttaactctttagtatcttctctcttacctatttgagcccctctagctacagtctggcttaaatgaaaggggaattatatgcttaagaaaaagtaggacacggttgaggcagtttgctgactgaatacgcgaagaaggacctgatgggctcatatgcaccactgccatcacagtccccatcgtgatgcaagcttatatgattcgataaaccgatcaataaatgtcaagtccccatcgtgatgcgcttatatgacttgagaaacagcccagatctcctcttaagcggaaaagagattgaccttctagcagaggcaaagaatggagtcttctggggggcagctgcaaagcgttctccctaggacagatggagcctccctttcctcatctactctgtgggtggtttcagggcccacgagtcaacatgaggagttgtgctggtggtatgtgtgttggaggctgggctggctgattcacagtgacgaggatgtcaataataacaagaatgagaatgatgatacctaataaagactttttttcccacaaacaacttaatcttttatcccctacggccgggtgatatacggtgaaggggtcacattactacgcatgaacacacctcgggggggccccctcataaagaaattccccgggggggccccagcttatcggttccccccatttttttgttaaaaagaggggccccctagggtacgtcgcatctgataactctgccgc

SEQ ID NO: 352630 - DNA, 2198 bp, Homo Sapiens
  misc_feature (2021)..(2035): n is a, c, g, or t
ggccccggcctcagtttccccaaatatttattaagtacctactgtgtgcaatccttgtgtaattattacctcttaggctcttcatttgccctcctaaagcagtgtttagagtcaggcagaggttaagtgtgttgcacctcacctagatacttccagaaccttctctgggtctgcagaatgtggcacaacctgcttgcccccgcagagagaaagctgcagtgcacatcctgcagactgcaggtgctgggctgcctctggagtcccagaaggcaagcttggctgcaggacagaaagggagaacagcttctctcacccctgagccttcacaagcccttgtctatttgccgttgccttcaaaatatacctcccccgaaaccagtagctttctgagtcctggtgtcccctccgccctttctggacaggtttgggaagaagaaagcagtcagtgctgggccttattggggtgtgaagcgccttgctctgccccttctgctcactgtgaaggccgctggatgcttctcttaggcatggtttaagcctccgattactaaaccccttgccccacaaacgtccacattgacgagcctctttttagtaactgcttccccgtaattccttcagaggttgctgtacccttcgctgatgtgctgccctcctgtaaaacctccagatgccttcccacgtaatgcccctttcagatgctttaagctgagagcttaaaccacaggtaccatggctgacgcctgccaggtttctgctgcagataatctatgatgggaggggcatattgtttacttcattacttatgtaaactcttgttccagaaagctttaatgtgtgtgggagtgttctgggtctattaggtctgtgcgcatgggtgtgggcatttgcctgtgtccaccgggtgggtctcattatgaaatgtatgtttatgtagggctttaatggctgaaaatggcaaagagatgaatagaccacttggccccatgtgtaattgccaggccccttctgtgctcaaatgaggtgtccgagtgaaggtcagcccttcccttctgtatttggggcctatttatgccaccagtaattttataagaaatctgaatagttctcccctttgagtgcatttaactctttagtatcttctctcttacctatttgagcccctctagctacagtctggcttaaatgaaaggggaattatatgcttaagaaaaagtaggacacggttgaggcagtttgctgactgaatacggcgaagaaggacctgatgggcttcatatgcaccactgccatcacagtccccatcgtgatgcaagcttatatgattcttgaggtaactctaccagatacttccagatttagaaatgtgtcaaaggaaaaattggtgatactcttctttcccctgccagaaacagcccagatctcctcttaagcggaaaagagattgaccttctagcagaggcaaaggtaaactcctgtaagttacttctgttaccaaagggaggggggcggcttttgtgaatgtatgaggagcttttgccagagagatattcggaggaggggtgtgcccatatgcacacatatattttcccgcataaccgtatcccaatgctagcatttagaggaaggcatttagccacccaaaagtccatccatctatgctgcttccacagagaaaacattttctctttcctcctcttgaacttacataatatcctcctcccattccaaccttagaatggagtcttctgggggcagctgcaaagcgttctccctaggacagatggagcctccctttcctcatctactctgtgggtggtttcagggcccacgagtcaacatgaggagttgtgctggtggtatgtgtgttggaggctgggctggctgattcacagtgacgaggatgtcaataataacaagaatgagaatgatggtacctaataaagactttttttcccaagtcccatctacaattctttcattgggtgttttgccaagtctttctcaatctcatctcagcnnnnnnnnnnnnnnnaaaagaaaatgtattcaatacttaattgcatcacaaatgtagacatagaagaaaggacttcaaacggaatttatgggaggcaatgtgtgcggcttttggccttatagagctgtgtagaaggtctggaatgatcttccagcaccaaatttagatggcctcaaaa

SEQ ID NO: 352631 - DNA, 721 bp, Homo Sapiens
ggatgtccggaggctcccgatgttccactggccacgtcgtcatcatacaagagccgctgatgtcagccccgtagatcgggggagacaaaggtgaggttcttccagtatttgcgttcaaggtcgtcaaagtcctggtgccgcggggtacagtacttctcgctgttggccagcggcggtactcgcccactgtcatggccttcttctggatattgtactgcgtgaagaggcccgactggcccgtcacacacctgctggatgggcgccgggatcaccacgtcgtcgatgtcatcatacgtctgccgcggcttccactccttcggggggatgatcttggccagggcccccggacccccgggttggggggccttcccctgcgactctatgtaggccacgtatttgttgaagtctttaaattcttccatggttgggcgaaacgtcatgattttacagctggggttctgggcgccgtggtcctcagaccccatggctgcagctgtgcgggaagcacacttctggatggcgaggttcctgggtggagatgctccaaaaattcgctaggatttgtcaggtgcctccagcaacagtgatggttcctgaggcggcgtgcgcggcccggtccgggagcaacggcgcgctctcccccgccctcggcgtcagcacccccaggccccgctcggccggccccgctcgttgctatcccataattccgggcgtacagccg

SEQ ID NO: 352632 - DNA, 333 bp, Homo Sapiens
  misc_feature (26)..(26): n is a, c, g, or t
  misc_feature (34)..(34): n is a, c, g, or t
  misc_feature (36)..(36): n is a, c, g, or t
  misc_feature (51)..(51): n is a, c, g, or t
  misc_feature (222)..(222): n is a, c, g, or t
  misc_feature (258)..(258): n is a, c, g, or t
  misc_feature (262)..(262): n is a, c, g, or t
  misc_feature (278)..(278): n is a, c, g, or t
  misc_feature (292)..(292): n is a, c, g, or t
  misc_feature (299)..(299): n is a, c, g, or t
  misc_feature (303)..(303): n is a, c, g, or t
actctgcctggccaggccctgctaangggcaganantgaaggctgggaggnagagcagtggccacagggggacagggccctcttcctccctggggctcgggtggcctcagctgagcttgggtaagccccggctcttagaccctgcggccagaggcttggcctcctgccagctgaggtgcatgcatgcgggggaggggctgccatctctcctttgaccctggnccaggggctggggaaggaatggaggctcaggcctgncccnctgcccccacaggtcnaggcccctggggcncaggccncctnaggcatgcagagaagggcctccattccttc

SEQ ID NO: 352633 - DNA, 1157 bp, Homo Sapiens
  misc_feature (779)..(780): n is a, c, g, or t
  misc_feature (868)..(869): n is a, c, g, or t
  misc_feature (894)..(894): n is a, c, g, or t
  misc_feature (945)..(945): n is a, c, g, or t
  misc_feature (947)..(947): n is a, c, g, or t
  misc_feature (973)..(974): n is a, c, g, or t
  misc_feature (992)..(992): n is a, c, g, or t
ctggtacggcccggaagtacggatctccgtgcggccagagctctagagagtggtgccgccttccaaccttcttccccaagccctggtggccggctccgcctcttctcgaatcttttccacagcccaaaatggccgcagaggtgtattttggcgatctagagctcttcgagccgttcgaccacccagaggagtcgattccgaagcccgttcacactcgcttcaaggacgacgacggcgacgaggaggacgaaaatggggtcggcgacgcggagctacgggagcggcttcggcagtgcgaggagaccatcgagcagctccgcgccgagaatcaagaacttaaacgaaaattgaacattctgactcgaccgagtggaatattggtgaacgatactaagttagatggacctatattacagattctattcatgaacaatgctatttcaaagcaatatcatcaagaaatagaggaatttgtatcaaatttagtaaaaagatttgaggaacagcagaaaaatgatgtggaaaagacttcctttaatcttttgccccagccatccagtattgtgctagaggaggaccacaaagtggaagagtcctgtgccattaaaaacaacaaggaagctttcagtgttgtaggaagtgtcctgtattttactaatttttgccttgataaattggggcaaccgcttctaaatgaaaaccctcagctttccgaaggatgggaaatacccaagtaccatcaagtcttcagccacattgtttctctagaaggggcagannatacagtaaaggcaaaaaggccaaagccctcactggtttcaattgtggggttctgaagaacacaaaatggaaggattgcccaaatggnnctcggaatggctgggctcgaaatangtggaaaaagagaaaaaagaagtatatggggatgccctggtggaaggaagncnaaacacatcaggaattttccccagcnnagcgattacccacggccngaaaggaaaagtagaaaggaaaggattttgggaaggaattcaaagggcacagggaggttaatttaagttggagggaaaccttttccagggaatgcgccctctagggtgggtggaaccaaaaaacaaaagaaggtctcttccccaccccttttttttaattcttat

SEQ ID NO: 352634 - DNA, 369 bp, Homo Sapiens
aacagagatttagcagttaagttgaatataaacagtaggctaaagctatatcttaccctcaaatctgggtgaaatgatcagtttggttactgctttatatttttctgaaaaataatggaaagacaaatatatttaacaaactgtggcttcagaaatatcattgtagcaaacaattttattaatactttcataaaaatggcaattaataaattctaataccttgatgttattaaaagcaaacaaaagtcattaaaacagttcttttctgtgatttacatgagcttttacagcattacttgatttttctcttacaaattaacctaaaatactgataatcaaatcagggtaaaaacaatacaatgctctgcc

SEQ ID NO: 352635 - DNA, 813 bp, Homo Sapiens
  misc_feature (46)..(46): n is a, c, g, or t
  misc_feature (61)..(61): n is a, c, g, or t
  misc_feature (198)..(198): n is a, c, g, or t
accctgaaaagccccgggaatcaaacatgcaacctgtggaaaaaanacccctgggaactcnaaactcgggcaactcctgcaaagctggggtaacttggggcaaggaacagcagcaagcactccatgaaactgggcagcacctgttggtgagggctggatcacatggattctcctcatcccagccttacaatcagtccntcaggtacatactttttctgactttgctgatgaggaaactatgcacagaggttacacagcttaacaaagggttctcacctaatgaacaatgaaatgggattttagcctttctttgcatctggtcttagagccaatacccaagaagcactgtactgtatgcattgtctcagagaaacttactctccctgggcctcagtctttaaaaggtgggcagttgacttaataagaattaaagatcaatgattaaggttcaaggcactccaaaattctggtctttattgaaaaggctacagaagtctcaccttaataataccctatagacttgatattcttggttaattaaatattggaaaccaatttcatagtaattgaggtcagaaaaaagtactcatgacattttagaatatgatgacaaagccatagataaatttcaatgcacctgtaattacttaaaactgttatagcatgcaatgtgttaccacaacagccagagaaatactaatttactcagcctattcttctagaccagtaaacactaggattaaatagatattttcattgaatttgttctacccttcattgccatttatagatagcttacttgtcatagattac

SEQ ID NO: 352636 - DNA, 829 bp, Homo Sapiens
  misc_feature (174)..(234): n is a, c, g, or t
tccctatttaagattctgaaggtgctaccattattttgccacagactttgaagaaacttttggatgtggggcatcatccgcatctttctctctcctccaaatgacaaagtttggggaatttttgaattttcctagcatcgcccttgtgctcatcaggtaatctgctaaggaggnnnnnnnnnnnnnnnnnnnnnnnnnnnnnnnnnnnnnnnnnnnnnnnnnnnnnnnnnnnnnccctaccagaaaccagaagtagagagatttaccatataacttatggactttgaaatgtctgtccttttaaggcagcagggaggcctgggtgcgaagcatgttggcttggcccttcacggtcctggagggaggtgaggctggccttggaaggcgtgccctggagaggtcttgggtgaaaacttgaccttgaagaaaccaatcacaaaagcggcgttgggtcagggctaggcttagaggtgaagcatcaacatggaaccatctcaggaagccgcatcgcctcttccgaggtcctcacttccaggagcctgtccttgcaagatgcaatcattcgttcctgctttttcattgtcattaaattctgtagaaacccattgtcattagctccaagtgtaaatttgggtcaaggagacagaataataatgggaatctcggagttcgacaccatagtgacgttcagcgtcctctgaattgtgctacatcagcgaacaagtcggcgcttgaattggattttgaggttattttaaccatggaattatttttatagaaaggggaaaatgttatgtgaaagcctctatttgtgtaatttctcctccca

SEQ ID NO: 352637 - DNA, 884 bp, Homo Sapiens
  misc_feature (548)..(608): n is a, c, g, or t
  misc_feature (782)..(793): n is a, c, g, or t
tgggtttaaaaataaaccctcaaaaaattccaaatttcaaagcgcccgaacttgtttggctgattgtaagcacaaattcagagggacgctgaaaggtcactatgggtttcgaactccggagattcccattattattctgtctccttgacccaaatttacacttggagctaatgacaatggttttctacagaatttaatgacaatgaaaaagcaggaacgatgattgcatcttgcaaggacaggctcctggaagtgaggacctcggaagaggcgatgcggcttcctgagatggttccatgttgatgcttcacctctaagcctagccctgacccaacgccgcttttgtgattggtttcttcaaggtcaagttttcacccaagacctctccagggcacgccttccaaggccagcctcacctccctccaggaccgtgaagggccaagccaacatgcttcgcacccaggcctccctgctgccttaaaaggacagacatttcaaagtccataagttatatggtaaatctctctacttctggtttctggtagggnnnnnnnnnnnnnnnnnnnnnnnnnnnnnnnnnnnnnnnnnnnnnnnnnnnnnnnnnnnnncctccttagcagattacctgatgagcacaagggcgatgctaggaaaattcaaaaattccccaaactttgtcatttggaggagagagaaagatgcggatgatgccccacatccaaaagtttcttcaaagtctgtggcaaaataatggtagcaccttcagaatcttaaatagggannnnnnnnnnnnccttaaaaaaatcacatacactgtgagagacaattgtgagcaccagcgatttcacagtgggaggtagcaaacgtgggcacccccagcccga

SEQ ID NO: 352638 - DNA, 2538 bp, Homo Sapiens
  misc_feature (36)..(36): n is a, c, g, or t
  misc_feature (67)..(67): n is a, c, g, or t
  misc_feature (207)..(207): n is a, c, g, or t
  misc_feature (383)..(383): n is a, c, g, or t
tgagaagttgtttgccaaactcctcattccctgggntaacacacatcacactgtttaagagtggggnaaaaaatagtccatactgttagagcacaatgtttcctgaaaaagaaactgatcaaaacgtttgaaagcctttttagttgcctcaaagtgtgaacagccactccaatactgctcctaaacagtctgctttcagataacgtncataaaataaaataactgtgtgaaaagccatggccttcaaaaaactttatttggttatgagccaagctctgataggaaaagcccacctacgaaaaaaaaggtgtgggtatttaagctggtctgattcacagagcttgtacattcatgactcaaaataacacaccctcaaacccaanatgattctaaagccatttcaaccttaaatcatgttattcccttagatgtgcttacattagctttaaaaaatgatctacgtgcagagaggagctgcgccttcctcacaattaattgaaacatgaccaaaaaacgggggataggcaaaaaagtgacatttaaatagcgtatgagggtctctcctcctttactcaatgaacacatatccagaatgagattgaaatggaatcaatgcccaggagcctctcaaagagagcatctccctgtagccaacatgatctggatcctcctaacacaaagcaaccccaactactccagctacacaaagccagtaggcctacatatgaaacgcaaaggggttgcatcccccacggtttaaacctaacccatgttagctgcaactccactacagtcttgatcacttagctcaggaaacaaacacccagcaacaaccctcgtatctcattaataccaatctgtggccctcactgactcagtggtacttttttataaaaatatctgaagaagtggcaaacggttacaacggatgtcaggtcgaagcaattccaaaagctgagaaaacgcttcatccgctgcttgtcttctccccctattgctacagttctgccaccaaagggggaaaattacgtgaatatgattgttgtgaccaagccttggcaaaagtcaataaataacagaacctgtcaagggcagagcaattttatgggcaacctcttctagttgcaaatgtgggggttgggaaaagtgggagagaggcatgtgtgcaagaaagagataagggtccttttgggaagggtttggtgacccagccccagctcaatgccagcagactaggacccgctaaaacccattattcagacggaaaggggagaagagaagacaccaaaaaatgtagtcagttttgcaatttgcacagttggtatttgttcttcacagcagtaaggacttgaatgagaatcgtgaaacttgtggaacacttatatttttcttcgggatttaagaaactttgtctcgtactgaaagactacattcagtgtgggtcaggtccaacagtgttagccagaacgcagttgttaagcgcacccagcactgggaggaaatgtggcttgagaggagcggctgcccgaggccgccccttcactggtctccaagtcgaaagccctggccccagttgtgtctcccgcctccgccattctgatcagcagctcgcctcatgctagcagggggcacaccaaatcctgatactcctcctctcctactgggcagccagcggtacaaaaactgaggtgtggatagaaaatttcttcctcccaagtccattgggtatctgaacattaggaaaaaataaagatgtccaaccagatttccaataagctcattgattaccgagcctccgatgatatagttgaatccaaggataacccagggtaaatagcaggccttaaatcgtgttccaaaccaaaatgatacaatcatgtctctgttcagctgggcccagacataaagtactgacatgatcagaggaatcatcagcaactgcatatccattgctaagccagtaatcacgatgcaaatccagttaaagaggagcatgaataaatagtctgctggcctcccatcaaaagctcctgtttcaagtcgcgtagaatactgatataagaaatataaattgaccaaataaagaaatccagttcctggacccacagggaaataaaaggtggcagtgattggcctccaaatctgaaagcgataaaggaaggcttcgggccagaggaagaggtaggccgggctgatgaggccgagtttgccgaccaagggcacggcgacggtggcggcgaaccaatagcgcgtgatcgccgggatgctcctgaaccagtctccgatgtccgacatcttcgacccacaggtagccaagatgcacaagaccgcccgactccccgtgccgaccccctcacgacgcggccggctccgcgactgttaggtgtctaggtggaagccgccgaagccgcgatgcagaaggcggagacgggcggacgtggcgccaccgaattcggaccagcgaggcagccttctgaggcgaaacttccccttccggcgaccgcggacgacgtgaccagaagtcccgccgcttaaagg

SEQ ID NO: 352639 - DNA, 795 bp, Homo Sapiens
ggggagctggggagatcccggcaccttctgagacacgtgagtgcccagctagcctggcagcctctgctgggccttaggtggggtgttgggcagaggcctgtggttgggagagggcagaagggcagccagggagtcaggggctccatggtccatgctatcattgggacttcctcctgtagtttctctgaatgttagacattgtttattaaattagtcttcagagattatgcagatcatccatacttaccacaaatagtgaagaaacatcaatacataaagaaaagaatctcccaacccccgaccatgaaccctctgaaaataaagggtctcaagtgtcctgatgcacgtcccctcatgtctccctgcacatcacacatgcataatcagggcctggggtcgggctctgtgtgtgtggtgtgctgtgtctgagtgcttgctgttcgaggggtgggtcccccaggctgtggttgggtctggttctttagttgcccagcatcgcgtgctcagcccatccccatcctagaggtgggctctctgccccttggagtgaagctgccctgacacctcctgacttgtgtgcccatatgtgaggctctgggcactgtgggtggactcctcaggaccactgggcaagtggtgtgtgagttcgacatttcacataaaatagaaacttccatgtggttttccagaagttttgtggctgttcattaccagcacggaaggtgcccactggcctggataaaagcccagcaatatgtgggtgttgcttttaaggatttccacggaggccaagga

SEQ ID NO: 352640 - DNA, 1790 bp, Homo Sapiens
  misc_feature (49)..(85): n is a, c, g, or t
  misc_feature (1234)..(1235): n is a, c, g, or t
  misc_feature (1316)..(1421): n is a, c, g, or t
ggatgatacatcactatagggcgaattggagctcaccgcggggcggcgnnnnnnnnnnnnnnnnnnnnnnnnnnnnnnnnnnnnnatcaggccaaatcggccgagctcgaattcgtcgagagcggatctgttgcatcccggctgctgataaaacaagaccctcggagccaagaaacaacactgagttccagatttcggaaggttcacgagtgttgccgacacgccctcccaactgcagacatcctccctggaggacctgctgtgctcacatgcccccctgtccagcgaggacgacacctccccgggctgtgcagccccctcccaggcacccttcaaggccttcctcagtcccccagagccacatagccaccgaggcaccgacaggaagctgtccccgctcctgagccccttgcaagactcactggtggacaagaccctgctggagcccagggagatggtccggcctaagaaggtgtgtttctcggagagcagcctgcccaccggggacaggaccaggaggagctactacctcaatgagatccagagcttcgcgggcgccgagaaggacgcgcgcgtggtgggcgagatcgccttccagctggaccgccgcatcctggcctacgtgttcccgggcgtgacgcggctctacggcttcacggtggccaacatccccgagaagatcgagcagacctccaccaagtctctggacggctccgtggacgagaggaagctgcgcgagctgacgcagcgctacctggccctgagcgcgcgcctggagaagctgggctacagccgcgacgtgcacccggcgttcagcgagttcctcatcaacacctacggaatcctgaagcagcggcccgacctgcgcgccaaccccctgcacagcagcccggccgcgctgcgcaagctggtcatcgacgtggtgccccccaagttcctgggcgactcgctgctgctgctcaactgcctgtgcgagctctccaaggaggacggcaagcccctcttcgcctggtgagccgccccgcgcccgccgccttgcctgcagtaaacgcgtttgttccaacccggggccgcggtgcctcctgcgcgtccccccggaggggaaagggccgcgtcccccgcgcgcgaggccagagaaggccccgctcccaccggtgctgggccccgaccgcagcccgccgctgcccgcacctgcggagtgcttctcacccctcattaaaatcatccgtttgcnncaaccgcccagaaagccaagacccgagacccacgcagccaaacgacgtggcagcggccttcccacccttaatgcccttcgnnnnnnnnnnnnnnnnnnnnnnnnnnnnnnnnnnnnnnnnnnnnnnnnnnnnnnnnnnnnnnnnnnnnnnnnnnnnnnnnnnnnnnnnnnnnnnnnnnnnnnnnnnctgtcccagaggggccccctatggggccgcgtgcctctcaaaactagccggggggcgcggcctttttataaacacgctggcgccccgggagaaaagccgccaatcactgggccctttcccggcggaagggcccaccccctttgggggggcgcgggcgcccactttggagaaactccccctgcagagcgtttttagggcttctccggcgcccaataataaatattctctcccggccgcctcggcccgtagacaccaaccccgccattaccgcgtccgtgtgtggcagagatgtgccttcttcccccgcccctctttccccgcacaacccttttccatctacggggccccaacaccgcaggctccatgggg

SEQ ID NO: 352641 - DNA, 366 bp, Homo Sapiens
  misc_feature (141)..(141): n is a, c, g, or t
ttcctggttcccgctttccacttccaaatccctcccctcaccttcccccactgccccccaagttccaggctcagtcttccagccgcctggggagtctctacctgggcccaagcaggtgtggggcctccttctgggcttttnttctgaatttagaggatttctagaacgtggtcaggaatagccattctaggcggggctggggccagggtggggggcagtcactgtgggaggtcccagctccagcccccctctggtttgctgcctcctctcccctctaaaaaaagtcttccgcttgattttgcacaatctccggcgatactcctgggcgatactgacttagaaagtcagggagctgggggagctgtt

SEQ ID NO: 352642 - DNA, 409 bp, Homo Sapiens
  misc_feature (38)..(38): n is a, c, g, or t
  misc_feature (60)..(60): n is a, c, g, or t
  misc_feature (113)..(113): n is a, c, g, or t
  misc_feature (242)..(242): n is a, c, g, or t
  misc_feature (342)..(342): n is a, c, g, or t
  misc_feature (371)..(371): n is a, c, g, or t
  misc_feature (389)..(389): n is a, c, g, or t
ctaggctgtcctggctgtgtgctctgcactccggcttncgcatgagagagactgactgtnggcaaaaacaaaaccaaaacaaacctttacccacttctcctaaacaacccctnaaaaaactgctctgaaaagcagggaatatcattgtgcaaagtaagttgtttttttccacggggctgtctgcgtaaaacttgccacttagagccctgcctgcaccgtcgtcacggcccagcctgcaggtngagcttcctcgcgcccccgcctgacctgagtgcccctccctcagtcagacacagtgtcgtcgccctgcaggaagccagggggcccgtctgctgctcgtgngccaggctgggctttgggggtgcccgacnccctccaagagaaagccnctttaattgcccggcaggtc

SEQ ID NO: 352643 - DNA, 1167 bp, Homo Sapiens
  misc_feature (1035)..(1035): n is a, c, g, or t
  misc_feature (1136)..(1136): n is a, c, g, or t
tcctcccttgtctccatcctgtataactcttattaatttcatgcatatccttcaagtattttatgcaaatccaaaaaaactgaatatcaggccttattttctattgttttgtgtgaatgcagcacattatgtatactactattaaacatgattttttaatatataactttgaacttacagaaaagttctgcactttcctattttcacttaacattttctaaagatttttctatagagattgtccttatttttttcttacagctacatagtaatccattgtggagatgtaccatagttcatttaattagtgctctattggtagatgcttggactccttccagtattttgctagtccagaaagtgcagctgtggagaaccttgtacataagtcattttgtgcatgtgtagatatagccattggatgtacttccaaatgtagcatcattgggtcatagggtaaaagcttttataagaattgaccctccgtaagggttatacaatttcctgcttacttttctattctcaattgttagcctctgccctctcagcttgtaccctaggccccagctacactgaactgcttgccttttcttgaacaaataacacacttgcatttttctgtgcatttgctccttctgccctttgctgaaaagatccttctttctcccctcctctcatctacttggtagacatcctggttaatctttccagacctccaaacctctcaaagtatggaaggccctctcaggccaaacccccccgcatcccactcccatactctatggatacacaagcacgtgctggacaccttccatctgttgacaacatataccaacaaatcaatatcaaataaaaaactatccagaaatacaaaaccctctcttacggctatatcgatacaccaccaccccactcatacccaacacttctgtctaccccgcgccgttcacccgaccccgccacaacgccctccgcgcccgacgcctctcacgctagtagcctcaccacatctaccgcgacgagccagcagtagancacggccgcccacgtacgcaatggacgcagagcgaacacgccctcgtacaagacctatcgcgaccataacaacgaggctagagtcatctatcaccccccgngaaataccgagaaacactcgccgcactaaat

SEQ ID NO: 352644 - DNA, 1145 bp, Homo Sapiens
  misc_feature (51)..(51): n is a, c, g, or t
  misc_feature (54)..(54): n is a, c, g, or t
  misc_feature (448)..(448): n is a, c, g, or t
  misc_feature (936)..(936): n is a, c, g, or t
  misc_feature (1038)..(1038): n is a, c, g, or t
  misc_feature (1103)..(1103): n is a, c, g, or t
  misc_feature (1117)..(1117): n is a, c, g, or t
  misc_feature (1122)..(1122): n is a, c, g, or t
ccacagatgttcttggcagaagcatgcatgcctgacaaagaggccttcacncangcttggcggaggataaatgtgggggggacaccaggatgatctgggggcggtgtgggcagggaactgttaccccctctctcgaggggagccgagcagtgtctctttggggattgcatttcctgcctagcccagtaattcggaaagatgactttcacgtccacagtgaactctctggttttatctgggcgtgcagcaccttgaactgaggcagtgttgcacaaatgtgaatacagcaacaggcgacacttacgtcacctaaagactcaaagtatctccaaaatcaggggccttccaaaggcagggagtcttccccatcccccatttaaacttagtgtttcagttgggacagaggggtggacattcgagttcatggaaacattttcttcatgtgggntcgatggctctattcttagggcgtttcatcacgctctgggcctatttcctgtgaaaggaaataggtagtgttagcacagatggcagcctgggcccaactttctgtccacagggctattgtgcaaacaaatgtgcagtgcgggcctctgccatagcccggccccccccagggaacaggccggtgttgcgggggttggaggaacccaccatctcctgggccttgagctcggcctccctccgtggggtgccttccccccctcctcttgggccccctttctccaggctcccatcctgtccctgggagcagttgtgtgatccgtaacaacaagtgccgattcccagctcctttgtgtctgagctcacttgattgagctcagcgagtcacagttcttgcaggagagaggccggtttctctgagaagtagcccctcctgattaaagcaggtccctttgacccagagctgacctttccccgggcatgcggcaagancacacctgcgcaggaggatcataaaccacttacaaacccacgcgagaagggaagcagacacccaacgtgctgcttatgggagaagcagacacgcccagcttnggggacagcctgggggaccttgggacttttttagcccccatcccttgttttcttgttggcatcanttggcagttttttnccaanaatgggccctgggaaaaaaggcc

SEQ ID NO: 352645 - DNA, 405 bp, Homo Sapiens
cttgcaaatggataaaacacaggaaaatcctgccccccccttccaccagaaaagctagtctaggtgtgagagcccacattgtctgtagccatcaaaaataataataataaactggacagtttacaatcgttggtttctttcaaaaggccttttttggaaagaagaaaaggcagtcaccgttttccacttggggttttggtttgtgcaacaggcaggggaggagtggggacgcgtttgttctagcttgatttccatggcaacagcagcggcacgtttgggaccccagaacccagcaccctcatcctgtggccagaggggccggaccactgaccccttttcaggattccaccacagcccagaccgtcaacgtgacccggtgggcatggcactgtttcccagggggca

SEQ ID NO: 352646 - DNA, 501 bp, Homo Sapiens
  misc_feature (57)..(57): n is a, c, g, or t
  misc_feature (143)..(143): n is a, c, g, or t
  misc_feature (153)..(153): n is a, c, g, or t
  misc_feature (339)..(339): n is a, c, g, or t
  misc_feature (353)..(353): n is a, c, g, or t
  misc_feature (377)..(377): n is a, c, g, or t
  misc_feature (385)..(385): n is a, c, g, or t
  misc_feature (437)..(437): n is a, c, g, or t
cagaacgcgaaggtaactgtttccatgtccccaggtcatagccatcctgtcagtggnagcctctccccactctgcgccaggccacaacccagctggcaggattctcactgggaagactggggtgggggcagaggaggggctgnagaggcaggnaggccaggacggaagggaggtccaggagaggaggagggtgtcctgggaacagtgcatgccaccgggtcacggtgacggtctgggctgtggtggaatcctgaaaggggtcagtggtccggcccctctggccacaggatgagggtgctgggttctggggtcccaacgtgccgctgctgttgccatggnaatcaagctagganaaacgcgtccccactcctcccctncctgttgnacaaaccaaaaccccaagtggaaaacggtgactgccttttcttctttccaanaaaggccttttgaaagaaaccaaccgattgtaaactgtccagtttattattattatttttgatg

SEQ ID NO: 352647 - DNA, 610 bp, Homo Sapiens
ggctctggaacctatcttcttttctccaagttaccatcacctcttgtctaaactgctacggaaacttcctaacctgttctcccatttccacttctgacttccatgctgcaatgagagtcagctatgaaaaacaaacctaaacatcgaactttccttagcttcttcagtggcttccaactgcttttggaataaagtcctaaattcaaagatcttgtataaatcaggctcatctcgcaacacccctctttgttctctatggcctagacacactggctttcagttcattacatgtcttgcctcagaccctcacacactgtcctctctgcctgcaacactcttcctttcactttccacctagctgatcctaaatgttccttcctcagggaggtcttttctgatttcttggtgggtcaagactttctgataaatcagttagcaccatgcattttccagagtttttattacaattgtaaaattatggctgtaataggctggctgcgctgctagattgtaagctcacgagggcagagatcttgttcacatcttgctcactgctatattctcattgctgagcacacagttgcagctcaataaattttgaatgaactcc

SEQ ID NO: 352648 - DNA, 2344 bp, Homo Sapiens
  misc_feature (2039)..(2259): n is a, c, g, or t
  misc_feature (2268)..(2300): n is a, c, g, or t
ggcctgggtggcgaattcggcacgaggccacaatcgaggttttccacagtcagcagagacagggtcatcttctggaagtactgcaagcaacatgcccagcagcagcaagaccaagcctgtgctcagctctctagagcgctctggtgtatggctggtggcccccctcattgctaaactgcccacctcagtccagggacatgtgttaaaggctgctggggaagaattggagaagggtcagcacctgggttcctcttcacgcaaagaacgtgatcgaaaaaagcagaagagcatgtccctattgagccagcagcccttcttatcgctggtgctaacatgtctgaaagggcaggatgaacaacgcgagggactccttacctccctctacagccaggtgcaccagattgtgaataattggcgagatgaccagtacttagatgattgcaaaccaaagcagcttatgcatgaggcactcaaactgcggctcaacctggtggggggcatgtttgacacggtgcagcgcagcacccagcagaccacggagtgggccatgctcctcctggagatcatcatcagcggcactgtcgacatgcagtccaacaatgagctcttcactactgtgttggacatgctgagcgtgctcatcaatgggacattggctgcagacatgtctagcatctcgcaaggtagcatggaggaaaacaagcgtgcatacatgaacctggcgaagaagttgcagaaggagttgggggagcgccagtcagacagtctggaaaaggttcgccagctgctgccactgcccaagcagacccgagatgtcatcacgtgtgagccacagggctcccttatcgataccaagggcaacaagattgctggcttcgattccatcttcaagaaggagggtctacaggtttccaccaaacagaagatctcgccctgggatctttttgaggggttgaagccgtcagcaccactctcttggggctggtttggaacagtccgagtggaccggcgagtggctcgaggagaggagcagcagcggttgctgctctaccacacacacctgaggccccggccccgcgcctattacctggagccactgccactgcccccagaagatgaggagccgcctgctcctaccctgctagagcctgagaaaaaggctccagagccccccaaaactgacaaaccgggggctgctccacccagtactgaggaaacgcaagaagaagtccaccaagggcaagaaacgcagccagccagctaccaaagacagaggactatggaatgggccccggtcggaaccgcccctatggtgtgacagtgcctcccggacctcctgtcaccagccaaaccctggttctataacacaccttaactacaggcaagggctccataggcctgtacacccagaaaccagccactacctgcaggtggcccctcgtgtggaacccataacgtcctgtgcgcttaccaatgcagaagctgcccacccgaccaacttaccctggagtgctgcccacaaccatgactggcgtcatgggtttagaaccctcctcttataagacctctgtgtaccggcagcagcaacctgcggtgccccaaggacagcgccttcgccaacagctccaggcaaagatacagagtcagggcatgttgggacagtcatctgtccatcagatgactcccagctcttcctacggtttgcagacttcccagggctatactccttatgtttctcatgtgggattgcagcaacacacaggccctgcaggtaccatggtgccccccagatactccagccagccttaccagagcacccacccttctaccaatcctactcttgtagatcctacccgacacctgcaacagcggcccagtggctatgtgcaccagcaggcccccacctatggacatggactgacctccactcaaaggttttcacaccagacactgcagcagacacccatgataagtaccatgactccaatgagtgcccagggcgtccaggcaggcgtccgttcaacagccatcctacctgnnnnnnnnnnnnnnnnnnnnnnnnnnnnnnnnnnnnnnnnnnnnnnnnnnnnnnnnnnnnnnnnnnnnnnnnnnnnnnnnnnnnnnnnnnnnnnnnnnnnnnnnnnnnnnnnnnnnnnnnnnnnnnnnnnnnnnnnnnnnnnnnnnnnnnnnnnnnnnnnnnnnnnnnnnnnnnnnnnnnnnnnnnnnnnnnnnnnnnnnnnnnnnnnnnnnnnnnnnnnngcgggctcnnnnnnnnnnnnnnnnnnnnnnnnnnnnnnnnntttccagcgccaaggggctttcagcagaacccagccagcagcaa

SEQ ID NO: 352649 - DNA, 1649 bp, Homo Sapiens
  misc_feature (54)..(90): n is a, c, g, or t
ccgtattatcgaacgctacagagatgggacccgggctgatcgcggtggcggcgnnnnnnnnnnnnnnnnnnnnnnnnnnnnnnnnnnnnnatcaggccaaatcggccgagctcgaattcgtcgagagcgggagtcccgccccgccaggatcccgggagctgtccggccgcctcggtgctgatcccgccaccgcccacgggccgctagcagcgcagcgggcactatgagcgggggcgtctacggcggagatgaggtgggggcgctggtctttgacattggctccttctcagtccgcgctgggtacgctggggaggactgtcccaaggctgacttccccaccacagtggggctgctggccgcggaggaggggggcgggctggagctggagggggacaaagagaagaaagggaagatcttccacatcgacaccaatgccctgcacgtgcctcgggatggagcggaggtcatgtcgcccctcaagaatggcatgatcgaggactgggagtgcttccgagccatcctggatcacacctacagcaaacacgtcaagtctgagccaaacctgcacccagtgctcatgtccgaggctccgtggaacacacgggccaagcgggagaagctgacagagctgatgttcgagcagtacaacattcctgccttcttcttatgcaagacggctgtgctcaccgcctttgcaaacgggcggtccactggcctcgtgctggacagtggagccacccacaccacggccattccagtacatgacggctacgttctgcagcaaggcatcgtcaagtcccctctggcaggggacttcatctccatgcagtgccgggagctgttccaggagatggccattgacatcatcccaccttacatgatcgcagccaaggagcctgtccgggagggtgcccccccaaactggaagaagaaggagaagctaccccaggtctccaagtcctggcataactacatgtgtaatgaggtgatccaggacttccaggcctccgtgctgcaggtctcagactccccctacgatgaacaggtggctgcacaaatgcccacagtgcactacgagatgcccaatggctacaatacagactacggcgccgagcgactccgcatccctgagggcctgtttgatccctcgaacgtcaagggcctgtcggggaacaccatgttgggtgtgggccacgtggtgaccaccagcatcggcatgtgtgacattgatattcgcccgggcctgtacgggagtgtcattgtcaccggcgggaacacactgctgcagggcttcactgacaggctcaatcgagagctttcccagaagaccccaccgagcatgcgactgaaactcattgccagcaacagcaccatggagcgcaagttcagcccctggatcgggggttccatcctggcctcactgggcactttccagcagatgtggatctccaagcaggaatatgaggagggcgggaagcagtgcgtggagcgaaagtgcccctgatggcactcctccccacacacctgctcccaagctcagatggaagtcccttaacccccatgccacattgcccccctcctcctttccctcttgtcctcataaatggtgatgtttctgggttgaaagaagtaaaaatgttttaaaaaaa

SEQ ID NO: 352650 - DNA, 750 bp, Homo Sapiens
  misc_feature (161)..(223): n is a, c, g, or t
gaactaatgactaggtacgagtgctgggtttaaattcggcacgaggctacattcttcctccattatcctcatctgcctccgcgtggctgctgagataccggaggactcgggtcccggctcgactcagtcctccagccgcccggggaatacctctagttctnnnnnnnnnnnnnnnnnnnnnnnnnnnnnnnnnnnnnnnnnnnnnnnnnnnnnnnnnnnnnnnccccgtccgcgcagcgcgtccggcccgcccgcaggccagcttctctcgggagcctccacccaggcgcatggctccatgaagcaagaggaggaggcagagcgcgagagatcccgtccgccccagccgcgtctgggccaggagaaaagcaaaaccatattcctgctgctgtcagttttaatgcactgagaaaacttcagagacctaagctttttccagagaagagaagctttactggtgttccagccctaaggctcatataacattaacagacaagacacttttcagaaagacaggcaacgtgttgggaccttccggagcttctcagaagacagagggtttcttaaagaggctgttgtacagtggcctgattatagctcactgtagcctcgaaattctgggccgaaatgatccgcctgacctcagactccaaagtagctgagactacagtaccgtctggcaaatgatctggcttggatccccctggcttttggagaatcggtggcatagggtgcgactgagaactcccg

SEQ ID NO: 352651 - DNA, 620 bp, Homo Sapiens
  misc_feature (199)..(199): n is a, c, g, or t
tcgccccgccccgtccgcgcagcgcgtccggcccgcccgcaggccagcttctctcgggagcctccacccaggcgcatggctccatgaagcaagaggaggaggcagagcgcgagagatcccgtccgccccagccgcgtctgggccaggagaaaagcaaaaacatattccctgctgctgtcagttttgatgcactgagaanaacttcagagacctaagctttttccagaagaagagaagctttactggtgttccagccctaaagaaacttaaatcctcaagtgtgacacaactcagtccttctactgcagcagctcttttataaaagcctcccaaagctccaagaaggaacaaagaatgtgacccagtaagctcacaccataagtctatattgcagaaacctttgttcaacaaaactgcagatgctctgttgaatccactggagattgtcctgatactaaggacaagtatgggaatttctacttatcttaaaaacatatccagatattgatctgcggagaaatatatctctgttatttcaaggctcatataacattaacagaccaagacacttttcagaaagacagaaaactactctgaaaaactctcttaatgctttttac

SEQ ID NO: 352652 - DNA, 491 bp, Homo Sapiens
  misc_feature (144)..(144): n is a, c, g, or t
agcaagggcatgtgtccacagctgatgggcagttaagaaccagcctgagctgaaggctagtaataccgtgctgtaggctctttaaaaggaaagcctggcataaacccagcatggaaaggaacattatcagttatctcaaatttngtctgccagggacaagaccctgttcattcttttgcccttttcagaactgtgagcttcaagtattcttgcttctctgtaaagggaagacatctcccttctctgaaatccttcaacaaaagaaaaggctcttggcagggtaggggagtcagtagcttcaacactagatcatccctagaggatggggcaagtttctgtctgcacacgtcttgggtccgagtccttaggtgttcggatgcagtactttgtgaatacttcagctactgcatgcttggtgtagcttgcaatttctctgtactttagaagcagctgtgtttattttcttcaaaataacctgtatatatctaagt

SEQ ID NO: 352653 - DNA, 383 bp, Homo Sapiens
  misc_feature (15)..(15): n is a, c, g, or t
  misc_feature (21)..(21): n is a, c, g, or t
ttacaggggtgagtncactgnagcccagccagactctccctattaatcagttctcctgtaatagctgctacacacatatattttagcatctgccacactgtactgctatcattcacgtattaatattccctattcaactgtgagcctccagagagaaaggaccataccttattcatctctatagttccagaacacaggctggacctagcacatctacataagttccttgttagtagcctaattgtggctttgcggccattctttactaactgctcagggatggtgaatattacaggaccattaatggactcttagccattcttttagctctaagatacccaaacaaccaccctcacaattaaggaaggctcagcagaaagaat

SEQ ID NO: 352654 - DNA, 1043 bp, Homo Sapiens
  misc_feature (902)..(902): n is a, c, g, or t
  misc_feature (912)..(912): n is a, c, g, or t
ttaaaaggcatgggtttcgagctgtctcaaaatattgcccaatagccataattttaccagcctttctgtcatatgctgctattacaaagtggaagctgttgaatgtttattggtgcccagggttttgctctccaatctaggttcagttgaaggaatattgtttctaagactgttttgagacatgtccagtacatcacaaaggagatcggggcgacccctgcagatgtggagccattagcccagttgaggatattctccaagttgtcctctctcctgctgatggaaatgggaatgaagttaagtggtctgaaaaacttgaatcgttcacatttctcagctctgggggtcatttaccagtttgttgtagaagaaataatcaggtaagttaaaagttcatttccagagaaggtaaaccccacttaccatctctgcatgatttcagtgggaattgattatcactaatccccaactgggctagaataaatgtaaagtttgacctttttaaaacgaaaagagagacaaagtctcagcacattccaaggagtggtagaaacagagctgaaggtgtccccattgtagattagtctcttctcactaaaatttactttccaacgtagggcctaaaggaaacctttcttaaagacaggctgaaaccccttcaaaggcagatgaggaggtacagacacgtgaccttttggtgcacactggagctacttggacaagaccagcatgccttgctgcacgtgtgtgtatttcactgctgagaacatcctttaacttggtgtgcaatttgaaaggatgtgaatcatggatggaaggccatttgtacatgtcctttggcaaaattctttctggtgtctcctaacttcagagacaggggactcttttttggatctctattngacaagtaantaaaagtctggccctcataacttgtttccgaactagaaaagtctgtgagacccctacatcattctggtttttttgcttgagtaaggacaatccttttttatttttcttctgtacagtctaaagctacagag

SEQ ID NO: 352655 - DNA, 521 bp, Homo Sapiens
ggaatcccaaacagagaagaaagcccccaacataaaggcccccttccccaaaactgggtccctcctttgtgtaccaacaaaccggttttaaaatgtttataaggcagatctctgaaactgctggttccagccgatagccaaaatatggctcaaatttccctgtgtctcttccccactccgatttcttcattgaatagaaacctttcatcccttgggaatccatctctctcctgacccctggcctggtgacttcagagaaaagactccaaagtctaattcccaagctcgcaattccctccgattgtgcactctgtccggggttcaaaaggcgcttcgaggtgagaaatcgttagcactgaaacaaggaaaggcaagaatttttcatagaatcccacagctcagagcagctctttaagaggaaaagggaataaaaggggacggggagagtggggtaggaagcacagcttgttctcaattttatccaaaaagctctttagtggcagctgagccacaaagcccca

SEQ ID NO: 352656 - DNA, 1480 bp, Homo Sapiens
  misc_feature (1470)..(1470): n is a, c, g, or t
gctgtgcttcctaccccactctccccgtccccttttattcccttttcctcttaaagagctgctctgagctgtgggattctatgaaaaattcttgcctttccttgtttcagtgctaacgatttctcacctcgaagcgccttttgaaccccggacagagtgcacaatcggagggaattgcgagcttgggaattagactttggagtcttttctctgaagtcaccaggccaggggtcaggagagagatggattcccaagggatgaaaggtttctattcaatgaagaaatcggagtgggaagagacacagggaaattgagccatattttggctatcggctggaaccagcagttcagagatctgccttataaacatttaaaaccggtttgtggtacacaaagaggaaccagtgtgggaaggggcctttatgtggggctttcttctctgttggagtcccttggagtgccttgttgggtatatttctctgtcattcaggaggcacgaatgtggaggacttctcgtgacctggtcgtgatgtggcactcagtgcatgtccacagctaatggaaaaacacgaggactcgggtaatggttcttcctctcagtctttctattcctaacttttcacacatccagatggttccacactagtgcaaatgcctcactctcctgagaaacccagaaagaagagtggctggctcacaaccatggggttagcccctgctgggctgggagtcggggtggcggccaggaggaaaggcagaaaggggtgagccgaggtgttgcctagctgattttctgctgtgcagagctaatgctgacatttcatgtcaacttccccggttctctggggtctcctctcctctgagcagccacatagaacattccccacatatccaaagctgcccaggggagccgagagaagggactttgctgtcaggtccaagccctcctgacctccctgagattgatctgccagtgtcctgctgtccctctgggactggccacatggccatcgctgccccttgttgacacctcctttctgtgtgagttgtccccggccaataacaaagctgttccttgaaccagaacaaccagagtgcacttttccttccttagacggaagtagatcctggctagggtttctgcccaggcccttgttcccggcagtgtgactgtttacatggtttggcaataggtttgaatctgattgcttcagagtggctggtctattttgtttcctttggtttccttcctccccaaattgtgacaggaaaaacagaccaaaaccaccctaggaaattgctggttgcctgtccccacgtgatgataaatgttgccctcttctggatatcgtttctctaccttacgaccaaacgcccgtcctatagagtgtctgattggatcctctgtcgcgtattctgatggtgcctgctggtttgacgtggagctatcctgtgaaataaaacagaaanaacttttctc

SEQ ID NO: 352657 - DNA, 1547 bp, Homo Sapiens
  misc_feature (53)..(80): n is a, c, g, or t
  misc_feature (99)..(124): n is a, c, g, or t
  misc_feature (246)..(286): n is a, c, g, or t
aaagttacggctaggtacgaggccgggtggtgaatcggcacaggctggttcannnnnnnnnnnnnnnnnnnnnnnnnnnnacagatgaggtcttgctgnnnnnnnnnnnnnnnnnnnnnnnnnntattcacagatgctatcatagcacactacagcctccaactcttgggctcaagcatcacgcctagcagtttctggttcctttaacagcaaaaggaaagagaggttctgattcttacctcaggnnnnnnnnnnnnnnnnnnnnnnnnnnnnnnnnnnnnnnnnnacactgcagagcacaaggctaaaggttacagctgagatctttggaaccaaaggcagagcaagcagagcccgttgtctgggccccacaccactgcaggccaggtggatagaagtgcggcccctctcatagtatgcccataagtcagggcatagggcagaactacctgtcatgttgctacaccatcctgtcttcttcagcatctccttgcctgttttctttattagtccaaaggaaaacaacaggcaacaaaatctgtgttttaacaatgtcttatatgaacatatatcaaatatccatgcgctgaaacccacataccatcacttggcaattttttagaataagaccccattattatctattgtataaaacctagccagttctcttgctcttctgtattttcctatttccctgccatcatctgctatttctgccacttctcttagactccttgtctgcaaagcccaagctagaactcactgtctatggcagaaggacatccagagcccattctggagttttgttttttccttctgccagatgctttgtgtcctgtcttccttcctcctcatatttctgtttctcatttgtgttcagttttgtgcagcattgctagcactgcttttgtgaccagaaaaggccataacatggtccaggatcatcattcttctgactctagatgggacacttgacagtgacttgaaacatttgcatattcaggaatgcatgaggatttcaagagagcctacagtatgaaatcattttcacaaaataaggcagcttgcttctgaaatgctgtctttcccagtagctactcacctgcctctggtggctgggattcagatgccacaaaactgtcagtatctatagaccaggtctgtgccacctcctctctcctctgtgctcagtgaggaggcagtaaatgaagttacaggctagcacaatacctaattcatgtttcccagtacacctgtagatattactgtacttttatgttctcaagaaataagttgttgcctattcagtgttacagatttctttgtttctttttaattaaaatacaagaagcagctgaggaaagggagacaaggtattttatttctgactgattttagaaaaaacttgtgtacatgtgtttggaactgttgaaatgccaagttttctgtataagtgtttttgtaattaaactttcagattttctttgttttttaagaagttgatgtgcttgtttgacatttgtctcattaaaacttttctacgttgg

SEQ ID NO: 352658 - DNA, 531 bp, Homo Sapiens
atattttatttctcttatagtacaaaaccagggagttaaaatatatttcttatctttcagacttggcatccagagatgagccccagaagttatctccaaaaagggatatttatgaaacagaattatcccagtgggttaacatggaagaatttaaaagccatagtcctgagagatcaattttcagcgctatctgggaaggcaactgtcattttgagcaacatcagggacaagaggagggttattttagacaacttatgattaaccatgaaaacatgcccatttttagccaacatactttactcactcaagaattttatgatagagagaaaatctctgaatgtaaaaagtgtagaaaaatcttcagttaccatttattttttagtcaccacaaaagaactcattctaaagaactttctgaatgtaaagaatgcacagaaattgttaatacaccatgcctttttaaacaacagacaattcaaaatggtgacaaatgcaatgagtgtaaagaatgttggaaggcctttgttcatt

SEQ ID NO: 352659 - DNA, 1401 bp, Homo Sapiens
attcttcggatagatgaggagccagcagaaattctcgagtttccccctgatgatagccaagaggcaaccacaccactggcagatgaaggcagggctccaaaagacaaaccagaaagtaaaaaatctggtctgctctggttttggcttccaaacattgggttttcctcttctgttgatgagacaggtgttgattccaaaaatgacgtccagagatctgctcccattcaaacacagcctgaggcacgaccagaggcagaactgcctaaaaaaacaggagaaggcaggctggttccgatttcccaaattagggttctcctcatctcctaccaagaaaagcaaaagcaccgaagatggggcagagctggaagaacaaaaacttcaagaacaaacaatcacgttttttgatgcccaagaaagtttctcccctgaagagaaggaagagggtgaactgatcgggcctgtgggcactgggctggactccagagtgatggtgacatccgcggcaagaacagagttaatcctgcccgagcaggacagaaaagctgacgatgaaagcaaagggtcaggcctgggaccaaatgaaggctgagaggtatggctcatcagtacaagagagatgcaaaaaactaagttggaaagtaaaggctacacacacatatggagcaccccatcccacagcacattacatccacctcacttcacagaacggagaacagagcagaaatgaccagaacacctttgtcaccatcacacagccctcctaaaatggaaccaaagcttcccagctccctcaaagctttggatgcaaagaaggcaccctgacttccacaagacaccagaattcacacggtactcagaggcactgctggggaagtttgttggtctttattagataaatttccagagacctgtccataatacccaacagaacatgactgtttctttgaggaaagggttataatgtctgtggtgtacaagtcgtttttggtataacttctttcctgctgctgctgcttcccggcaaacatagttttcctatttcaggcagagtgcggtatattccaggaaacactgtttcctactcacttagcttacttctttgttgaatgcctcactaatggcaagtttcaagatgttttgggtgacaatgcacacatgctgggcaaaagggtgatggccagtggctggcagctgggccagcagaagctaggacatctgtgagttgtcattctcatctatccatgtccactggcctgccagcatccgccagtgccttgccagtgtgcacggtcccacactgtggcccctgagtcccctaatgtacacgctgcagccagaatgcagatggagctggcttggctgttccctggatgggcaataaagaaagtgctgcatcccaaa

SEQ ID NO: 352660 - DNA, 1031 bp, Homo Sapiens
  misc_feature (727)..(740): n is a, c, g, or t
  misc_feature (758)..(809): n is a, c, g, or t
  misc_feature (1018)..(1018): n is a, c, g, or t
gactgcaagtctctcctcgctctagctctcaagctttgggtgaatattcctgtgaaatatatcttcaacttgaaagttcatactccaatcaaaaactccttttactgagtttgcagtactgtatttgcactgtttgtattcctctgggcccttattgctacttttgctttcctttgttacacagattttgtgttgcactttttctccagaggggtgttgtagagccttggttgtatgaataataccagtggtagtgtccacggctctaatgtaagcccatttggcatcactcctctcctctctcttgagaggatttcttgtgcacagagtatgaagcagttgtggagcgctgtgcctttgtcaagataccatcttgtttgatgacttctttctttgctgttttttcttcaaaatgttagtaagctctgtcatgcttctagcaaattgtaagactaattatttgtttccacctcataacctgttgcaataaatattacttctcatacagtttaatattgttgtttgttggagaaaatgaaccataaaaattgatttgctgttcagttttcaattattcaagtacacccaattaaagatgcagttatgtttataaaataagaagaaatagacttgtaaaatgcttatgtgagggttattgaaggtttccctgaagactgactggaaatggtggctgtttttttctatttctgactctgccatgaatttnnnnnnnnnnnnnnaagacaatatctcactcnnnnnnnnnnnnnnnnnnnnnnnnnnnnnnnnnnnnnnnnnnnnnnnnnnnnaatgctggagctcaagcaatcctcttaccctcgcttttccaagcagctggggaccaccggatgtattcctccacaccttcgctgggccaccattcctggctggcccaaacagaagaagacctctttctggtcttccgaatttccttgaaaccggtctaagggaacccggaaaagaaaacaagcttccctggccaagcccccgaaaaggnaaaccaaaaattc

SEQ ID NO: 352661 - DNA, 397 bp, Homo Sapiens
  misc_feature (80)..(80): n is a, c, g, or t
  misc_feature (114)..(114): n is a, c, g, or t
  misc_feature (147)..(147): n is a, c, g, or t
caaagaaagtgctgcctcttatgagaaaagctatggcctttatgaagtttcaaagacaaacagctaaaaggaattgaccnaaataagtgagggctaagacaacagtgcaagttnaaaagaaaggaagaagtccattttaaaaagagngatttctgcactcagccttcctcaaaatgtctttgaattcctttatgccactttaagaaaacaaaaccagaaatcagctcaaagaaaaagaccttagccctatgtcaaaatagtggtaaataaatatacaaataaagtttttatttcagagttgagatttctatcattttaaggtttctaccatcttgaccaacactgtcaattgatttttggtcctcgttttggaaaagagggcctcactatcttgaac

SEQ ID NO: 352662 - DNA, 860 bp, Homo Sapiens
  misc_feature (47)..(47): n is a, c, g, or t
  misc_feature (117)..(117): n is a, c, g, or t
  misc_feature (195)..(195): n is a, c, g, or t
  misc_feature (673)..(673): n is a, c, g, or t
  misc_feature (689)..(689): n is a, c, g, or t
taagcaaaaaggactggacctaaacctttcactaacctatggggctnagcataactacctaggccacaagaaaccaaaggagactcatccacaccagacatggaaaactctatgaanaaagtcatagaccccataaatgctgtaataatgtaaaggttaaactcagactcagccacttcctggcttcatggtttnaggtaagctgtttaaaacctctccaagccccatttcctccatctgttaaatgggggtgaaaacaatatctgttttacagcattgctctgagttcaaacctcacccatgcccccaattttagagatgataaaacaacctcagagaggtaaactgacccagcccttctactggagacctttggacagtcatccaatttaagtcttcccaaagctggctgctcagaatcttgtgaagcacttgttaaaaccttattcgaggggcagagtctattcactaagtcttggaccaggcccaggagtctgtatgggatcacctccaaacggactgcttttgggaattcagatcacattagagttctcctcaccttccaggctcatgtgtgtacgtggaccatctcttgcttttccaaagttgtctaccaaaccagtctataaaacgttcatgccactcctctgttcaaaacccttctatggctccntacagcccacaagacncaggccacctgcctcaatgagacccaaacactgatataatcaagtctctgtgctcccaatgtctcttcctcttccaagcctttgcacagctgttccctgatcttggaacattcttcccagccctggccctccttcagcagctaatctctaatcatctttctgcggacgcgt

SEQ ID NO: 352663 - DNA, 1195 bp, Homo Sapiens
  misc_feature (380)..(413): n is a, c, g, or t
  misc_feature (803)..(803): n is a, c, g, or t
  misc_feature (838)..(838): n is a, c, g, or t
  misc_feature (845)..(845): n is a, c, g, or t
  misc_feature (917)..(917): n is a, c, g, or t
  misc_feature (919)..(920): n is a, c, g, or t
  misc_feature (1146)..(1148): n is a, c, g, or t
aattagaggagcattacttgagaggttgtacatcaccatcacggtccttttaggtgcacttaatcgcgcccacgcgcgttagcagcaagagcagcagctccagcaactccagcagctcctggcctccccgcagctgaccccggaacaccagactgttgtctaccagatgatccagcagatccagcagaaacgggagctgcagcgcctgcagatggctgggggctcccagctgcccatggccagcctgctggcaggaagctccaccccgctgctgtctgcgggtacccctggcctgctgcccacagcgtctgctccacccctgctgcccgctggagccctagtggctccctcgcttggcaacaacacaagtctcatggccnnnnnnnnnnnnnnnnnnnnnnnnnnnnnnnnnngcggacctccagtcctcactgcccagaccaaccccttcctcagcctgtcgggagcagagggcagtggcggtggccccaaaggagggaccgctgacaaaggagcctcagccaaccaggaaaaaggctaaatccacccttacccctcctgacccccccaagtggagggaacagatcctggcctgaggggtcctagcctggagcaggcgcctgcgcccagaccctggagagccttgacccagagcctgtgctgaggtccagggagtgtggagagctcctgggtgtcgaggactgagactgagagggggagcccccttcatctggccccctttcctttccgcactgtcgctttgtgaggctcagaggaaggacagtctgcagcccgcctagganggtcatcccagcaaatgttttgggaggtcccccanagagcanagtggccatgcaaagtaggggggttgttttggacctgtccattgaaatgatcaagacttgatgggagaaagngnnggaaaaggccccttgccctttccctgggggaaaactttttgggaaagggctggacccatttacctgaggttttcccagttgggcgaaggggaagggacccctgggcttttttgcatcctcccccagggaggggccaggtgactttaaaacccccatttgggggctggaaggggcggggagccataccacccccctcctactttgggccctaaggagggagaacggnnngggaggggggttccttggcccccccttttgttatagataatggaggg

SEQ ID NO: 352664 - DNA, 2213 bp, Homo Sapiens
agcgggcattgtctcttcctctgcagttgagctgaatgaatacctccgaagccgctttgttctccagatgtgaatagctccactataccagcctcgtcttccttccgggggacaacgtgggtcagggcacagagagatatttaatgtcaccctcttggggctttcatgggactccctctgccacattttttggaggttgggaaagttgctagaggcttcagaactccagcctaatggatcccaaactcgggagaatggctgcgtccctgctggctgtgcttgcatgctgcatgcatgagcgcggcatgttctcctcaccctccccgcccccggcgctgttagagaaagtcttccagtacattgacctccatcaggatgaatttgtgcagacgctgaaggagtgggtggccatcgagagcgactctgtccagcctgtgcctcgcttcagacaagagctcttcagaatgatggccgtggctgcggacacgctgcagcgcctgggggcccgtgtggcctcggtggacatgggtcctcagcagctgcccgatggtcagagtcttccaatacctcccgtcatcctggccgaactggggagcgatcccacgaaaggcaccgtgtgcttctacggccacttggacgtgcagcctgctgaccggggcgatgggtggctcacggacccctatgtgctgacggaggtagacgggaaactttatggacgaggagcgaccgacaacaaaggccctgtcttggcttggatcaatgctgtgagcgccttcagagccctggagcaagatcttcctgtgaatatcaaattcatcattgaggggatggaagaggctggctctgttgccctggaggaacttgtggaaaaagaaaaggaccgattcttctctggtgtggactacattgtaatttcagataacctgtggatcagccaaaggaagccagcaatcacttacggaacccgggggaacagctacttcatggtggaggtgaaatgcagagaccaggattttcactcaggaacctttggtggcatccttcatgaaccaatggctgatctggttgctcttctcggtagcctggtagactcgtctggtcatatcctggtccctggaatctatgatgaagtggttcctcttacagaagaggaaataaatacatacaaagccatccatctagacctagaagaataccggaatagcagccgggttgagaaatttctgttcgatactaaggaggagattctaatgcacctctggaggtacccatctctttctattcatgggatcgagggcgcgtttgatgagcctggaactaaaacagtcatacctggccgagttataggaaaattttcaatccgtctagtccctcacatgaatgtgtctgcggtggaaaaacaggtgacacgacatcttgaagatgtgttctccaaaagaaatagttccaacaagatggttgtttccatgactctaggactacacccgtggattgcaaatattgatgacacccagtatctcgcagcaaaaagagcgatcagaacagtgtttggaacagaaccagatatgatccgggatggatccaccattccaattgccaaaatgttccaggagatcgtccacaagagcgtggtgctaattccgctgggagctgttgatgatggagaacattcgcagaatgagaaaatcaacaggtggaactacatagagggaaccaaattatttgctgcctttttcttagagatggcccagctccattaatcacaagaaccttctagtctgatctgatccactgacagattcacctcccccacatccctagacagggatggaatgtaaatatccagagaatttgggtctagtatagtacattttcccttccatttaaaatgtcttgggatatctggatcagtaataaaatatttcaaaggcacagatgttggaaatggtttaaggtcccccactgcacaccttcctcaagtcatagctgcttgcagcaacttgatttccccaagtcctgtgcaatagccccaggattggattccttccaaccttttagcatatctccaaccttgcaatttgattggcataatcactccggtttgctttctaggtcctcaagtgctcgtgacacataatcattccatccaatgatcgcctttgctttaccactctttccttttatcttattaataaaaatgttggtctccacca

SEQ ID NO: 352665 - DNA, 882 bp, Homo Sapiens
  misc_feature (752)..(778): n is a, c, g, or t
tggttcatgaagatgccaccaaaggttcctgagtgaaatcctggtctcgcatttcacctccaccatgaagtactgttcccccggttccataagtgattgctggcttcctttggctgatccaccaggttatctgaaattacaatgtagtccacaccagagaagaatcggtccttttctgtgttccacaagttcctccagggcaacagagccagcctcttccatcccctcaatgatgaatttgatattcacaggaagatcttgctccagggctctgaaggcgctcacagcattgatccaagccaagacagggcctttgttgtcggtcgctcctcgtccataaagtttcccgtctacctccgtcagcacataggggtccgtgagccacccatcgccccggtcagcaggctgcacgtccaagtggccgtagaagcacacggtgcctttcgtgggatcgctccccagttcggccaggatgacgggaggtattggaagactctgaccatcgggcagctgctgaggacccatgtccacctaggccacacgggcccccaggcgctgcagcgtgtccgcagccacggccatcattctgaagagctcttgtctgaagcgaggcacaggctggacagaggctctcgatggccacccactccttcagcgtctgcacaaattcatcctgatggaggtcaatgtactggaagactttctctaacagcgccgggggcggggagggtgaggagaacatgccgcgctcnnnnnnnnnnnnnnnnnnnnnnnnnnnggacgcagccattctcctgagtttgggatccattaggctggagtcctgaagcctctagcaactttcccaacctccaaaaaatgtggcagagggaatcccccgct

SEQ ID NO: 352666 - DNA, 844 bp, Homo Sapiens
  misc_feature (567)..(596): n is a, c, g, or t
gggcaacagagcaagcttgttcccatccccgtcaatgatgaatgtgagagttcacaggaagatcgtgcttccagggctctgaaggcgctacacagcattggatccaagccaagacagggcctttgttgtcggtcgctcctcgtccataaagtttcccgtctacctccgtccagcacataggggtccgtgagccacccatcgccccggtcagcaggctgcacgtccaagtggccgtagaagcacacggtgcctttcgtgggatcgctccccagttcggccaggatgacgggaggtattggaagactctgaccatcgggcagctgctgaggacccaggtccaccgaggccacacgggcccccaggcgctgcagcgtgtccgcagccacggccatcattctgaagagctcttgtctgaagcgaggcacaggctggacagagtcgctctcgatggccacccactccttcagcgtctgcacaaagttcatgcctgatggaggtcaatgtactggaagactttcgtctaacagcgccgggggcgggatgggtgaggagaacatgccgcgctcnnnnnnnnnnnnnnnnnnnnnnnnnnnnnnggacgcagccattctcccgagtttgggatccattaggctggagttctgaagcctctagcaactttcccaacctccaaaaaatgtggcagagggagtcccatgaaagccccaagagggtgacattaaatatctctctgtgccctgacccacgttgtcccccggaaggaagacgaggctggtatagtggagctattcacatctggagaacaaagcggcttcggagggtattcattcagctaaactccgct

SEQ ID NO: 352667 - DNA, 1748 bp, Homo Sapiens
  misc_feature (1025)..(1025): n is a, c, g, or t
  misc_feature (1093)..(1093): n is a, c, g, or t
  misc_feature (1133)..(1133): n is a, c, g, or t
gcacgagggaatcttaagtgtgattactgtgacaagttgtttatgcggaggcaggacctcaagcagcacgtgctcatccacactcaagaacgccagatcaagtgtcccaagtgtgataagctgttcttgagaacaaatcacttaaagaagcatctcaattctcatgaaggaaaacgggattatgtctgtgaaaaatgtacaaaggcttatctaaccaaataccatctcacccgccacctgaaaacctgcaaagggcccacctccagttcgtcagcaccagaggaggaagaagaggatgactcagaagaggaagatctagcagactctgtggggacagaagactgtaggattaacagtgctgtgtattcagcggatgagtctctttctgcacataaataaaaggaaaagaaacaagcaattctggatgaaaatgcaaatggaaaaatacacataaccagttatctactataatggtttttatataaaatggttcctgatttattttcagccagtaatcaaaacagactgggaatgaataaagcacttacagaagagtatcctaatgaaaacactttaaaacagattgggaaaactgagcatgtgtcctattttaagtggtggactgggagggaagtgtcaacttctgaggtctttatttacatgataatctgggagatgcatttatgcctgaatcaaagctgccttctgctcaaacaaatcagatttatttcacattcttccattattccattttcctgctggtcctgtgacttggtaacattctaaacggtccttgccccatagccatcctgattgctgatagtgttttatgcagactcttgtgacttatactcaccacagaatggattgggacacagcagcataagtgtgctacttggcagctagtaagtttaaagcaggacctgccttaactgctcctggccacttggaagtttagggtagatcttgttttccaaagtttcggcaggtgcctggaaggcaatataaaaaagcagcagtcagtncagtagtcagtgatgggagagaacaagagggagagatgcctgggcctctgcccaagaaattagctttngatggaagcctgagcaagtcacctggttattgttaacgtnggagatctttgtaggtttagacatggctccctgtctccagtaaacatccagccattcagacaaagggggcctggagatacagagagcccaaataatgcctgctggattgtctcctgatgagtacatgtggactcacctgaggaagggaaggaagggaataatcttttatgtttcatttaccttatgaaaagtgttaaaacattgccaactcaaaataacattatttaatgcatgtgcaaagttaggtcttcccagttgtctcagtgctgaggaacctcatcagagaagcatggaagatgccaaaggatttttggaaggtaaagaaggctgaatagtgaccacatgggcctgttttcagggtcccagcttagttaagtcacccatgcacctggtcattgtgtctcccgtgcacatccagcgtttctcagaagcagacccacccttaagttgacaggattgatggaacatgctctcctgctcaaggcacaacctctgggctggagtagaggactctggtgggaaggttttgctgctaatgtatttatggaatgaatgtatttcattcaaatctgtattcctctaggaaggattaaaattaaacttttttaaaaaaaa

SEQ ID NO: 352668 - DNA, 1094 bp, Homo Sapiens
  misc_feature (993)..(993): n is a, c, g, or t
  misc_feature (1010)..(1010): n is a, c, g, or t
  misc_feature (1025)..(1027): n is a, c, g, or t
  misc_feature (1033)..(1033): n is a, c, g, or t
  misc_feature (1036)..(1036): n is a, c, g, or t
  misc_feature (1043)..(1043): n is a, c, g, or t
  misc_feature (1046)..(1046): n is a, c, g, or t
  misc_feature (1057)..(1057): n is a, c, g, or t
  misc_feature (1059)..(1060): n is a, c, g, or t
  misc_feature (1063)..(1063): n is a, c, g, or t
  misc_feature (1075)..(1075): n is a, c, g, or t
  misc_feature (1086)..(1086): n is a, c, g, or t
  misc_feature (1090)..(1090): n is a, c, g, or t
cggtagacgaggacgccaacagcagcggagaaacgtttctctttcctctcagtttgcgcacaccatggcggcccctgcccagcagactactcagcctggcggcgggaagcgcaaaggcaaggctcagtatgtgctggccaagcgcgctcggcgctgcgacgctggcgggccccgtcagctagagcccgggctacagggcatcctcatcacctgcaatatgaacgagcgcaagtgcgtggaggaggcctacagcctcctcaacgaatacggcgacgacatgtatgggccagaaaagtttacagacaaggatcagcagccctctggaagtgagggagaggatgatgatgcggaggctgccttgaagaaagaagttggtgacattaaggcatctacagagatgaggttaagaagattccagtcagtggaaagtggagcaaataacgttgtcttcatcaggacacttgggataggaaaacaacagcatggtgttacggttggataactcaggacatcacaaaaatgttaacaacggtgtctacctaaacagtcatttctagtgcaagcagtaataatgatgaaaagttaaaatatattagatacattatagtacgtattaggcactgaagaaatactgtttggaaagaatgactagagcctgagaaattggtgcatcatattctccaggatatgtacaaaaccaagaaaaagaagactcgagttattttgcgaatgttacccatctcaggcacatgcaaggcttttttagaagatatgaaaaaatatgcagaaacatttttggaaccctggtttaaagctccaaacaaagggacatttcagattgtgtacaaatctcgaaataacagtcatgtgaatagagaagaagttatcagagaattggcaggaatagtgtgcaccctcaattcagaaaaaaaagtggatctcaccaatccacagtacacagtggtagtagaaatcatcaagctgtctgttgcngagtgttgtgaagattnatgttgtttagaaannnatctcnggnggggtgnagnccctaaggtcngnncanctaatccaagcngggaatggganaagnaact

SEQ ID NO: 352669 - DNA, 2102 bp, Homo Sapiens
  misc_feature (1428)..(1443): n is a, c, g, or t
ggcggggctctcggggccgctgccgccgccgccgccgcgcattgtgcagcaggcgggcccccgcgcggcagggccctggacccgcgcggctcccggggatggtgagcaaggcgctgctgcgcctcgtgtctgccgtcaaccgcaggaggatgaagctgctgctgggcatcgccttgctggcctacgtcgcctctgtttggggcaacttcgttaatatgagctttctactcaacaggtctatccaggaaaatggtgaactaaaaattgaaagcaagattgaagagatggttgaaccactaagagagaaaatcagagatttagaaaaaagctttacccagaaatacccaccagtaaagtttttatcagaaaaggatcggaaaagaattttgataacaggaggcgcagggttcgtgggctcccatctaactgacaaactcatgatggacggccacgaggtgaccgtggtggacaatttcttcacgggcaggaagagaaacgtggagcactggatcggacatgagaacttcgagttgattaaccacgacgtggtggagcccctctacatcgaggttgaccagatataccatctggcatctccagcctcccctccaaactacatgtataatcctatcaagacattaaagaccaatacgattgggacattaaacatgttggggctggcaaaacgagtcggtgcccgtctgctcctggcctccacatcggaggtgtatggagatcctgaagtccaccctcaaagtgaggattactggggccacgtgaatccaataggacctcgggcctgctacgatgaaggcaaacgtgttgcagagaccatgtgctatgcctacatgaagcaggaaggcgtggaaatgcgagtggccagaatcttcaacacctttgggccacgcatgcacatgaacgatgggcgagtagtcagcaacttcatcctgcaggcgctccagggggagccactcacggtatacggatccgggtctcagacaagggcgttccagtacgtcagcgatctagtgaatggcctcgtggctctcatgaacagcaacgtcagcagcccggtcaacctggggaacccagaagaacacacaatcctagaatttgctcagttaattaaaaaccttgttggtagcggaagtgaaattcagtttctctccgaagcccaggatgacccacagaaaagaaaaccagacatcaaaaaagcaaagctgatgctggggtgggagcccgtggtcccgctggaggaaggtttaaacaaagcaattcactacttccgtaaagaactcgagtaccaggcaaataatcagtacatccccaaaccaaagcctgccagaataaagaaaggacggactcgccacagctgaactcctcacttttaggacacaagactaccattgtacacttgatgggatgtannnnnnnnnnnnnnnngttgtcgtttaaagaaagactttaacaggtgtcatgaagaacaaactggaatttcattctgaagcttgctttaatgaaatggatgtgcctaaaagctcccctcaaaaaactgcagattttgccttgcactttttgaatctctctttttatgtaaaatagcgtagatgcatctctgcgtattttcaagtttttttatcttgctgtgagagcatatgttgtgactgtcgttgacagttttatttactggtttctttgtgaagctgaaaaggaacattaagcgggacaaaaaatgccgattttatttataaaagtgggtacttaataaatgagtcgttatactatgcataaagaaaaatcctagcagtattgtcaggtggtggtgcgccggcattgattttagggcagataaaagaattctgtgtgagagctttatgtttctcttttaattcagagtttttccaaggtctacttttgagttgcaaacttgactttgaaatattcctgttggtcatgatcaaggatatttgaaatcactactgtgttttgctgcgtatctggggcgggggcaggttggggggcacaaagttaacatattcttggttaaccatggttaaatatgctattttaataaaatattgaaactcaccagtcatggacaa

SEQ ID NO: 352670 - DNA, 1007 bp, Homo Sapiens
ggtccggaattcccgggatcgcacgtgggctcggcgcgatggaggaggagatgcatactgacgccaaaatccgtgctgaaaatggaacagggtccagccctcggggtcctggctgcagcctccggcactttgcctgcgaacagaacctgctgtcgcggccagatggctctgcttccttcctgcaaggtgacacctctgtcctggcgggtgtgtacgggccggccgaggtgaaggtcagcaaagagattttcaacaaggccacactcgaagtgatcctgaggccgaagattgggctgcctggtgttgcagagaagagccgggagcggctgatcaggaacacgtgcgaggcggtggtgctgggcacgttgcacccccgcacctccatcaccgtggtgctgcaggttgtcagcgatgccggctctctcctggcctgttgtctgaatgccgcctgcatggcattggtggatgcaggtgtgcccatgcgggctctcttctgtggggtcgcctgcgccctggactctgatgggaccctcgtgctggatcctacatccaagcaagaaaaggaggcccgggcagtcctgacctttgccctggacagcgtggaacggaagctgctgatgtccagcaccaaggggctctactcagacactgagctccagcagtgcctggctgcggcccaggccgcttcgcaacacgtcttccgtttctaccgggaatcgctgcagaggcgttactccaagagctgaggcaagctggggcaaggggccgctcccattgcctccacccactcaccccctacagcctgaagcaaaccagcagcccagccttgcctctctgacccatgggctccttgagcctgcagctctgtaaccacagggctcctgtggggaggccttggcctgtgacagcccccaggcctgggggcacagatccccccagcaaggataacattcaaaggagctcacatttatggaatggatgaatcaataaattaattcactttaaca

SEQ ID NO: 352671 - DNA, 1901 bp, Homo Sapiens
gggggcgcggctccacgtcggcaccagctgcggggcaagatggaggcgctgattttggaaccttccctgtatactgtcaaagccatcctgattctggacaatgatggagatcgactttttgccaagtactatgacgacacctaccccagtgtcaaggagcaaaaggcctttgagaagaacattttcaacaagacccatcggactgacagtgaaattgccctcttggaaggcctgacagtggtatacaaaagcagtatagatctctatttctatgtgattggcagctcctatgaaaatgagctgatgcttatggctgttctgaactgtctcttcgactcattgagccagatgctgaggaaaaatgtagaaaagcgagcactgctggagaacatggaggggctgttcttggctgtggatgaaattgtagatggaggggtgatcctagagagtgatccccagcaggtggtacaccgggtggcattaaggggtgaagatgtcccccttacggagcagaccgtgtctcaggtgctgcagtcagccaaagaacagatcaagtggtcactccttcggtgaagacctcactgttcctggctcttcatcctcttcaaaaaatttgcatgtctgctgtgaattttcatctagttccccaatcgatgctctcagggtcatctcggggatcacagggatccttaaatctccattctgtttgtggttgccccctcaacctcccctacacccttcctattctttttcattcttcttgcagttctgggagtaaagctcccagcatatttagataatagggcaggggaagcaccctctttctttctagactggattatgctcacatgctcccttgccctgacatttttgtaaattctgtgccctttgctgtagctacacttcagattaaagtaggagaaagaatgtgctgagtgttttcctccctttgcctctacctggccctcatcccaacagcccagcaaggggagagagaaagagaattcttttctatagaacgagtgggggcggggatgggtagggatttatccaatctaagccctaaccccacttagtgacctcagtgttttcttccattccttcttactgccctgtcctctgccttggaagaggctttgggaatagttcatagggaagggacaacatggaagaaacagcgatttaaattgtattgaacagggcatataaaatgcattctgtaccctgatctggcatatagcttcaaaactgcagtggcgagtgtccatctcttagttagctaccttaactgtccacccttactacctgtgggatcgttgcctggtttgtcttctctgtgtcctggagcaaagccagttcctaaaactaaaactccattctagtcttgggaagaaaagtttctactcagaactggggaaggagtggaacttatgacttgggcctctaggctgtctctgtcccctcagctccccgacatgcatttactctctgccgtgggtctgcagtcgctgcaacctaccctctctctgcctcagccttacacccaagcagtaggtctgtgctctccctgtctctaggtcgctgagagaggtgcttttcttcataaaacctttggggtttggatttccccaggaagatggagaatggaatactcactcttgggtctaatctttccccttgacccagaacttcctccccacaaaaatgcctttaaaaaccttcctgagacttaagcattctgccccacttactaactgccagttctccagcactgaggtggggcagataacggggcatatttaagggggcatctttgtgtaaaagatgcatggagtcaggagaaaaccaccttcataaactgctctgtgcaaagaggaataaaacattttttccaaactgcc

SEQ ID NO: 352672 - DNA, 943 bp, Homo Sapiens
agcggacgtcggcaccagctgcggggcaagatggaggcgctgatttggaaccttccctgtatactgtcaaagccatccagattctggacaatgatggagatcgactttttgccaagtactatgacgacacctaccccagtgtcaaggagcaaaaggcctttgagaagaacattttcaacaagacccatcggactgacagtgaaattgccctcttggaaggcctgacagtggtatacaaaagcagtatagatctctatttctatgtgattggcagctcctatgaaaatgagctgatgcttatggctgttctgaactgtctcttcgactcattgagccagatgctgaggaaaaatgtagaaaagcgagcactgctggagaacatggaggggctgttcttggctgtggatgaaattgtagatggaggggtgatcctagagagtgatccccagcaggtggtacaccgggtggcattaaggggtgaagatgtcccccttacggagcagaccgtgtctcaggtgctgcagtcagccaaagaacagatcaagtggtcactccttcggtgaagacctcactgttcctggctcttcatcctcttcaaaaaatttgcatgtctgctgtgaattttcatctagttccccaatcgatgctctcagggtcatctcggggatcacagggatcctttaatctccattctggtagggttggcccctaaagctcccataacccttcctattcttttgcattcttcttgcagttctggggagtaagcctccaacaatatttagattaatacgggcaggggaagccaacctccttacttctagacctggatatgctccattggcccttggcctgacacattttggtaatctgtgcccttggtgtagataccttcgatttagtggcaaagatttgcgaggtatccccctgcgttcacgggctt

SEQ ID NO: 352673 - DNA, 1728 bp, Homo Sapiens
gcctgggtggcgaattcggcacgaggccatggcgagcagagcgtggtgacagcaccgtagggcagccggagaatgcagcccaagcagggcctggcatggggcaggacagggtccagccttttcctaacatctgcctgtgccacaacggccagcaggtgccccatcctctgcccacagcagactctgtcccatggctctccgggcagtagagtgtgtgagtgcagactggacctgtggttcataccttgtcaccacccgggaagctgaaggccacttcctcccagatggcctcagccaggaccatcgccctttctcagagcagagggccaggtatagaaaccgcagtgggcctgcaagccgcccgagcctccccagcagcctcctacagagcaggaagaggcgccctgtgaaccctgagtgttgcaggcccagcagaccctgctgtcccaagcccacccctcctcccaccatcacctccctcacctcgggacagtagccctccacttctccagcctctcagccctgtgctcctgcatccagagtggaacccaggctggtgtccgcatctgtccctgggccccacccctggacctgccttggttgtgtcatctgttgtaaacattcaggaggaccagggcagcatctggggcctgggatggccacagaaggggcaggccaggtggaaaggagccagggggaagtggtctaagagacctggaactgccagaggatggcggactgggcttccccagagccaggcgtgccggacaggtgaggactggacccgagcgggccgaggcaggggccgctgtcgcacaggcctgagccagggtgagctggtgcctgccttgcattttccttctggtgctgtgaagaccataggctggcaggcagctgagatgaactgtctttaccactgatgaggggcctctgccggctgagggtagcaagcaggggttgtgagtcaggctgggggacttgtttgaaagaaagaggagtggaaaatggttccaggagggaagaggttctttgagacacagtaccctgggaggcataggagaagggtcgggccagcccagcccagggcctgagttagactatttcccacatgttctctgccttcagtggggagggggtgccaccagggctgtcggccaggattgccactcctgtttcagaggaagcaggccgagagacttgcaccttggccaagccacacaatcagtggggcagccagagctcagacctgagccattttgtcagtatccaggaccccccggattctccacgccctccccatctcccagtctccctgccccccatgccccagaccggcccaccagggactagccgctgtcgcacagcctctggggtgcttggtctctgcaaagtcaaaggcctgacagctctgtggcctgggaatccattttcctgcggcagagcagggcctggtgtggaaccagggagctgtgggaagccacagcagaaatggaagaaaaacaggtctcagcccagggtcctcgctcactccctcactccccactttgaagccatctctgttctgcaggtgagaggatttaaagtcagtcacaaaggcttgggaacaaaaggaattctcttccaagaatgcctctgtggtgctgtttggtctctagaaacagggtcacttttttaatgtagtaaagaagtaataaatggtggcattacacattgtgatattaaaaaaaa

SEQ ID NO: 352674 - DNA, 774 bp, Homo Sapiens
gtgtgtcggtaaactgtcagattaagttcctcaggtcagcatgtatgagctttcttctgctgtggagagatctagccagtccctgactttgcaacagacctactgactactggatcttaagacccatgtctaggaccaggagtcagcataaggacgctgacctctcctggctgtgcctgtgactccagagtcctatcttactgtgacttaaagtttgatggagagaaagctgtaggatccataaattctaccaggaatccagggtcttcctgttcctagcactgagaatgggcacccagtggtccaagaacactttctgggctaacatagtcctcacacagggctgagaaagaaagtgtctcctttcctggaaagcacatgtaaaagttaagggcctgaatctcttctaaaccaataattgacctctaggcacccaccataatactgctaccttcagggcagaagacactgctctttgtaacccagccaccaccaaaaagcaaacagaaagaaggaaggatggttaagccattggataatactgaatctgtttccctaagtgacttaaccttagagcaagcacaacatccaggttaattttttgtaagatttctccttttattattgccctcatcatagttcctgattgtctcttaaagtaagtggtttatagacattactatttctgataataatttacaaactactataaacaaatttataaacattactaatttctgatgaaaataaagttgtttctccctccaaaaaaaa

SEQ ID NO: 352675 - DNA, 648 bp, Homo Sapiens
ctcaccagccccggtccccagtgctcaccccaacgaccctgcactgggtcgatgaggccgggaaggtcggagagcagctgccgctggaggaccctgacgtctactgcccctacagcgccatcggcaacgtcacgggagagctggtgtacgcccactacgggcggcccgaagacctgcaggacctgcgggccagggtgcgtggatccagtgggcctgcctgcttgctggtgcgcgtgggggttgatcagcttcgcccagaaggtgaccaatgctcaggacttcggggctcaaggagtgctcatatacccagagccagcggacttctcccaggacccacccaagccaagcctgtccagccagcaggcagtgtatggacatgtgcacctgggaactggagacccctacacacctggcttcccttccttcaatcaaacccagttccctccagttgcatcatcaggccttcccagcatcccagcccagcccatcagtgcacgacattgcctcccgcctgctgaggaagctcaaaggccctgtggccccccagaatggcagaggggagcctcctaggctccccttatcacctgggccccgggccacgactgcggctagtggtcaacaatcacaggacctccacccccatcaaca

SEQ ID NO: 352676 - DNA, 1785 bp, Homo Sapiens
ctatccgcccaatggggcggccctggccagaagcggaggaggtggcacccgggaccgagctggggtcttggaggaagagaggatggcgtcgtcgagccctgactccccatgttcctgcgactgctttgtctccgtgcccccggcctcagccatcccggctgtgatctttgccaagaactcggaccgaccccgggacgaggtgcaggaggtggtgtttgtccccgcaggcactcacactcctgggagccggctccagtgcacctacattgaagtggaacaggtgtcgaagacgcacgctgtgattctgagccgtccttcttggctatggggggctgagatgggcgccaacgagcatggtgtctgcattggcaacgaggctgtgtggacgaaggagccagttggggagggggaagccctgctgggcatggacctactcaggctggctttggaacggagcagctctgcccaggaggccttgcatgtgatcacagggttactggagcactatgggcaggggggcaactgcctggaggatgctgcgccattctcctaccatagcaccttcctgctggctgaccgcactgaggcgtgggtgctggagacagctgggaggctctgggctgcacagaggatccaggagggggcccgcaacatctccaaccagctgagcattggcacggacatctcggcccaacacccggagctgcggactcatgcccaggccaagggctggtgggatgggcagggtgcctttgactttgctcagatcttctccctgacccagcagcctgtgcgcatggaggctgccaaggcccgcttccaggcagggcgggagctgctgcggcaacggcaagggggcatcacggcagaggtgatgatgggcatcctcagagacaaggagagtggtatctgtatggactcgggaggctttcgcaccacggccagcatggtgtctgtcctgccccaggatcccacgcagccctgcgtgcactttcttaccgccacgccagacccatccaggtctgtgttcaaaactttcatcttcggggtgggggtggcccaggccccccaggtgctgtcccccacttttggagcacaagaccctgttcggaccctgccccgattccagactcaggtagatcgtcggcataccctctaccgtggacaccaggcagccctggggctgatggagagagatcaggtatcccccagggagtaggggctaccttgaggggatgatagacctcccccactcccagtgggactctggaaatatgaaggaactagggagtggaagagatttcagagctggggagaggagttcctcccttcaaagccagcaactgcctttggggaatgtcggggggtatctcctttctcctgcttgtgtgaggtggtacacagtccccccttcacctggcgggaagcctgtcccggacagactcatctcagctttcccttggggcaggatcgggggcagcagctccagcagaaacagcaggatctggagcaggaaggcctcgaggccacacaggggctgctggccggcgagtgggccccacccctctgggagctgggcagcctcttccaggccttcgtgaagagggagagccaggcttatgcgtaagcttcatagcttctgctggcctggggtggacccaggacccctggggcctgggtgccctgagtggtggtaaagtggagcaatcccttcacgctccttggccatgttctgagcggccagcttggcctttgccttaataaatgtgctttattttctcttca

SEQ ID NO: 352677 - DNA, 935 bp, Homo Sapiens
cagtactgggggtgagagaagggttggacagaagagggtcgggtatctgggcatgcgcagggccgcaggactcttggtggggtagcgagggggacggtcccacgactgctccgacagggccgggactcccagtgggggcgggacccccggagtgcccgcctgcggactcccaagcctggagcctggggagagggtgggcacctccgttcccgcacacccgtccatggtgtgtgcgccgagcgtccaggagccacggcggtgtcttccttgcgcgtcttttacacgtgtgggggtaggctgctcctcggggctgagccgtggccagggttatggagaggcccgcctctccccagatggcgtcgtcgagccctgactccccatgttcctgcgactgctttgtctccgtgcccccggcctcagccatcccggctgtgatctttgccaagaactcggaccgaccccgggacgaggtgcaggaggtggtgtttgtccccgctaggcactcacactcctgggagccggctccagtgcacctacattgacagtggaacacggtgtcgaagacgcacgctgtgattctgagccgtccttcttggctatggggggctgagcatgggcgccaaacgagcatggtgtctgccattggcaacgaggctgtgtggaccgaaggagccagtaggcggacggcgcgaagccctgctgcgcatggacctactcaggctgggcttggaaacggagcagctctgcccaggaggtcttgcatgtgatcacagggttactggagcactatgggcaggggggcaacttgcctggaggatgctgcgccattctccctaccatagcaccttacctgctggctgaccgcactgaaggcgtgagttgctggagaccagctgggaggctctgggctgcccagaaggatccagggagggggc

SEQ ID NO: 352678 - DNA, 1094 bp, Homo Sapiens
  misc_feature (756)..(756): n is a, c, g, or t
  misc_feature (760)..(760): n is a, c, g, or t
ccggaattcccgggatcctggccagaagcggaggaggtggcacccgggaccgagctggggtcttggaggaagagaggatggcgtcgtcgagccctgactccccatgttcctgcgactgctttgtctccgtgcccccggcctcagccatcccggctgtgatctttgccaagaactcggaccgaccccgggacgaggtgcaggaggtggtgtttgtccccgcaggcactcacactcctgggagccggctccagtgcacctacattgaagtggaacaggtgtcgaagacgcacgctgtgattctgagccgtccttcttggctatggggggctgagatgggcgccaacgagcatggtgtctgcattggcaacgaggctgtgtggacgaaggagccagttggggagggggaagccctgctgggcatggacctactcaggctggctttggaacggagcagctctgcccaggaggccttgcatgtgatcacagggttactggagcactatgggcaggggggcaactgcctggaggatgctgcgccattctcctaccatagcaccttcctgctggctgaccgcactgaggcgtgggtgctggagacagctgggaggctctgggctgcacagaggatccaggagggggcccgcaacatctccaaccagctgagcattggcacggacatctcggcccaacacccgggagctgcggactcatgccccaggccaaggggctgggggggatggggcagggggtgccctntganactttgctcagatctttctccctgaccccgcagccttgtgcgcatggaaaggctggccaagccccgctttccaggaagggccggggaacctgctgccgggaacgggaaaggggggcatccacggccaaaggcggatgatggggcatccttcccaagaaaagggagaagtggtaatccggtaatggaactcggggaaggctttttcgcacccagggccaagcattggggggctggtccctggccccagggattcccacggcaggccctggggtggaacttttccttaccggccacgcccagaacctatcccagggccggtgggtcaaacttttcc

SEQ ID NO: 352679 - DNA, 1132 bp, Homo Sapiens
  misc_feature (1)..(1): n is a, c, g, or t
  misc_feature (3)..(3): n is a, c, g, or t
  misc_feature (10)..(10): n is a, c, g, or t
  misc_feature (967)..(980): n is a, c, g, or t
  misc_feature (983)..(985): n is a, c, g, or t
ncnatgaggntggacaccctatgctgagtatggaggctggtacaaggcctgcaaagtgagcagccccacagtgaacactactctgagaaacctgggagctctgtataggcgccagggaaagctggaggctgctgagaccctggaggaatgtgccctgcggtcccggagacagggcactgaccctatcagccagacgaaggtggcagagctgcttggggagagtgatggtagaaggacctcccaggagggccctggagacagtgtgaaattcgagggaggtgaagatgcttctgtggctgtggagtggtccggggatggcagtgggaccctgcagaggagtggctctcttggcaagatccgggatgtgctccgcagaagcagtgaactcttggtgaggaagctccaggggactgagcctcggccctccagcagcaacatgaagcgagcagcctccttgaactatctgaaccaacctagtgcagcacccctccaggtctcccggggcctcagtgccagcaccatggacctctcttcaagcagctgacattcaacccggcccccaggtctgctgggtccccccacccccacagccctcacagcattccccattgctcctggctcttccccacccctaggtgggacagtgaaggggagcagtttaaccagaagattgctgctgcccttagggtctcagctccctcctcaggaatccctcttaggaaggaccctcaggacaccctctctgcaccctgtggtcctctagagtagctagctctgaggccccaaggtgggtacaaagcaggtatggccctcagagatgcagcctgctgctggcttttcagtcagagggttgggggctggccagccaagctgccttgccctggccgctcttactccctccctctgctgtctcacttcaggtccatgtatttcacttttcttaaataaaagaatcaggtaacaaaannnnnnnnnnnnnnttnnnctcgaggcattcttgtcgggtgcggaaaaaagaggtaatgaaattggcacctgggcccatagctgttttcctgaccccaactttctttgtacaaaatgggtagaatcttgccgggcctccctataagggaggtccgaatttatttcc

SEQ ID NO: 352680 - DNA, 571 bp, Homo Sapiens
  misc_feature (22)..(22): n is a, c, g, or t
  misc_feature (44)..(96): n is a, c, g, or t
ttatatatatatacttttttanttttaagagatagggtcttgcnnnnnnnnnnnnnnnnnnnnnnnnnnnnnnnnnnnnnnnnnnnnnnnnnnnnnaaaagaggaagatataacaaaattattccaagaaatgaataaaagcctatggtatgagtgctttccaactgagtgattaacttttgatatgctattttgtctttgtttgaatcgtgagttgtgaagtgtttagaaaaatctgtcaagtacacaagtctgcttttttggtagttggatcaaaatattaaatctcttatcaaatgtttaagaaaatgtgattaataaaatatgtaaatggtattaaatgttcaggataattggaatttacaaattgttaaagaatgggaatgtaatttctcatttttatcaaatttactgttcttatatcttcaagttgagcttagagatttaaaaatgctgtattttaaatgtattttaataaagcaaatattaaaacaagtatttataagtatttttcttcccataccaaaagcctgctttgacagtaaagcttgttgacacatggttcaaacac

SEQ ID NO: 352681 - DNA, 354 bp, Homo Sapiens
  misc_feature (169)..(169): n is a, c, g, or t
cctctcctgatcaacatcggtatgatgtctcctgttgcctcaccctttgtctgcagtatcactggataggactggtggaaagggagcagcctgacagagctccaaatgtggagaatatggcatccctccacctatatttgatgtggacggtaaggctaggcctgcaggntcccttatcctgaccaaagactgtgttggggtgccatttgaaaatcgcagggttgcaaaagaatacaatcttacttgcaggtggatattctctatactctcttttaatgcatctaaaaatcccaaacatcccctggttggtgatcacttacagttgtgtccacctttattttatgtactttgatt

SEQ ID NO: 352682 - DNA, 431 bp, Homo Sapiens
  misc_feature (406)..(406): n is a, c, g, or t
  misc_feature (411)..(411): n is a, c, g, or t
ctctccccatcacaattcctctgggcacagtggagagccatgagtgggggctgtcctgggggctgcgctatggtgagtgagcccacgccaggagccagttcagcccagcctcattcttctcctgcttctttgctttccaagttctagttcataagcaaccagcacagtacctggaatgtaagaggcgcttggcttataaaagagagaagaaaggaacccctttcaccacgagggacgtcaggcccagctctctgtcccgggcattcatcttttttccggcaattagcttcagctctaatgacctgctgtctgctttatgttgcacctatgaatttccagattgtaaagtttgtgggcaaatgtattaacgttcacatcccattttacagattaggcaaactaaggntcttnagaaggttattgtggatttt

SEQ ID NO: 352683 - DNA, 890 bp, Homo Sapiens
  misc_feature (867)..(867): n is a, c, g, or t
tatttaggggcctggcttgctgctctccatttcctgtatcgctaattttatcatttttccaaccttggtattttatattatttagagaaaatgctgggtcactctctttgcctaaggtgactcaaacagcccaaacgaaaacttccgttgcctcccagccctctgtatccaccctggttttggtctttccctgtgagcatttgtggttatagcttcccatatgccacattcaccggccacctcctcgccgtggaaccctgccctctcccctcctgctgctgtagagttttcccaaagcagtgtccaggagagaatttgagagagtgaagaaattgccttgtagatgtggagggctgcaatctgttttgatttctccaagcacttaactttctttgactgcactgagaattgctaatgatttcccatgagatttgcttacttttgtatactgtattttccagcattacagaaccttggttattgttttttagccatagaatcttctagtaaaaaatatctgccaccattttagatttaagcatttgcctatggggagacactgaatatgtggatgtgtgtattaatatttggggtggggacagggaagggaatgtggaaaacaaatgctggctgtgagcagtgctgagatggccaggccaggcggctgagtttgcttggaaattcaggacattctgactcctaagagttgcccccacccaccattcaaactgaaatcagcaccaatggtgtcagcactttacagcccatagccaactttctttatttttaaacgtagcacaaaaatgtattattagccaaggaaaagacatttttaaaattccggttattttttattgtctaaaatgnaagcaacagtgttttgattaaag

SEQ ID NO: 352684 - DNA, 796 bp, Homo Sapiens
  misc_feature (776)..(776): n is a, c, g, or t
agcgggtggggctgcagttggcaagatggcgccggtgggggtggagaagaagctgctgctaggtcccaacgggcccgcggtggcggccgccggcgacctgaccagtgaggaggaggaaggccagagcctatggtcctccattctgagcgaagtgtccacccgcgccaggtccaagctgccgtccggcaagaacatcctggtcttcggtgaagatggttctggtaaaacaaccctcatgactaaactacaaggagctgagcatggcaaaaaaggaagaggcctagaatatctctacctcagtgtccatgatgaggaccgagatgatcacacgcgctgcaacgtgtggattctggatggagacttgtaccacaaaggcctgctgaaatttgcagtttctgctgaatccttgccagagaccctcgtcatttttgttgcagacatgtctagaccttggactgtgatggaatctctgcagaaatgggctagtgttttacgtgagcacattgataaaatgaaaattccaccagaaaaaatgagggagctggaacggaagtttgtgaaagattttcaagactatatggaacctgaagaaggttgtcaaggttccccacagagaagaggccctctgacctcaggctccgatgaagaaaatgttgccctgcctctgggtgacaatgtgctgactcataacctggggatcccggtgttggtggtgtgcacaaagtgtgatgcggtgagtgtcctgtagaaagagcacgatgacagggatgagcatntggactttatccagtcacac

SEQ ID NO: 352685 - DNA, 784 bp, Homo Sapiens
  misc_feature (581)..(703): n is a, c, g, or t
tccatctcgaaagaaagaaagagaaaggaaattccccagggaagtacctcggctgatttcataaacaggtaccgaaggaagcagaggcatgtggaggacttccccagctcatgcagctatttgggccgtggcgtctgaaatttattatttcagagtcacccctttgatgaccttagcagtggactgcagtcatctgtttaggcctctccatggcccacgtcaatgccgctatttctgtttgttgcacatttgatttccttgttgttggcatttagaaggccccctgtttcccagatcacaccacgggcatggaccacagagattgcatcttgtgagtctgtagaaacagtcaaggccttgtcctctcttaggtccagagctcaggttaatgcagattttcccggccgtctgtgctgaagtccctgtggggaggctcctggctggtttcctgtaggtagacagctacacgtcctgcccttcattggcttcttttcatgaagctcctgccatctacaaaacatgtctcccttcttgaatcacatctctgttattgaaactctagaagtcaaccgggcatggtnnnnnnnnnnnnnnnnnnnnnnnnnnnnnnnnnnnnnnnnnnnnnnnnnnnnnnnnnnnnnnnnnnnnnnnnnnnnnnnnnnnnnnnnnnnnnnnnnnnnnnnnnnnnnnnnnnnnnnnnnnnccaagcatggtggtcactgtactccagcctgggtgacagagcaagactccgtctaggagcgtcatcgggatactctagaat

SEQ ID NO: 352686 - DNA, 316 bp, Homo Sapiens
  misc_feature (295)..(295): n is a, c, g, or t
cgatgtagtacaccgtgacttaacacagtgggacactgagagctagagcatctcgatgtagtacaccatgacttaacacagcgggacacggagagctacagcatctcgatgtagtacaccatgacttaacacagcgggacacggagagctagagcatctcgatgtagtacaccgtgacttaacacagcgggacactgaaagctagagcatctcgatgtagtacaccatgacttaacacagcgggacactgagagctacagcatctcgatgtagtacaccatgacaacacagcggngacactgaaagcttcagcatc

SEQ ID NO: 352687 - DNA, 297 bp, Homo Sapiens
gccatcatgtccttgggtaggggaaaccccgctcacaccaagaatggctatcctcattctggggtggtggtctcctgctatctctgagagcccccagaactctgtggcttctggggatgtcctgggagggagaattctgtctatctagattgagaaggtctggtccctaaaagcctgtagagaaagacagccccttgcccccctggagggatgctgctggcatcctgccagcaagctgtcttctccctgcattacttcataggaactatgaactgagagccagatctaatcccggcc

SEQ ID NO: 352688 - DNA, 299 bp, Homo Sapiens
gaattgttgagccctgaggttcgacataaatcgtttatagtgtaactcatctccccaggtgaaggcatagagaagacagatgagtcttctaatctaggtttgtccaggtggaatttttgccaggctggtaagagaagaagacagattgacaaggaagctgatgaggctagccagagagtaactgtaatccagaatgatgtctattggagactttgcccaaagggaaaggaagtgaagatgggaggggatccaagtaaacgtggtgttctggtcaatgcagagaagggttatcatagtca

SEQ ID NO: 352689 - DNA, 666 bp, Homo Sapiens
ggttgatgatgtgctacgttagccttgtaagatacacccccaccaaatgtgcagccggagttcccagtgtatatttcattctcttgtatataaaggaagcaatgtgtgtcaggcctctgtgcagtcaacccagcctcctcccgccaatgctaaccccgtgttgagcctgcatgctgacactgtggccgatctggactctagaagtgctagtttgaaatatatccattactgtcatttccttttgagcttgtggacaagctgaatgtcaggactgacttctccagctcccagccctgcgggggtgtccttggcatcccatcagcagaggagatgcgtccctgttgcattttggcgtttggggctttgggtttatccacatgagctctgaacgtccgttatagttagggtgattggaaggtctccatcactgggtgttttaaaggtgattcaccaccatttgtgaaaggaccaacgtgctgataaacaggaccgatccgagtgctacatgactgtgcgtttgctatttcaatgggcctgaacgactacaaagccagctaggtctggaaggggaagccagctctggccacgacatctggtcggagggaagtggggatgtggcatggtagcgtctgttcatccatggaataaaacattattttaccacaa

SEQ ID NO: 352690 - DNA, 789 bp, Homo Sapiens
ccgtcgcacatacgcggggccacacagagccccgcttccccgcttctagtgcctgcctgccttacacggctgcagggagcctctcctccttgcagccagtgcagagtgctagacgtgccgacctcaggagtggcaccagacgggatcccagagcaggcccaaggagccgagcagcctgctgggaggagtgcagagggcccatccaggaagatactggtggaggtggggagcacagggaccccgagatggggggcgcatccgatggcaattcctcttcttccacatctgctcgttcttgccgagggtgcagtggtggcgtggaagccctgtcaccccaccccaggccaccctctcccagaggacgccatctcccttactgttgctgggagcctcgccctttgtcccaactgggtagagcccccaggtgctgtttgctcaggaggctgtctgtgggggtgccttcctcagcctctggccctcttggctcagattcaatcaaatgttgcttccctctcctgtctttcccactggagccgcccaagcttgtaggtgggtggtgtgcataggccacgtgtgccccacatatgcagggggtgccccacacagctagagcggccaggagagcgcctcctaaccacctagccgttcctgatctcaggagcctatgaagggctgggctcttgccttcctggagtaaatattggcacagatttcatttgagagaactcagccccctggtctaagctggacttacctctgtggattctgaaattaaagaagtgagttgct

SEQ ID NO: 352691 - DNA, 763 bp, Homo Sapiens
ccggtgtccaggggttccaaggtggaacgcctggcctgggtggtcaacagacagcattgggggccaggtgttgcctgggaaaagtgggcaaaggggagacagccggcaagaggttaccagcgagcagaaagtgcagggtcttcacaggccactttgaggccctgtagacaggggcctttggcgggtctgacccagcttctgtgtgagaacagccactgtgagggcaggaggagcttcatgaacaccactgctgtgtgtgacccgggaaagagatgacaggccccgggctaagatgctacagggtgggggtggtaagaagcgtcaggttctgtgtgtgctctcaaggtagagctggaatgatttcctgaggaccattacggcctacgagagaaagagaggagtcagagatcaccgagtgctctcgcctgacccactggaggccagtaatgccactgactgcgacgggaaaggctttgggtaaagcaggccccaagcggggtgtgcgggtggatagcaggggttccataaataaggacatcaagcaggcagctgaacacatgagtgtgaagtggagagagaagactggactggagctacaaatccagacgccatcaggatatggacccgataagaccactgagcgagtgacttaaagacagagaaaagaacaaaggtcaagacttagcccggggtactccaacatgaagcgatcagggacaagaggcctgagagggacgtaccagggaggtagaaggaacacccc

SEQ ID NO: 352692 - DNA, 303 bp, Homo Sapiens
tgtcttgctaggaggctatcttgctggctttgaagatgtgagctgccatgtcatgagtggccagatggagaggcccatgtggcgggaagctgaggacagcaaagaacctggggccctgagaccagcagcctacaaggaactgaatgctgccaacaaccagatgagaagggaagcagatcaatcaccagtcaagcctccagatgagaactgagccctggctgacattatggttgcagccttgcactgaacccagctgagtcacgcctggattcctgacccacagaaaccacatagtgataactg

SEQ ID NO: 352693 - DNA, 963 bp, Homo Sapiens
  misc_feature (908)..(908): n is a, c, g, or t
  misc_feature (910)..(910): n is a, c, g, or t
acactcgtcccacctcttcttccaccagtcccctcacctgatggtcccaacatttcatcatccaccacctcctggagggggtaccccgaggtgctccgctggggactctgctcattctgggggtgcggttgacggctggtcgtgatctttcccgtaatctgtcccctcttacggaacctagtctccgttctgtccatggccttcttctggacactgctaggatccagaagagtatgttatcaattctcaagcctaggagaagtcaggagtggagaacagctctgagaagatactgttgtccaactgatctccaggcaccacggagtccggtccctccaatcaggaaggtcggaatctctgatgtcatcgttcatgccaacctggcaaccagtttgaaaacaacaacacatgtacactgaccaggcatgatctctatgtcactggagatcctgggtgaatggtatctcctgccactgtcccaacctcagaccattgtccaaaagcatcttcagggactccacatccctctgttccctgtcccagcagaggctgtgtcctctccactcaaagcctgaagcatgttggggtctcttcgtctctgtacatgcccatttcagagtccagtctggtgggagagggaacagaatgggaaagaaaactagggtaagcagaaacgatgaaaccttacaagagtgagattatcatgtacaagagatcccaggaacattgacttgatgaaaaagtcacatcagagcactcaatttggcagaggttttctgccgaatgtctactgacattcactgtccgagattctgtactgggggtacacgcgtactctgccctaaggcatctttgagtccaagagatactttgaggactggaaatcataggaaactgcccatgagttnanacatatttccaatggtgtccccaatttcagggagtccacggatcacctaaagc

SEQ ID NO: 352694 - DNA, 306 bp, Homo Sapiens
  misc_feature (143)..(143): n is a, c, g, or t
  misc_feature (291)..(291): n is a, c, g, or t
atacgctgtgaggagcaaaaggaattgctgcaggcacatcctgggcatggcccctcttcctctttggcaccatgcagtccatgccatgtggataaagagcctccaagagagcattttgcaaggctgacagagcattgcttgtnttgacaatgaagcccagaatataacaaaacagatgcagaacgggttctccatcctcgcggctgatgagccattcttagtagtcaacagggcttctgtgcttacaatgaaagaaaaatgccaaacccctgactgcctcactcttcagtntccgacccctacccc

SEQ ID NO: 352695 - DNA, 307 bp, Homo Sapiens
  misc_feature (16)..(16): n is a, c, g, or t
  misc_feature (47)..(47): n is a, c, g, or t
agcggaaagctgagcnagcaagtctctgctgacatcagatgattatnagctgggagcagggataagaaagagacacaaggggtctgaggaggaacatgatgccctcatcggaatggggaaagccagggggaggaaccagacttgggatgaacatgaggcctcgtccgacttcatcagtcagctaaagattaagaagaagaagatggccagcgaccaggagcagttggcaagcaagctcgacaaggccctctccctcaccaagcaggacaagttgaagtcgcccttcaagttttcggacagtgctggg

SEQ ID NO: 352696 - DNA, 256 bp, Homo Sapiens
tcctccccacggtgagacatcactacagccacactccatctgcccacagtgagacatcactgcagccacactccatctgcacacagtgacacatcactgcagccacactccatctgcacacagtgagacatcactgcagccacactccatctgcccacagtgagacaccactgcagccacactccatctgcccacagtgagacatcactgcagccacactccatctgcacacggtgacacatcactgcagccacac

SEQ ID NO: 352697 - DNA, 292 bp, Homo Sapiens
  misc_feature (93)..(93): n is a, c, g, or t
  misc_feature (102)..(102): n is a, c, g, or t
agcatgcttagctgggccatctcccaaggctctttgccatagtaataatcaacaagaaattgtgggatgtgtctcttctgttggcatctatgnaaaatcgcnccatatgttctgccaccacggggcagcaagaacacgctttgccagcttggctgacctgcgcagttgggtgcgtgtccaccgtcatctcagccttgctcctcattgcttgctgcgtgccatttaccacaacagtgctgtgagttgtatgttatcatcctgcattctccgaacactgaacagtttacccagg

SEQ ID NO: 352698 - DNA, 962 bp, Homo Sapiens
  misc_feature (105)..(105): n is a, c, g, or t
  misc_feature (697)..(826): n is a, c, g, or t
  misc_feature (831)..(864): n is a, c, g, or t
ccccagcaagcagacgtttccggttctcctctctctccttcccacatcaaccgcaaaagccaccaacctcctctgggttcccgtgacagaggtcacagtccaggncccccttgcatcactcgaatccactgtcaaatgctccctggctggggtctcctggagtccctccccaagccaaggggcttcctagtgcagcctgaacatctttccaaagcacgacaacctcactgcccacctgaacaacttccttagctgatgcctttctctatcgaggccagggtccacagtgtcaattctaccctctctacaatctctacaagcacactggctcgccatcttggtatttcctggctcggcttcactgctccttccaaatgccctccactcgactttgtgtttgtgttttctgtctgggtgtcccgcacacatgtggctctgaagggaaggacccattccttgaaatcagttcaccccacagcctctgtgatgccttccctcatcttccaacttctgcatgcccgtagctctctagttacatcctggacactgggattaggtcatctgccttgattactcccagtcccattagactagatgcctgtagaaggcagggtcctggcaaaatatcaatgtattcaatttcttttatttttttgagacagacttgccctgtcccccactgcctcctgggttcaannnnnnnnnnnnnnnnnnnnnnnnnnnnnnnnnnnnnnnnnnnnnnnnnnnnnnnnnnnnnnnnnnnnnnnnnnnnnnnnnnnnnnnnnnnnnnnnnnnnnnnnnnnnnnnnnnnnnnnnnnnnnnnnnnttcannnnnnnnnnnnnnnnnnnnnnnnnnnnnnnnnngcatgagtcacctgcctggccagggtcttgctctttatccaacttgccactctgtgacttttcattggggcacttagccccttcactttcaaggttaa

SEQ ID NO: 352699 - DNA, 312 bp, Homo Sapiens
  misc_feature (62)..(62): n is a, c, g, or t
  misc_feature (178)..(178): n is a, c, g, or t
  misc_feature (230)..(230): n is a, c, g, or t
  misc_feature (271)..(271): n is a, c, g, or t
gaattcccaggctggaaagactaacgacagaatgccgtctatctgtggttgaacgtgaaatnagaggagggagggtggcacgctggcacacctgtgggatctcctgcctggagcccttcaacctcagcctccccttcacacaacccacagggtaaggtctatgcaggtttaatatttncaaaaccaggtatggaaaatgcagacacaatatagcaaatagagggtctttncctgtcatggaaatcggtcagccctgatgcttctgcatttntttccctttgtgcttgtgatcaatcacacatgaacccatgg

SEQ ID NO: 352700 - DNA, 160 bp, Homo Sapiens
  misc_feature (94)..(94): n is a, c, g, or t
cacttccccctggtgtcccttcaccaccatctggtgtccccttactgccctgtggtgtccactcattactctgtggtgtcccctcactgccctntggtgccccctcatcaccctctggtgtcccttcatcaccctcttgtgtcccctcacttcccgagga

SEQ ID NO: 352701 - DNA, 288 bp, Homo Sapiens
ggccgccatgcccagcacagggcttggtacgaggtctgtaatcagtgtgaccttaatgaatgtcctgtagaatgattcccatttcacagacgggaaaaccgaagcttagttgggttaaaggagttagctgcctggggtctgccgagccggggctgaactgcctctatgggttgggggctttctgaaggcaggggggacttgtagcatacgccccatgactcagcatttccattctgagacatccaccctttacagatatgtaacgggagacacagacaagaggatccg

SEQ ID NO: 352702 - DNA, 651 bp, Homo Sapiens
caaaaggtagagggagaaagaatccaaagattctcacgtgcctgagaaaacccaggcaatactatgttaaagcatcagtcaaatgacattaacatctgttaactgtaaacagtcacactcccattaccccccttctccactaaaaacaataatcccaaagtgagcgctcagcctatgggtttaagcagagggctacagaaaacagggaagagacatacccctgggcttggattcccagagaggaaaccttggggccccagatgtgtcctcctgatctccctgagctattaatggtgtgatgcccgagggctgggcccttgagtctctcctcttctccatcttcactggcttccccagccactcacgttcatgtccttaaatatcacctatactctgccacatcccaaagggatctcaagccttcagctctcccctgaactccatcttaacagcccccatggtttgttcaacatctccacctgtaatcctgtgggccaacaccaatgccccaaccttcccccacagctatcttcactctctgccttccccatctcagatactgtcaactccgtccttctgtcaggccaaatccttggagccatcctcaagtgctctttttgtctacatcccacatccagtgtgatagaggta

SEQ ID NO: 352703 - DNA, 273 bp, Homo Sapiens
  misc_feature (76)..(76): n is a, c, g, or t
  misc_feature (78)..(78): n is a, c, g, or t
  misc_feature (227)..(227): n is a, c, g, or t
  misc_feature (238)..(238): n is a, c, g, or t
  misc_feature (251)..(251): n is a, c, g, or t
aacagatgcagtcagacccacataagctggactttggactgaaacctgagttcctgagccgccctccaggccccantntttttggagccatccaccacccccatgacctggcacggccttcaactttgttctctgccgctggtgctgcacacccaactgggaccccttttgggccacctcctcatcacagcaacttcctcaaccctgctgcccacctagagcctttnaatcggccgtntacattcacaggnctagcagcagttggtggcaatg

SEQ ID NO: 352704 - DNA, 2092 bp, Homo Sapiens
agcgggtgtcgcacgcagctccaggcggggcagccccggtagctgagggacgcagctagaccttggcgggacggggctttcgccggggcccaggcccaggacgaggcggaggcgtcgcgggagcctttggggcaccacagagatgcgggtttgcctgcaatgagatttcattctctacatttaaaggacatcctttctgagctgctgtgaataaatttggaatggtactgtatattttcatctaatggagaactagctgtactttgaataaggattgctgcactggacgactttagaacatccctcacaatgtcgtcaacccggagccagaacccccacggcctgaagcagattggcctggaccagatctgggacgacctcagagccggcatccagcaggtgtacacacggcagagcatggccaagtccagatatatggagctctacactcatgtttataactactgtactagtgttcaccagtcaaaccaagcacgaggagctggagttcctccttctaagtcgaaaaaggggcagacacctggaggagctcagtttgttggcctggaattatataaacgacttaaggaatttttgaagaattacttgacaaatcttcttaaggatggagaagatttgatggatgagagtgtactgaaattctacactcaacaatgggaagattatcgattttcaagcaaagtgctgaatggaatttgtgcctacctcaatagacattgggttcgccgtgaatgtgacgaaggacgaaaaggaatatatgaaatctattcgcttgcattggtgacttggagagactgtctgttcaggccactgaataaacaggtaacaaatgctgttttaaagctgattgaaaaggaaaggaatggtgaaaccatcaatacaagattgattagtggagttgtacagtcttacgtggaattggggctgaatgaagatgatgcatttgcaaagggccctacgttaacagtgtataaagaatcctttgaatctcaatttttggctgacacagagagattttattaccagagagagtactgaattcttgcagcagaacccagttactgaatatatgaaaaaggcagaggctcgtctgcttgaggaacaacgaagagttcaggtttaccttcatgaaagcacacaagatgaattagcaaggaaatgtgaacaagtcctcattgaaaaacacttggaaattttccacacagaatttcagaatttattggatgctgacaaaaatgaagatttgggacgcatgtataatcttgtatctagaatccaggatggcctaggagaattgaaaaaactgttggagacacacattcataatcagggtcttgcagccattgaaaagtgtggagaagctgctttaaatgaccccaaaatgtatgtacagacagtgcttgatgttcataaaaaatacaatgccctggtaatgtctgcattcaacaatgacgctggctttgtggctgctcttgataaggcttgtggtcgcttcataaacaacaacgcggttaccaagatggcccaatcatccagtaaatcccctgagttgctggctcgatactgtgactccttgttgaagaaaagttccaagaacccagaggaggcagaactagaagacacactcaatcaagtgatggttgtcttcaagtacatagaagacaaagacgtatttcagaagttctatgcgaagatgctcgccaagaggctcgtccaccagaacagtgcaagtgacgatgccgaagccagcatgatctccaagttaaagcaagcttgcgggttcgagtacacctctaaacttcagcgcatgtttcaagacattggcgtgagcaaagatctgaacgagcaattcaaaagcacttgacaaactcagaaaccccctagactaggatttcagccattcaagtgctgcagctccgaggttcctggcccttccagcagttcttgtacaattctgcctcggccgtcagagttcggaaccgtcagcttatcaaggcgatcaacaggcatcttacgcccagccgcacctgtggccagaaaaaattgacgtcgccaacatcacccgctctac

SEQ ID NO: 352705 - DNA, 797 bp, Homo Sapiens
tgtaggctgaaggcttccagtgggcttctggaagaagcccctgtttcctgaatgaagtacggttcctggcttgagccaggtaaacctctcctagaatgtccgttccacttggattacaggagaggtttccatagtagggaggtttaccagggagcctcgggtgtttcggtgaggaggacagaagacttccgtctgggtctggaagtgacgttgggcacaggtctaggacagaactcacacacctgccatctcggctatcacaagggagcttgggccggaactccgggtcaagaggctaaatgcaaacactgattttaccccaagcctctgcttagccagctaagttaatggcaaaagccttaagttatgaacaatgcctccaattaacaaaaagaagccatttaaaatggcataatggagcttgtaattaagtgttagtgttctatatggaaccgtttcccccaggggagaggtacaaatcagctttttaaactcatagagcgtgaagaggaagggggtcggctgcctgcgggggccactgcttggaatgccagcctgctgaaggggagccatgccgaggggacactgttcaaggcacttgaatactgcttagcaagatgagagattaacccttagactccaactgaggggcccaaccaggagggggtgctcccctggccacggattgctgtattattttagtggcagctcttagaagtattacagacagtgctagcttcacatcaaagatctaaggttaggatctctattttttttaaaaaaataaataatagagg

SEQ ID NO: 352706 - DNA, 857 bp, Homo Sapiens
ccggccggctaagccgcggcggacaactatgctgaaagccaagatcctcttcgtggggccttgcgaggatcctagaatttgagaacccgcatgttaccagcaacaacaaaggcacgggctgtgaattcgagctatgggactgtggtggcgatgctaagtttgagtcctgctggccggccctgatgaaggatgctcatggagtggtgatcgtcttcaatgctgacatcccaagccaccggaaggaaatggagatgtggtattcctgctttgtccaacagccgtccttacaggacacacagtgtatgctaattgcacaccacaaaccaggctctggagatgataaaggaagcctgtctttgtcgccacccttgaacaagctgaagctggtgcactcaaacctggaagatgaccctgaggagatccggatggaattcataaagtatttaaaaagcataatcaactccatgtctgagagcagagacagggaggagatgtcaattatgacctagccagccttcacctgggactgccacatccccagtgaaatcagcatgtttctcggtgcagatctgaaatcacatccagctcctgatgttttcttctccctctgactgcagaggaagtgttcctacctgcaggaaggcacctgtcacacagggcgttcactcagaccatctgtgctctgccctgagttcagttgagaaaatcctattatcaaatttggatttcctggccccagaacttcccaaagacctgtaaaatggagggatttaccacctcacatatgtccagttaaacagtttgtggacttgtaaccgtcgcagcccaatgatacaacagtagtttaatcacgaaaa

SEQ ID NO: 352707 - DNA, 927 bp, Homo Sapiens
ggggccatggaaacgaaagcggccaagtagagctccgtcctgacgcgccgcctcccgtgggctccggccggctaagccgcggcggacaactatgctgaaagccaagatcctcttcgtggggccttgcgagagtggaaaaactgttttggccaactttctgacagaatcttctgacatcactgaatacagcccaacccaaggagtgaggatcctagaatttgagaacccgcatgttaccagcaacaacaaaggcacgggctgtgaattcgagctatgggactgtggtggcgatgctaagtttgagtcctgctggccggccctgatgaaggatgctcatggagtggtgatcgtcttcaatgctgacatcccaagccaccggaaggaaatggagatgtggtattcctgctttgtccaacagccgtccttacaggacacacagtgtatgctaattgcacaccacaaaccaggctctggagatgataaaggaagcctgtctttgtcgccacccttgaacaagctgaagctggtgcactcaaacctggaagatgaccctgaggagatccggatggaattcataaagtatttaaaaagcataatcaactccatgtctgagagcagagaccagggaggagatgtcaattatgacctagccagccttcacctgggactgccacatccccagtgaaatcagcatgtttctcggtgcagatctgaaatcacatccagctcctgatgttttcttctccctctgactgcagaggaagtgttcctaacttgcaggaagggcacctggtcacacagggcgttcactcagaccatctgtgctctgcctgagtcaagttgagaaatcctattatcaatttggatttctggccccagaacttcccaaagaactgtcaattgggggatttaccacttacatatgtg

SEQ ID NO: 352708 - DNA, 310 bp, Homo Sapiens
agcggaaaacgaaagcggccaagtagagctccgtcctgacgcgccgcctcccgtgggctccggccggctaagccgcggcggacaactatgctgaaagccaagatcctcttcgtggggccttgcgagagtggaaaaactgttttggccaactttctgacagaatcttctgacatcactgaatacagcccaacccaaggagtgaggtgagccctgacaaatctgtgtcccagagtgtccaactggctcggcagggaggctcattcctctagtcccggtgctctgggaggtcaaggcgggaggatcgcctgag

SEQ ID NO: 352709 - DNA, 970 bp, Homo Sapiens
tgagttgtaaatccctccatgttacaggtctttggaagttctgggccaggaaatccaattgaataataggattttctcaactgaacttcaggcagagcacagatggtctgagtgaacgccctgtgtgacaggtgcccttcctgcaggtaggaacacttcctctgcagtcagaggggagaagaaaacatcaggagctggatgtgatttcagatctgcaccgagaaacatgctgatttcactggggatgtggcagtcccaggtgaaggctggctaggtcataattgacatctcctccctgtctctgctctcagacatggagttggattatgctttttaaaatactttatgaattccatccgggatctcctcagggtcatcttccaggtttgagtgcaccagcttcagcttgttcaagggtggcgacaaagacaggcttcctttatcatctccagagcctggtttgtggtgtgcaattagcatacactgtgtgtcctgtaaggacggctgttggacaaagcaggaataccacatctccatttccttccggtggcttgggatgtcagcattgaagacgatcaccactccatgagcatccttcatcagggccggccagcaggactcaaacttagcatcgccaccacagtcccatagctcgaattcacagcccgtgcctttgttgttgctggtaacatgcgggttctcaaattctaggatcctcactccttgggttgggctgtattcagtgatgtcagaagattctgtcagaaagttggccaaaacagtttttccactctcgcaaggccccacgaagaggatcttggctttcagcatagttgtccgccgcggcttagccggccggagcccacgggaggcgcgcgtcaggacggagctctaccctcgtgccgaattcgccacccccggctcgcgggttggtttttttcccatttccatatcgtctttgggccgggcg

SEQ ID NO: 352710 - DNA, 457 bp, Homo Sapiens
ggtcatgggtgcagacatgccggtatttacaccagtggcagcggtatggactctccacgcaggacaggcacgaattgtggacgctgcaattgtagaagacaaagctggtgctggcgaaggtcatgccggtctcctttgatttgagctgaagctgtacgacatggtggtccccattctctgtgatgatccggggcacctccttggctgcaggggagtagcactggatctgattgcccacgaccagcccatccatctctgacaggtcctcaaaggtgcagttgacgccagctgacagctccgggacattgtacgtctccaggaccagcagcacgttgtactgagagacggagatattgttgggatggaccgtcagccggacacactgcttcatctccgaggcaaacctgcgggggctccttgggaccgctcacaccgctccttccgggtggcaagtgtt

SEQ ID NO: 352711 - DNA, 456 bp, Homo Sapiens
  misc_feature (346)..(346): n is a, c, g, or t
  misc_feature (356)..(356): n is a, c, g, or t
  misc_feature (390)..(390): n is a, c, g, or t
  misc_feature (400)..(400): n is a, c, g, or t
tggatcactttgcatggccctctctcccctcctgaagcttgtgcccagggcccccagggctgacctggagaaggaaaatggcagagggtgaagatggggtgtctggtttggggaccatccctggccccccttgtcactgttggcatctcttctgcacagtggcattgctgggaggtgcttactgtgcctattcaaggggctggcagccgcagcctcactgcagatcagggacttggcttcccggttgaccacaggtccaagaacctgcagggtccagcctcccccccatccccagtcttccccaccctggcccggccctccaggtgcagaaacatgcaggcccctnttcaggactntgggaggagcgtgtccctcagactggcctgtgtnctgggtcctnttaccaactgtttcacaggttgtcaactggcagctgccccaggataaaggcaaggc

SEQ ID NO: 352712 - DNA, 1133 bp, Homo Sapiens
tgctgctggcggtatctccccatagtagtccgccactgtgtcgtactcacgccgatcgtactctgggggaaacgtacccttagtaaaggattatgtgtgttttaactcctctcatatagtcatcagcgccgtatatacatgcgcacgagaaatcctcacaaacatgcgttcccgttacgtgtggtggacccacattggcacccggagatatatcgtgggttccccccttaccaaaggtgtgctgtacacagggggtgtcgccactgccgaatgatgccaatatgcttcctttataggccaaccctttgttggcccgcattgccttttgtttgagaaaccaatggtcgattcaaggacagtaaggtccccgttccgggcctgcaccgtcactgcaatgaacaattattggactagaacggcccctgtagcacttgtttacttttctgcggaagtccaggagggaccttgaggaggaagggactcctcggtcataccaactcaggaagtggaactgcgtcacggtgcgcgtctcgttggtctgcaggttcttcagatagaagctcctcaccaggaagtcctcacaccagatgtgctcggagaccaggttcacctcatagatgtggtagagattggagccttcatccggccagtagtggtagcactgccggacgccgttctccgcgaggggtgtcagcatgacgatcaccacgcagccgctctcccacaccatctgccaaaagtcagccacggtggcgggcagcggtccctgggtggcgatgtacgcggggttcctcgggtcgtgatccatgatggggctagcgttgatgtagtctgagtggctgtggctgttctccgccttcagcaggacccgggagtggtcataggtcagcacggccagggagcggttcttgggcacgttctcctccctctgggccacgaacgagctgttgggctccgcctggtaggcgcacagcgcttcccactccttctccagccggttcttgttcttcaggtggtcctccatgtaggacaggatcatgtggccggtggagatgtccatgttggactgcacaggctcctcggaccaggatgaggcgctgctgcttgccgaaggggctggggatcggcccgtc

SEQ ID NO: 352713 - DNA, 484 bp, Homo Sapiens
cacgatagatgtgcgcctaccaggcggcccaacagctcgttggccagagggaggagaacgtgcccaagaaccgctccctggccgtgctgacctatgaccactccctgggtcctgctgaaggctggagaacagccacagccactcagactacatcaacgctagccctatcatggatcacgacccgaggaaccccgcgtacatcgccacccagagaccgctgcccgccaccgtggcgtgacttttgacagaaggtgtgggagagcggctgcgtggtgatcgtcatgactgacacccctcgcggagaacggcgtccggcagtgctagccactacgtggccggatgaaggctccaatctctaccacatctatgaggtgaacgtggtctccgagcacatctggtgtgaggacttcctggtgaggagcttcatcatgaagatcatgcagaccaccgaacgcgcattcatcgggggagtcctcacgtcgac

SEQ ID NO: 352714 - DNA, 916 bp, Homo Sapiens
ccagagcctttgagagtggaaccttcctcgtgttcaattagaggacccagacttgggaacagagccgtaaccacacttccagccttggacacaggaacaaacgaaaaataatttttctgtgtcagacacctgaatcctgagggcatgtcaggatctattttcagatatctacattctgtcttcatccaacacctttgctgtgaggtcaacttgaatattccactgtgactcttccccaacccagtctcctccctcccagaggcagagccaaatggccccgagagtgtgacaagttgagacctgtaggacagacagcaggttgcctgcccaacaagcgattctgcccttctttctttccaaaataaccctgattccatctgggcagcaaattcctcagataaaagactttatgattctctatctcttgcagacagaatggtcacagagaggtatgtagaagcccttggatgaagcttccaggaaagatcttaaaggaccaactcagctagaagacgcgtcctttcgcccttcatcctctctctctgcctgcctaaaacatgacacgatggctggcactgtagcagccatcttgaatcatgaggcttctttaaagatagaaggtctgtgctaaggatgatgaagaagagtgacagaagaaagctgggtgcctgatgactttgtggagccacccattccagccgagaccaccagcctctgaaattcttctacctgagagaaaataaaccaccacctcattggaaccacagctacctggattttcccttctctgcagacaaatcctaaggccaagtgaggccaaagccatgtggccctcgaggctggcaggattaaggggcagtcactgtctcacttggagaattaggatacaccctttgggacatgctttgaccctaga

SEQ ID NO: 352715 - DNA, 312 bp, Homo Sapiens
tggggaagctgaaggaagaacagagaggttgcttgccttgtgtttaggggttcctggacacatgtctgggcaaaagcaaatgaggctggtacagttcccagccaacactgagcccaggcccacatcagtttccgcattccctgacctctcgtcttccacaattttagtagccaagtgtcctttccctaaaaccaaggatgtctgccctgcttggacacaaggcctctctccaggcctggcaggccactagacagcttgtggtgggccagtgtggctcttagcactgggttgctggggttggtgcaagaatgt

SEQ ID NO: 352716 - DNA, 235 bp, Homo Sapiens
ggcggaggctggagtgcacccaaaggtgagggtttggggcacagtctgttggcggaggctggagtgcacccagaggtgagggtttggggcacagtctgttggcggaggctggagtacaccccagaggtgaggatttggggcacaatattcacacaagctggagtacaccccagaagtgagggtttggggcacagtctgttggcggaggcaggagtacaccccagaggtgtgggtt

SEQ ID NO: 352717 - DNA, 353 bp, Homo Sapiens
gagagtttggggcacagtcttcacacaggctggagtgcaccccagaggtgagggtttggggcacagtcttcacacaggctggagtgcaccccagaggtgagggtttggggcacagtcttcacacaggctggagtgcaccccagaggtgagggtttggggcacagttttcacacaggctggagtgcacaccagggaggcttcccgcctctggcagaatcaccgccatgctcagtcacaaacccagagctgcgtttgcccgctgcagcacacgctgcggccccagcaacggtcctgcgcaccaggctcctctcccagtaaggtccgcttctctgtggagctcaggggtcactgca

SEQ ID NO: 352718 - DNA, 301 bp, Homo Sapiens
  misc_feature (174)..(174): n is a, c, g, or t
  misc_feature (183)..(183): n is a, c, g, or t
  misc_feature (199)..(199): n is a, c, g, or t
  misc_feature (237)..(237): n is a, c, g, or t
cttccttccttcctcggcccctccctcccttccttcctatctccactgctgctgctctgcttagctcagccttcctgcttctggttcggtgatgctgtaatggatcctacgcctctaaagtcctattcccaaaacctgatgatgtggtctcatcccgctgcaatggctcttttngtttaaatnctttaagtcttatttnccgttcccttcttcccaatcagggcctatgtgtttctncagcctgacctccccgtccctgaggtagcccccactccctctcctcctaggatgccctcctccc

SEQ ID NO: 352719 - DNA, 858 bp, Homo Sapiens
gggagcataatgcgaggcaatgtccagccgttccacccggcatacaagcttatagagcagccccctttgaagatctccaggtggacttcacagagatgccaaagtgtagaggtgatcgagtgtggatcaagaactggaacgtagcctctttgtgcccacggtggaaaggaccccagactgtcgtcctgagcactcccaccgctgtgaacgtagaaagaatcccagcctggatccaccacaaccatgtaaaacctgcagcgcctgaaacctgggaggcaagaccaagcccagacaacccttgcagagtgaccctgaagaagacgacaagccctgctccagtcacacccagaagctgactggtccacgcacagccgaagcatgaggaagctcatcgtgagattcatttttcttaaattttggacttatacagtaagggcttcaactgatcttactcaaactggggactattcccagtgtattcatcaggtcactgaagtaggacagcaaatgaaaacaatctttctgttctatagttattatcaatgtatggaaacaataaaagagacttgtttgtataatgccactcagtacaaggtatgtagcccaggaaatgactgacctgatgtgtgttataacccatctgagccccctacaagcaccagtttgaaataagattaagaactggccttttcctaggtgatacacgttgaaataataactagaacagaacgaacaacaggaatcccctaaacgaagttaactttcaagattgacggctgtgcagccattaatagtaacaagctaggaacaggatgtggttctctttaactgggaaaggagctacggagtaaaccatag

SEQ ID NO: 352720 - DNA, 920 bp, Homo Sapiens
cagcggtgtgtacctgccgacagcataatgcgagacaaggtccagctattccacccggcatacaagcttatggagcagccccctttgaagatctccaggtggacttcacagagatgccaaagtgtagaggtaacaagtatttactagttcttgggcgtacctactctgggcaggtggaggcttatccaacacgaactgagaaagctcatgaagtaacccgtgtgcttcttcgagatcttattcctagatttgaactgcccttacggatcggctcagataacaggccagcatttgtggctgacttagtacagaagacggcaaagatatcagggatcacatggaaactgcatgctgcctaccagcctcagagttccggaaaggtagagcgaatgaatcaaactatcaaaaatagtttagggaaagtatgtcaagaaacaggattaaaatggatacaggctctccctatggtattatttaaaattagatgtaccccttctaaaagaacaggatattccccttatgaaatattatatcataggccccctcctatattgcggggacttccaggcaactccccgagagttaggtgaaatttgagttacagcgacagctacaggcctcaggaaaacattacacaaaaaattctcagcctgggtaaaatgagaaatgccctgttaaccttattctccccagttcacccattctccccagatgatcgagtgtggatcatggactgaaaacagtagccatgataagatgtacaccggtggaaaggatcccgagatcttggcaaacatggagccattccaaacgatgcgaaaggacacgggaaccaaactggaacacacaaaccggtgtaaaaactgcagtgctgagactgggaggaagacaacgccaaagacccgtagagtgcctgagaa

SEQ ID NO: 352721 - DNA, 573 bp, Homo Sapiens
  misc_feature (485)..(485): n is a, c, g, or t
gtgggggaccacagggactgaccaaagaaaggcaggccagatcccaggacagcaggggttctaagtccccaagagtggggactgggccggagtcaagttttgccaaccatcggaccagccccgggcctctatgatgaaggcatcagagaaaccccatggggccagaaaggggctggggcaacggtgtacctttgggatctggggtcagagggggaaggaggtgactgcatggcaaggcaagagctgaaggccttctggagaaggagggtccagtccttgtccccaccctgatccaggtcactgtggacgcagctgggagctgagcctggcagcccatgtgacacaatggtggggggatgggagcccctacgtggccaacactgccagccacacagctagagggcttggggtaagggctgcgtgaagaggaatggggtctctgagtcccgcctctgtgctgtcctcagggacaccctagagaaggnacttgcttgggggctgctttgaggagagaacagctggttggacacactgggctctgtggcctgtgggacatgaaagaggggacccagg

SEQ ID NO: 352722 - DNA, 371 bp, Homo Sapiens
atcagtctcttctcacactgctaataaagacatacttgagactgggtaatttataaaggacagaggtttaatgaactcacagttccacatggctggggaagcctcacaatcatggcagaaggcaaatgaggagcaaaggcaagtcttacatggacaagaaagcatgtgcaggggaaatcccctttataaaaccatgagttctcgcatgacttacatcaccagaacagcgcgggaaagacccgtccccataattcatttacctcccactgggtccctctcacaacaccatgagaattatgggagctgcagttcaagatgaaatttgggtggtaacacagctgaaccatattatattcgtatgtgtgtgtgtg

SEQ ID NO: 352723 - DNA, 281 bp, Homo Sapiens
attccccacctcgccctgacaccccagctaggagacgagaaagaccttcagggaactggcctggccaagggcctctcaccggactctgttcatctttgcaatcatcacaacctccgggagagacagatgctgacgatttgtaacaacaactctcatttgtggagccagcccttttccagcccgtttagttcttgcaattaacgagatacgatatcattagaccccatttacagacaaggaaactgaggctcagggagactaactaccctggccaaggtcac

SEQ ID NO: 352724 - DNA, 296 bp, Homo Sapiens
ccccaattaatccaactggctgtatgactcgattcaaccaacaggaggaggcagaattgatgttggaactgttccatgcctccactttaaggaggcttggcagtttgcactctggcactcttgggaagcctaagccactatataagaattatggttatcctgctagtggggttcttgctacataaaaagaccacgtaagaagccactttgtgaggaagaggcctaagatgggtgggagggagaagatgccccactgttccaatattccagttgaacccagtcatccctactaaggc

SEQ ID NO: 352725 - DNA, 372 bp, Homo Sapiens
  misc_feature (11)..(11): n is a, c, g, or t
  misc_feature (345)..(345): n is a, c, g, or t
ccctgtctctnaaaaataaaccacagctcagtccactactcacaacatccctgagttgctattttccacaaggcttccctttgccgaggctcagccaggcagctgtgccatatctgaggaccccggggtggctgccatcagctggggtttggccgagaccacaacccctgcccatgggctctcagccctcatcggtctggccccggcttctccccatcacagtggtggccttcctctctccattacagtggtggccttccaagaggccaggcatggacacaagcacctctccctccacatggtagcagccaaagcaaaccacaggccagcacagctccaggcaanagatgaggacaagccaccaacccggcc

SEQ ID NO: 352726 - DNA, 1651 bp, Homo Sapiens
  misc_feature (84)..(176): n is a, c, g, or t
  misc_feature (261)..(297): n is a, c, g, or t
  misc_feature (772)..(772): n is a, c, g, or t
  misc_feature (828)..(828): n is a, c, g, or t
  misc_feature (1563)..(1563): n is a, c, g, or t
  misc_feature (1649)..(1649): n is a, c, g, or t
cacagagattcttatttatgcggttacaaatccacgtacagtgaaaaatgacaccatcaagccaggcacagtggtgcccactgnnnnnnnnnnnnnnnnnnnnnnnnnnnnnnnnnnnnnnnnnnnnnnnnnnnnnnnnnnnnnnnnnnnnnnnnnnnnnnnnnnnnnnnnnnnnnaaaagaaaaaataacttttaaaatgaccatatcatggaaaattctggagagcagttatcttgggacagagatgaggcagttggcnnnnnnnnnnnnnnnnnnnnnnnnnnnnnnnnnnnnntggtcacagtgagtcctagctgctctgaagtcgtgagtggggacagcagagcctgttcaggaggctgctgactgtccagggctttgctgagtgcctggctctgccaatgggaggttaccagcaggagagcctggagtgtcgaggagtcaccacggccctgcactcagttaatgctctactgttgctgtctggatatcacttgacttttgggtgtggttggtgttgctttaagtttctggggatagcaaaagcttaagaagtgactcttgccatcacatggctgaccacctctggtgagaacactggagaatagtttaggggtgcccgagtttcccccactgcatagagcctggtgccagggaagacaggctggacctggctgtggccccttgaatggtggcagggagaccacagcacatcgcagggccctgaggatgacgtgtatttgagggggcagggttctccagtagcaggntgttgcacagtggggaatggtgggtgcagagctgggttagttttagcagaggtgtnaaggtgattcctctctgagctggaggtggaagcaaatgggaaaacggtctggcataaacagacaagccccggggaggcagacagcgtccaccactaccaggtccacctgctttaggtataccttcctaccaggacatgagagcccacagtggctggggtcttgtcatcaggcaccctgaatgctttcaggtggatggtttggatctctcctcacctggctggtcaggccagggaggacaagctgtggacctaacaggtgaccactgtccagacaaggcctattctacctccttgcctggctgtcccctccttaggcctgttgccccttcctctctagaccctctgcctgccaggtgtgtaagcctttctgcctggacagcctcattgagacagccctagactaacagtcacccatattgagcccaagcccaccctgcatgatgccaagcttagaaatgtcaccctggagtcacaaaatcccttctttgcattaccaaaagaggtggtcactcaggggtgctggaatcttccccaccttaaggcttagctccagtctgtagcccattccctgacaggtacctgggtttcccagcctttgatgaccccaaacgctgtctcttccctaagggtcactgccttgggatttgcctgcaggctaggcacacctggtaaatgaggtctccacacactgggtcattagtacccacaagcaatcactgttgagttcatgaactntcaggctggagctcagcagtcccactagggaccaccactggggtcacaagatggccttgatccccagttatctggatccccagatncc

SEQ ID NO: 352727 - DNA, 724 bp, Homo Sapiens
aatctatcatctatcactcaccactattaacattttagtgtcatcttcccatgttttgtttatgcatagatatgcatatctattttgcaaagataagaaattactatatcttttaaacgtttttatttgataatgtactatgaatatttcccattcaattaaatacctctacagttgacactgaatgcttatgatactgtattgatattaatattgtagaatacatcaggaagatattattacaatatgtttaaccaatcccctggatgctagatatttgggtttctaacatttcatctttttaaataattctgtgatgaacatctgttcgcagggtaccctccatgaccagttgtgtctcagagaaggcagatctagtccattcaaggccaggatcccccggaggtcagtacattatttgcccagtgaactgtgggcatatctatacttttggcacttttccaggcaggaaggaggaagtagtactgagaacccactgtcttgggttaaggagcattctctgggctgcttaggggagaagatttctatcccaaggtcctgcagccttggggtaagatgggagcagagaagacagagtgtggggccacttgtggaggcagcagggaggggttccttgtggccactgatcggagccctcatattccttgtggggaggctctaaatttctcccagagatgcttctctacttggaggtctgcctgtg

SEQ ID NO: 352728 - DNA, 218 bp, Homo Sapiens
  misc_feature (160)..(160): n is a, c, g, or t
cccagcacacagtccggcgacagcccttacaggacaggtgtcatcagtacccgcatttcacagactgggaaaccgagtctcaaacatacacagagacctccccaagattacactggatgtagctaaactcggccgagagttctttgctttggactgaaantcaggcagaggctgccagtaggattgtccccgtggtaattagggctccacaatcaatc

SEQ ID NO: 352729 - DNA, 289 bp, Homo Sapiens
gtgtgtgtggctgactgcacgccgagacctcgatagaaactgcacactgaggcccgggtgagcatccctagtcagcaatgctctgtgtggctgcacactgagaccccactaaaaactctgcatgctgaggcccaggtgagcatccctgcccagcaatgctgtgtgtgtggctggctgcacactgagacctcaatagaaattctgcactctgagacctgggcgagcgtccctggtcagcaatgctctgtgtggctgcacactgagaccccattaaaaactctgcatgctg

SEQ ID NO: 352730 - DNA, 639 bp, Homo Sapiens
  misc_feature (543)..(543): n is a, c, g, or t
  misc_feature (566)..(566): n is a, c, g, or t
cgatgtccgtgaggatcacgattcgtaggagtcgccagccccagccaccctgctcgagaaatccaggaccggccaaccacaggctcttgtgggcccagagctgtgcaagggccaggacggaaccaaagtggaaagagatctagatttagagttaggatgcttctagggatggggccaccacagaccagccatgtggtctggacacaacttcccccacagtggtaagagaagcaccgtacagtcttcagaaaccctctctgccatggaccagctgcgggaccctggacaagtcctgccaccgcaccacgcctcgagggatgttggcgacagcacccaccccattatcgatggtatctagaaaacaacaagaatgccgtgtatgctgctcatgagtctgcacctccccactctcctctgtgaactggtgtcaatcccacccacctcagagttgtgaggattcattacacaataaaaaggcacaaagatgtgttatttataaaatatagggcactaaacaaatgttaagacattttaataatattncactgatagaaaagaaaaatccngcaggagaaaggaactggcaacaccttgctttctttggggatccacacaaaaggactgtcacacactcacaat

SEQ ID NO: 352731 - DNA, 307 bp, Homo Sapiens
cttcccatctttggcctcacaaagtactgagaccacaagacatgagccatcttgcccagcccctagaacgtgttatcaaataaacaccgatgcaaccctcactcagccgagaagtaaaacattgccagccaatccctaaatgcttctgcttgccgcttcccaatcctaaccaatgccttctcctgacaattatgatggtcatgtctttgcatttctctaatgtttcccatcacgatcaaactagttttgttttgcctgtgcccaaactttgcataaatgagcagcatgtgtctggtggacctggctt

SEQ ID NO: 352732 - DNA, 459 bp, Homo Sapiens
  misc_feature (148)..(148): n is a, c, g, or t
  misc_feature (156)..(156): n is a, c, g, or t
ccacagccgggtggcaccagctgtccgctgaccttagatctatacccagtgtcgctgggaaacacacgccatgctaactggcctcactttaacttcacaaccacaattttccagcccacaaactgcctggaaactgatcacacttttnaatatgangttcctttcccccactgtccaaaatgactatttcaaaagacccctttttttatacactttatcctgaccctctctctcccagattttctctcctacttcacgaagcaaacagaagccatgggatctacattcatcttccacatgggaggaaccatcactgcatccttctgcctgattctgcaatagttttcctgaacacttaagacccaaacacccaaccctggccacaaacaatccttgcctcttggcctccttccacaccactgctttagtcctgccctcctgccatgcttgtctttgttc

SEQ ID NO: 352733 - DNA, 596 bp, Homo Sapiens
agcctggacgacagagtgagactccatcacaagaaaaaaagaactttgtcaacctctgtcttagggcgccttgtcacaggcttcgggtcagacggattcaacctcgcatcagccatttgttagccaggtcactctgttctttgtctgtaaatgagattgatcgttgttcccactgagagtgtcagctccttcccatagagcaggcatgatgattgtactcacctctgacaccattgtgagtgccacattccttcccacgtccttgtcaccgtaagagatgcccacctgagcaccaaccccaggttatcttcccctttgtcttccagccccccagaaacagctacgactcaacctacccaatcatttcatcatcagattgccactgtctctagttcaggtctcttgggactggcactcagaaatctcataataaatcctcttgaggcttctcatacactcgtcttcttccaatcttctttccctcaaaatctcatattttggttccacttcacccacggtcattctccatatcactcccaggagttaggcaaaaagccccttccgttcttccgtatgttaaacttagaatcactctg

SEQ ID NO: 352734 - DNA, 1188 bp, Homo Sapiens
  misc_feature (158)..(158): n is a, c, g, or t
  misc_feature (260)..(260): n is a, c, g, or t
  misc_feature (988)..(989): n is a, c, g, or t
  misc_feature (992)..(992): n is a, c, g, or t
  misc_feature (996)..(996): n is a, c, g, or t
  misc_feature (1000)..(1000): n is a, c, g, or t
  misc_feature (1009)..(1009): n is a, c, g, or t
  misc_feature (1018)..(1018): n is a, c, g, or t
  misc_feature (1021)..(1021): n is a, c, g, or t
ccccagagcccaaggacgcctcgggctccccgggggccaagtctttgtcggcgcacaaaaaacaggtgcccggcggtaaacagaggcgctcgccggccttccgggtttggatcacgtagaaactttcttggcgcgtcgtcccgtccaagaaagtgagnaagtccctgtagagcagccggccctggtcgtccgcgcaaggcaccgggtcccggggctcaggtccttaccagcttggtgccgcctgctccaggtgcacgtgnccgagcccgggaagcagcctcccgatttgccgcccacgagtttctctgctttcaccgagcagtggatatgtgccttggactcgtagtacacccagtcgaagccggcctccaccgccaggcgggccagcatgccgtacttgctgcggtcgcggtcagacgtggtgatgtccactgcgcggccctcgtagtgcagagactcctctgagtggtggccatcttcgtcccagccctcggtcacccgcagtttcactcctggccactggttcatcaccgagatggccaaagcgttcaacttgtccttacacctctgagtcatcagcctgtccgctccggtgttttcttcatccttaaatatgatgtcggggttgtaattgggggtgagttccttaaatcgctcggagtttctggagatcttcccttcataccttccgctggcgcctagggtcttctcggccacattggggataaactgcttgtaggctaaaggggtcagctttttggggtgcctcctcttcccgaaccccctgcccggtccgcacgccagtcccgagcataccagcagcgaggagacgaggactagcagcagacatctcgccagcagcagcatctcgcccatggaactgatgacttccgagctgtaccccgtgcgggtccgtgcgcgagtgcgcgcggcgggtgtgtgcgtgtgcgctctctcttgcgctttcccttcctcgatacggctcgcnngcnaganctanccatcgctngctgcctcnctntttctcttcctttataaccttgcccgccgcggctgcgggggactctccaaccgctaccccacccagacaggggctggaatggcaggctgccggccgctgataacggaacacatcggagttgggtcgcgagacagcaatcaaaagacaaaaagagtctgattttaaat

SEQ ID NO: 352735 - DNA, 1189 bp, Homo Sapiens
  misc_feature (602)..(637): n is a, c, g, or t
  misc_feature (799)..(809): n is a, c, g, or t
agcggggcgagcgaggaagaccaagaacctggaagagatcacagggagtccagaaacgcctgtcatcccaagcttatgctgtttttctaaaagctctttatggggcttgatattgggttggtggtctttgtccagaaatatgaagggacaaagagggccataaccctcccttctgagagtttccaggaggagtccgagggtctagcttttctggtgaagccagttcctgttcctgccttctttcctaagggcctgctcgctctggcttccaccacagtgccaagcccctctggtctccaggggagggattgctgtgttacatagcaggatcggggtaatcaggccaacaggggagatggtggcgatttttcttttttaatctgtatttattatacagtcttgtttctttaagcccatactctgtctcttcccccgtcttcctctcaggtgacagtatcagtgagtgccatacagaattgtgtattcaccagcatcatgaaacagttgtggtcttttgagttgatcttggcagagtaaagggacgtgtcctggagccattcctgaatctccccttctttgtgacagctcctcccacccccccnnnnnnnnnnnnnnnnnnnnnnnnnnnnnnnnnnnnctaaggcacttcacttagagactggagtcctgcttataatcatgcatataacctttactttgactggatctggccagaggggtgttggagcccagcccacccacataccagtcaagctcttaggggagcagaagaaaagcaggaagaatttacatgtttaannnnnnnnnnnaaacttggacttttctagttattaacaagttggcttgtttcagcagtgatatcgtataaagaacatcttgtaagatactcctgacatcttgctttagcacatgtacagtacagtttctatgataatgtgttagctctaacttccctggcttctccttcagcccatccactctcctctagagcagttgggttggaggctcattgaggcaagcagaacattggaggcgggagcagggcagtgctagtgtctgctgcctcccatgcccgttctgacctcagcttgggaactcctcaaggaacctgaagattccagtggtcagtgtccggtggcggcgtgcaaggagagaccggcagaaaactctcgaacaccccattccccca

SEQ ID NO: 352736 - DNA, 1325 bp, Homo Sapiens
  misc_feature (130)..(166): n is a, c, g, or t
  misc_feature (327)..(336): n is a, c, g, or t
agaattgtgtattcaccagcatcatgaaacagttgtggtcttttgagttgatcttggcagagtaaagggacgtgtcctggagccattcctgaatctccccttctttgtgacagctcctcccacccccccnnnnnnnnnnnnnnnnnnnnnnnnnnnnnnnnnnnnnctaaggcacttcacttagagactggagtcctgcttataatcatgcatataacctttactttgatggatctggccagaggggtgttggagcccagcccacccacataccagtcaagctcttaggggagcagaagaaaagcaggaagaatttaaatgtttaannnnnnnnnnaaattgacttttctagttattaaaagttgcttgtttcagcagtgatattgtataaagaacatcttgtaagatactcctgacatcttgctttagcacatgtacagtacagtttctatgataatgtgtttgctctaacttccctggcttctccttcagcccatccactctcctctagagcagttgggttggaggctcattgaggcaagcagcaacattggagggggagcagggcagtgctgtgtctgctgcctcccatgcccgttctgacctcagccttggaactcctcaagaacctgaagattccagtggtcagtgtcggtggggggtgggaggagagagcggcagagaagctctgagagccccttcccccacgaacaaagtctagctctagatcgtgtatagtttaggcaaaactttgtacgtcttctttcccttttatgatggattttgagtaaaaggtacaaaacagggtttttcttgttttatcacctttgaattgtggaaagtttagtgagcacccaatgctcttctagtacctagtttaaacgtccaccaaggggacctgcagcgtcctagagacatgacgcatcaaggcctcgtgaatttgtaacactgcggaaatgtggcactctagcttcctccggtcctacctgcccaaggcacgacgaggcattgctccagggctgctgggtagttatacacgtacccttctataggcatggagtaggcaactgacatcacaggcttcataacacccaccagcggcaagcttcccctgactactacatgcagtctgcgactagtacatcagtgagaatacctgtgttaccaagaatcagcgaccacctgaaactagaaagatagcagaaacgacaaacaaaacaagacatacacacagcagcgaagggggacccaccaacaggggaggaactagacaatacaccggacataccgcacgacacaagcacgcccaacacaacgaaccgaaa

SEQ ID NO: 352737 - DNA, 533 bp, Homo Sapiens
tgctactctaatggcatccaacctccccgctgtgatcagcaatcataccatccgcccccattcttctctccccacaacccgcaccttctggcagcccatgaacatgtcacactcagactgtcctgccccaaatactatcttgtttgtcccacatctggaatgtgctttttcctctgactccccaaggagaaccctcccaggccccctcctctgcaacggcctctcctccaacctcagcaccgtcctgccccctcctctaccgcctgtccggtggagcaggcccggcccaagtctccatgcctggagggcagcccattctggacatagcgcatgcccagaactgcctccacagccggcttcctctgcggctctctcttcacaagacacggaagagttttggggcctgctggtgtggcattgcttctatgatggctaaaaacagctgggaagctagaagacacgcctgaaccaagcgcaggacagcgatttgttagccaaaagcttaaattcaggccccaaatccaagtgtggca

SEQ ID NO: 352738 - DNA, 291 bp, Homo Sapiens
tgcgagctggaatgcatgtgtgtacagaggttgtacccccagatttccaatttggggaggtgctggggcatgtgcctcctagtgccgtggacaactcaaaagtcagcacctgtataccctggtcctgtgtctggctggtccctgagtcccacaagatgtatgtggacttgttgtgagccactctcccactgggctgtcctccggggttctcccttttcccaggtgtgtttggagggggtggctggatgtgctgactcctcatctcctctctttcacaccccgtgtcccgcc

SEQ ID NO: 352739 - DNA, 574 bp, Homo Sapiens
  misc_feature (512)..(512): n is a, c, g, or t
cacattgttcgggcccagggactgggtcaaggagattacgcagacgctgggagcacacgggcagagtggaccaagagaggtcggggcatcatagggatttttcgaggtaacccttattgggctttggggagattcgttgcatgccacgccaggagcagggagatggcagcagtagcctcccgggtgaccgctcctctgtattatttgcttacagatcaacaaaaaactacagtgattgaaaacggggaaatcaggttcaatggaaaagggaaaaagattcggaagcctcggaccatttattccagcctgcagctccaggctttaaaccatcgctttcagcagacacagtatctggcccttccagagagagccgaactggcagcttccttaggactgacacaaacacaggtgaagatatggtttcagaacaaacgctctaagtttaagaaactgctgaagcagggcagtaatcctcatgagagcgaccccctccagggctcggcggccctgtngccacgctcgccagcgctgcctccagtctgggacgtttctgcctcggccaagggtgtcagta

SEQ ID NO: 352740 - DNA, 1127 bp, Homo Sapiens
  misc_feature (336)..(336): n is a, c, g, or t
  misc_feature (608)..(608): n is a, c, g, or t
  misc_feature (658)..(658): n is a, c, g, or t
  misc_feature (676)..(676): n is a, c, g, or t
  misc_feature (727)..(727): n is a, c, g, or t
  misc_feature (797)..(797): n is a, c, g, or t
  misc_feature (839)..(839): n is a, c, g, or t
  misc_feature (866)..(866): n is a, c, g, or t
  misc_feature (868)..(868): n is a, c, g, or t
  misc_feature (926)..(926): n is a, c, g, or t
  misc_feature (940)..(940): n is a, c, g, or t
  misc_feature (991)..(991): n is a, c, g, or t
ggggagctgaggaagagctcagatgttggggagctgaggaagagctcagatgtgtgggagctgaggaagagctcagatgtgggggaggtgaggaagacctcagatatggaggagctgaggatggaactctgacctctgctgtttgttctaaatttcttcctaaggagcctggaggcgtgacacattccgagccatccacggaagtgctgcagacctcgtacacgaaaatgtcatcccgaggcatgatgtggtttaaaccttcatccatttggaaaattttgtggaatcggtgattatacacatctgcgaccaccatattttctgcagcaatgccanacagcctggagagagcctcgcacaggtcggacacagcccccatcagcggcacagtcacacggtactgagtaggtctgcagtgagggtcagcaggaaccaggaaaacctccataactcgatctttcttcaagggcagtggcagcgttagatagcaaaatgggtcaaaggtcacagaaaccttagcacattctgggcaaaccaaagtagatttgaagaggccatggaaactatccacaatcacacaatcattcctcaacctctcattctcccangcttcctttcccaccacccggttcagatcttcatgcaatccatctagaanaaaggccagcagctcctnaaaatcttttttctgttacccataaaattgaggagcaaaacttcctacttnatttttgaacattcgaggtcccacatgggcctcccttccagaccacatcttcttaatgagttcagcatangcttctccaatttcccctttcatccccagagggttttctctnttgatttcggcttcatactcatctttnanaaattattcattcattggtgcagtgttgctcaaacactgcaaagcggagttcatgaancaggtttttcccangtttccaagtccacagagcccagtttttatatgagaggatggtggctcctnacaattatacgaagcagaaaagccagatccacccctgctgacaccggaactgtgcatcccacaggtgctagtgctatcaccatttgcaatgagagaggcagacactgaggaatagggacttgctgatgattttgga

SEQ ID NO: 352741 - DNA, 1585 bp, Homo Sapiens
  misc_feature (7)..(7): n is a, c, g, or t
  misc_feature (10)..(10): n is a, c, g, or t
  misc_feature (24)..(24): n is a, c, g, or t
  misc_feature (30)..(30): n is a, c, g, or t
  misc_feature (48)..(48): n is a, c, g, or t
  misc_feature (158)..(158): n is a, c, g, or t
  misc_feature (168)..(168): n is a, c, g, or t
  misc_feature (947)..(958): n is a, c, g, or t
catcagnaanaggcaaagagcagntttcanaaacagaaggcagtgggnagatgagccaggaaatgaccccagtgagaccacccaaaagaagatcaaaggccagccctgcccaaaaaggctttttaccttcagtcttgtgaactcctatggaacagctnacataaattnacttgcagctgatggaaaactacttaaactcaactctcgatctacactggccatggattgggacagtgaaactcggagactttactatgatgagcaagaatctgaggcctacgagaagcatgtgagcatgttgcagccttcagaagaaaaagaagaccacagtggccctaagagactccatcggacctcttcaccaccatgggagacccttggggaccatgaccccgggtactgtcccaactgtaaaaaccatcaacaggccacaaaaaagtttgacctatggtccttccccaagatcctggtggtccacctcaaacgtttctcctacaacagatactggagggataagctcgacacagtcgtagaattcccaatcagagggctgaacatgtccgagtttgtctgtaacctgtcaccaagcccttatgtgtacgacctcattcccgtctccaatcattatggagccatgggggttgcccactactaaagcaccttatgtcctattttaccaacgtcgagatgatgaattttataagacaccttcacttagcagttctggttcctctgatggagggacacgaccaagcagctctcagcagggctttggggatgatgaggcttgcagcatggacaccaactaatgctgactccacgatcctgccaccctgtagcgccagtgtaatcccccaggagaacatctttgacactctgcagactgctagtgttctgtctaaaaaccagacaaggaaatacccttcttttatgagcagaaggaaacnnnnnnnnnnnngaagaccgtttacctagaagaagctatgtcaagaggctgaattatttttatttttaaacaggtggtgagaaatttctgtgaaacctgtgaagctgaaaagggggtgggatgggggtactcaatggagtatgtctgatggatcccgaagaatggagaggaacacaggcgctgagtatggagcagcctggagacccaccccacctgcagggctcgccctgagcgcctggatttctggttctgatgccaatactagtcaccccaagtagtctgctcacagtaacccaaacctcaagtaaactcccctttccctcgctatgtgcactgatatgggtttataattttctgaaagttacccactgaagcccatttctccgttgagtcatcttgtaatttccagctttctccccgctaaggaagatatctagtgttggggatcctggcccctcaacctcctgtggaacccagcagttctgttatatcccctgctaccctagatgaattaagacggttaaatactgtgtgggaactttttattaaataaaccacttttttaattaaataaccgctttaaaggaagtcccgcaccattaaaactggcaaagatagaaaaacaaaatagagaaattc

SEQ ID NO: 352742 - DNA, 693 bp, Homo Sapiens
  misc_feature (15)..(15): n is a, c, g, or t
  misc_feature (60)..(60): n is a, c, g, or t
cacaagaagcatganctctgaatatacaaaataggcattgttcatctgaatcagacattncttagtacaagtactgccttaggaaagactgtctcttttgcacatgtgagcctcacaaaggaagaaaaattcacttactttgactgcaaggtctgcatgggccatgtgccatcttcatttgaggctcaattactagcacctgagtgaaaggggaaaccaaatgaggagagttcaaaccaccgcacttccaacatgcttagaagcaaaaagtatctggccacacaccctgggcagagctacctgctggggaatggccagggccctcctacctgaccctggtatagcccagcatcctggacagtgttgtctagcttgctcaactgctcgtaggtgttgctcatgtatttgttccagagccgtgtttcacgctccgcagggatgttgaatagcttccgcatctctttctcgatggttgctaggaacaggcagaaatatcacttggggctttgtccacatgcaaggctaaagacagccatggcaaactaatgctcatcctctttcttgtcagatgctcacaggtgctctggatcaaccccctgatacctcttaaaatcaatcatctcccatgggtggcctcttgcactcatatgcctggaaagtatccctatgcttctttgctaacgtgtgtctctc

SEQ ID NO: 352743 - DNA, 2503 bp, Homo Sapiens
ggattcccgggatatttgctggaactgaagctctgtgagaacagtgaccccaccaatgtgctgagttgccatttcagcaaggcagacaccattgcaaccatcgagaaagagatgcggaagctattcaacatccctgcggagcgtgaaacacggctctggaacaaatacatgagcaacacctacgagcagttgagcaagctagacaacactgtccaggatgctgggctataccagggtcaggtgctagtaattgagcctcaaaatgaagatggcacatggcccaggcagaccttgcagtcaaatggatctggcttttctgcttcgtataattgtcaggagccaccatcctctcatatacaacctgggctctgtggacttggaaacctgggaaacacctgcttcatgaactccgctttgcagggtttgagcaacactgcaccactgactgactactttctcaaagatgagtatgaagccgaaatcaacagagacaaccctctggggatgaaaggggaaattgcagaagcctatgctgaactcattaagcagatgtggtctggaagggacgcccatgtggcacctcgcatgttcaaaactcaagtaggacgttttgctcctcaattttctgggctaccagcaacaagattctcaggagctgctggcctttcttctagatggattgcatgaagatctgaaccgggtaaagaaaaagccctacttggagctgaaggatgccaatgggcggccagatgcggtggtggcaaaggaagcctgggagaatcacaggtttgacggaactgattctgtgattgtggatactttccatgggcctcttcaaatctactttggtttgcccagaatgtgctaagggtttctgtgacctttgacccattttgctatctaacgctggccactgcccttgaagaaagatcgaggtatggaggttttcctggttcctgctgaccctcactgcagacctactcagtaccgtgtgactgtgccgctgatgggggctgtgtccgacctgtgcgaggctctctccaggctgtctggcattgctgcagaaaatatggtggtcgcagatgtgtataatcaccgattccacaaaattttccaaatggatgaaggtttaaaccacatcatgcctcgggatgacattttcgtgtacgaggtctgcagcacttccgtggatggctcggaatgtgtcacgcttccagtctacttcagggagaggaagtccaggccatcaagcacttcctccgcatcagcgctatatgggcagccactattgctttctgtccccaagcacaagttaacccttgagtctttgtaccaggctgtttgtgatcgtatcagccgctatgtgaaacagcctttacctgatgagtttggcagctcacccttggagccaggggcctgcaatggctccaggaacagctgtgaaggagaagatgaggaagaaatggagcatcaggaagaaggcaaagagcagctttcagaaacagaaggcagtggggaagatgagccaggaaatgaccccagtgagaccacccaaaagaagatcaaaggccagccctgcccaaaaaggctttttaccttcagtcttgtgaactcctatggaacagctgacataaattcacttgcagctgatggaaaactacttaaactcaactctcgatctacactggccatggattgggacagtgaaactcggagactttactatgatgagcaagaatctgaggcctacgagaagcatgtgagcatgttgcagcctcagaagaagaagaagaccacagtggccctgagagactgcatcgagctcttcaccaccatggagacccttggggagcatgacccctggtactgtcccaactgtaagaagcatcaacaggccacaaaaaagtttgacctatggtccttgcccaagatcctggtggtccacctcaaacgtttctcctacaacagatactggagggataagctcgacacagtcgtagaattcccaatcagagggctgaacatgtccgagtttgtctgtaacctgtcagcaaggccttatgtgtacgacctcattgccgtgtccaatcattatggagccatgggggttggccactacactgcatatgcgaagaacaaactgaatggtaaatggtattactttgatgatagcaacgtgtccctggcctctgaggatcagatagtgactaaagcagcttatgtgctattttaccaacgtcgagatgatgaattttataagacaccttcacttagcagttctggttcctctgatggagggacacgaccaagcagctctcagcagggctttggggatgatgaggcttgcagcatggacaccaactaatgctgactccacgatcctgccaccctgtagcgccagtgtaatcccccaggagaacatctttgacactctgcagactgctagtgttctgtctaaaaaccagacaaggaaatacccttcttttatgagcagaaggaaaca

SEQ ID NO: 352744 - DNA, 755 bp, Homo Sapiens
agcgggccgcggaggagatggcggaaggtggaggctgccgtgagcgaccggatgcggagactcagaagtccgagcttggacccttaatgaggaccacactccaacgcggggcgcagtggtatcttattgacagccggtggttcaagcagtggaagaagtatgtgggctttgacagctgggacatgtacaatgtgggtgaacataacctatttcctggcccaatagacaactctgggctattttcagatcctgagagtcagaccttgaaagaacacttaattgatgaattggactatgtattggtccctaccgaggcgtggaataaactactaaactggtacggctgtgtagaaggccagcaacccatcgtcagaaaagttgtggagcatggcctgtttgtcaagcactgcaaagtcgaggtgtatttgctggaactgaagctctgtgagaacagtgaccccaccaatgtgctgagttgccatttcagcaaggcagacaccattgcaaccatcgagaaagagatgcggaagctattcaacatccctgcggagcgtgaaacacggctctggaacaaatacatgagcaacacctacgagcagttgagcaagctagacaacactgtccaggatgctgggctataccagggtcaggtgctagtaattgagcctcaagaaggaagatggcacatggaccaggcagaccttgcaagcaaaaatcaagcacatgcgcctagcagacaatgcactaactcataa

SEQ ID NO: 352745 - DNA, 1078 bp, Homo Sapiens
  misc_feature (824)..(920): n is a, c, g, or t
  misc_feature (946)..(946): n is a, c, g, or t
  misc_feature (1061)..(1061): n is a, c, g, or t
cccaacacaccattgagtcttggtcccaaggcgctggtgcacatggtacttcccgaaatccctgtagggccgctggagcaggagccccgatcccacgtttgggcagctgactcgcctaaggcctccagctgaaagcggaattgcaggggtatcttattgacagccggtggttcaagcagtggaagaagtatgtgggctttgacagctgggacatgtacaatgtgggtgaacataacctatttcctggcccaatagacaactctgggctattttcagatcctgagagtcagaccttgaaagaacacttaattgatgaattggactatgtattggtccctaccgaggcgtggaataaactactaaactggtacggctgtgtagaaggccagcaacccatcgtcagaaaagttgtggagcatggcctgtttgtcaagcactgcaaagtcgaggtgtatttgctggaactgaagctctgtgagaacagtgaccccaccaatgtgctgagttgccatttcagcaaggcagacaccattgcaaccatcgagaaagagatgcggaagctattcaacatccctgcggagcgtgaaacacggctctggaaacaatacatgagcaacacctacgagcagttgagcaagctagacaacactgtccaggatgctgggctataccagggtcaggtgctagtaattgagcctcaaaatgaagatggcacatggcccaggcagaccttgcagtcaaaaatctgtcattatgtcaggtgacatggcaaaagggactttgcagatgggattaagcacaatggccaggagcagtggctcatnnnnnnnnnnnnnnnnnnnnnnnnnnnnnnnnnnnnnnnnnnnnnnnnnnnnnnnnnnnnnnnnnnnnnnnnnnnnnnnnnnnnnnnnnnnnnnnnntgctaagggtgcagaactggccggcngccctggccacatctctgctttagctgttggcgcctaggcagagatgcttgagccccaggggaggttgcgggacctgggattgcgccatccactctacgcctcgggaacaagagngaaaccccatctcaaaa

SEQ ID NO: 352746 - DNA, 193 bp, Homo Sapiens
gtggggctggcaagtctgaagtctataggaaaggccagcaggctagagccgcaaggaggaggttatgttgctacttgagttggaaggctgtctggaggcagaattccttcttcgtttgggatctcagtcttttttcaaaggccttcaactaattggataaggcccatccacattgtgacgggctatctgcctt

SEQ ID NO: 352747 - DNA, 480 bp, Homo Sapiens
aactgactgggcaaccccatcaaaagtaacttatcaggacattggaacgccaacaaggaagtgatagggagttcctaattatttttcagtctgttctctctcagcctccttcagttactatagacgtttttatttaatgttatggagtagaggtgattggctttgtttgctgcaggggtatcgggagttccctagaaggaaggaaagagtaaaagtagtagatggtgtcccaaggcctttggaatttctgagtagagaagagaatgctggacttctctgtttccgccgtgttcctccctttcccacatgcaccacgtctcctggacacagctgtacacagaactgctgcaggagcatgggccccaaggcctgaatgagcttactgccttcatcgagatgagggacctggcccggaggtttgccttgagttttggaccccagcagctgcagaaccgtgacctgcgggtcatgctacacaag

SEQ ID NO: 352748 - DNA, 292 bp, Homo Sapiens
ggggtattgtctggcagtgaggctggagacggcgtctgctgcggggtattgtctggcagtgaggctggggacggcgtctgctgcggggtattgtctggcagtgaggctggggacggcgtctgctgcggggtattgtctggcagtgaggctggggacggcgtctgctgcggggtattgtctggcagtgaggctggggacggcgtctgctgcggggtattgtctggcagtgaggctggggacggcgtctgctgcggggtattgtctggcagtgaggctggggacggtgtctgct

SEQ ID NO: 352749 - DNA, 331 bp, Homo Sapiens
ggggcggaaaagggtaactctgctgggcgcatggggcgggaaagggtaactgtgctgggcgcatggggcggaaaagagtaactgtgctgggcgcatgggacgggaaagggtaactgtgctgggcgcatgggacggaaaagagtaactgtgctgggcgcatgggacgggaaagggtaactgtgctgggcgcatgggacgggaaagggtaactgtgctgggcgcatgggacgggaaagggtaactgtgctgggcgcatgggacggaaaagagtaactgtgctgggcgcatggggcggaaaagggtaactgtgctgggcgcatgggacgggaaa

SEQ ID NO: 352750 - DNA, 350 bp, Homo Sapiens
atggtgacacattctcatccaatgtacactgtggatggtaattctgcagtctgtaagagggcctggtcagggagagacacgagaacctgttagaaagcatcaattagggcttcagcaagaggatggcatggcctgaaatgtgagtgggaagcacagatctatgagataccgaagtgatccattctttaagactcggtcatggattggctgtgagggcgaggagaaggggatagcaaatgacttccaactcctagccttgaacaggttgttgagctgcagactgaggcagtaaaagtggcagaaaagtggtcttaagatggtaatactcctttaatcagtgtataaattct

SEQ ID NO: 352751 - DNA, 285 bp, Homo Sapiens
atccctccgaatcctacagaatctgtccccctcaaccctgcaccatctatccctccaaatcctacaaaatctgtcccccacaaccctacaaaatccatcccaccaaccctacacaactctctcccaatcctacacatctcttcctataatgctacacaatctgttccccaactctataccatctatggccccaaccctacacaatgcctgccaacaacactacacaatctgtccccaaccataaacaatctctctcccaactatacacaatctgtccccccaacc

SEQ ID NO: 352752 - DNA, 865 bp, Homo Sapiens
tacccggtaggcgaggcctgggcgccgaattcggcacggaaggggctcgctgctatggggaatttccatggggaggagctgacgcagtgcgcagatgctcacttgttctgcaaagagtgtctcatcagatatgcccaagaggcagtctttggatctggaaagttggagctcagctgcatggaaggcagctgcacgtgttcgttcccaaccagtgagctggagaaggtgctcccccagaccatcctgtataagtactatgagcgaaaagccgaggaggaggttgcggcagcctacgccgacgagcttgtcaggtgcccgtcctgtagctttccggctctgttggacagtgatgtgaagaggttcagctgtcctaatcctcactgccgaaaggaaacctgtaggaagtgtcagggactctggaacagaacataatggcctcacctgtgaagagctggctgaaaaagacggacactcaagtaccgtacctctattgaagaaaacatgactgctgcccgcattagaaaatgccacaagtgtggagactggcctcagtcaagatctgaaggctgcagaccgcgatgtccttgccgctgtggtggcctagatgtgctacctctgacagagtttctattaatgggatatgaccattttactgccaaacatcccccggtcaccaggagccccttgccaaggagtgttcaaagatgctctctctggaccgagcccactgaagatgatgggaaagttattgagaaatccagaaggggtgaagagaaaagaaaagaaagattgggagacaccttcaacagcatggccccatgaaaactgtggaaggcagaggtgaaccccacggctgaaagacaga

SEQ ID NO: 352753 - DNA, 879 bp, Homo Sapiens
tcacctggaagagctgcttgaaagggcgacatcagggccggtacctctattggagagaacactgtctggctgcccgcataagaaaatgccaccaagttgtgggactggccttcatcaaatctgaagcctggcaaaccgcatgtccttgccgcttgtggtgcccagatgtgctacctctgtcgagtttctattaatggatatgaccatgttctgccaacatccccgctcaccaggagccccttgccaggagtgttcaagatgctctctctggaccgatcccactgaagatgatgagaagcttattgaggaaatccagaaggaggctgaagaggaacagaaaagaaagaatggagagaacaccttcaaacgcattggacccccgctggagaaagcctgtggagaaggtgcagagggtggaggccctcccgaggcccgttccgcagaacctgccacagccacagatgccaccctatgccttcgcgcacccacccttccccctgcctcccgtgcggcctgtgttcaacaacttcccactcaacatggggcctatcccagccccgtacgtgccccctctgcccaacgtgcgggtcaactatgacttccggtcccatccacatgcccctggagcacaacctgcccatgcactttggcccccagccgcggcatcgcttctgatggccccgaatccccattgagcagcacaaagcccgtttggggtaggagtgtggatggagaaccctcccccaaggctggtgtctgtaccattgcatcctaagtcagcttgaagggtaggctggttttcttcccacccctttcctagaagggctactgctcctggaagagtggacggatccataataaagacgtcccaaatggtgg

SEQ ID NO: 352754 - DNA, 447 bp, Homo Sapiens
ccacggcacaggtgtcctggggaaccaagaggaagctgcatcactgtttgggatccagcctccactgtgaccacaagtgcccacccagattcaaggagtcaactaaaggaaaattttgctttcgaagaagtaaagttagttttattcagattcctattgagcattgcaatccgggagggtgtttcagagtttcagttcgactgctccaaagcaatgtttcgggcctcagcttatcaacgggtggcggaggctctgcacctggctcagggggtaccttagagccaaatccgatcgtcaaagtttcggtgcaagagtccatctcgtcatagattacagccactgatcctgtcagacgttatcttatgtgcaggaggagacaagggctaggatcgttgaccttatctttttaaaaagcgcagtgatttggccgggtgtggtggctcacac

SEQ ID NO: 352755 - DNA, 292 bp, Homo Sapiens
  misc_feature (122)..(122): n is a, c, g, or t
cccatccacctggtcacacaccctccacggaaggccactcaagggcagacccgtagcagagcagaccctcagggactgggcccaacctcgggagccagcccctgccaggtggggctgaagtntgttcactcctgttccctaagcctggaccaccttctacacaggctgcagctgctgggaggccccaagctcatgcagcgcaacttttccaaggcccagcctgctcagacgattcggcccaaagcacaaagcatggcagacaccttccgtaagccaaagaactgggagtagt

SEQ ID NO: 352756 - DNA, 297 bp, Homo Sapiens
gggctggccccttctggcacttggggacaagcttctcctcctcgggcggcggtcgcagccttgtggggcacctgtgtgggtctttctgaacgccagctggaatgagagcttttcccgcaggcgaggcgtgcacagaaaagatgcttcgtccttccctcggtgtctgtagcacgatcggaaaggggcccgtcaaggaaaggggttggagtgttgggagcctggggcaggagggtggggtagacgctaggcggctcaagacctgccctgaggaagcagaaggagcgtggggggaccttc

SEQ ID NO: 352757 - DNA, 261 bp, Homo Sapiens
cagaagccaggctcccatcttgacatagccactgtcagcatccctcctacaggtcagagctcagcctgccccagcactgcctctaggtgatcagatggtgctcagcttggggtgaaacagccagccctgctcagagccatccaggcagcaacttgaagcctggtgagatcacctttccccactgggactttcaaggagagagatgggaaggatgggaagaaattgaatgtggctggaggagggaactggaagcctggaagt

SEQ ID NO: 352758 - DNA, 402 bp, Homo Sapiens
  misc_feature (306)..(306): n is a, c, g, or t
  misc_feature (330)..(330): n is a, c, g, or t
  misc_feature (347)..(347): n is a, c, g, or t
  misc_feature (385)..(385): n is a, c, g, or t
agtcacgtaagtctgactcaatacacaccggctacagagagcaaagctgtagacctcacattttttattatacgagcaatttcttccaaatcagttaaggtttcaatgtttgccttcacaaaaaaatgaaacgcggtttagcaaattaatgttcgttatccgtatcttgggggaattgtttaataccgtgcagttaatgaaacaattcagcgatacttcttccaaaatcattgctaccttatcttcatctaatctaataatcaaaacatatcttctagtaacaagacttctgattttaattatctnaactccttgttgccagattgtccngatacgaaacccacatncagaaagcaccggacttcaccaaaccagggtttcctcnacgccccaaaggaataa

SEQ ID NO: 352759 - DNA, 1437 bp, Homo Sapiens
ctttcgcgtacgtgccaaagccatggcggaacgtgggggtgctcgtgttactgaacgtcagagtgggctggctgctggtggccggggcggaggtggcgagggtgctgccaaaaccactaaagtcggcagcgctgctgctggtggccgttggcacggcagtgggcagggactggctgaaggtggtgactgtggtggttgtgggcaaggcaggaggtttgccaaactggaatatggagcccatggccggggtgaagctggcagcagaggcctggggcgccccgaagaggaaaggctgtgaggcggcagtggcggtgctggtcgtggtactcacactgctgctgctcacactgtttatgccaaagccaaacgcaggcttcgaagcagagtctgtggatggactggcagaggtgatgggagccacagcagaggtggcgctgccaggccagtgaagagcggggcagttgtggtgggagcagtggcgggagtagttgtctgcttgaagaagggagcaggcaagggcacagatgcaggtggccccatgctgctaaagacaggctggaaggtcggggctgtggtgctggtggtcgtggggagggaggagctggagggcgctgtggctgtgactgaagggccaggcggtgtggggccttccttctcactcttgggtggagccgtgaaaatgggcttgaacatgggagatgctgaagatgcagcagggctcgcagggctggaaggtgaggtgttctgtgctccaaacacggaagctttgcttgggggcggggcacggggcagatgtggcttggggtttggtagccgtctctgcctgaagggttggaggtgccttggtgtcagtggctggtaccatggatggagcagggatcagccccagcaaagtggtcgggggtttggagtcaaaggaggggctggggagcagccctggcggccctgactgtgataaacccagcgggggtaggaggctgggtgtctttggaggtgagagggcctcagtggttgctgctccagcagattctgggcagggtggcaggctcgggggagtctgcatcttcttcaagctctctaacagtgggttggtgcttggggccaggagggaggtgggtggggaggcaggtgcagcagcaggcagggtaaaggtaaatgaaggctgagtggtaggtggggtctcagtgacagagttcgaggcagcatcactcttgtcctccaaggcctggttgaaccactgtaatgaagccttcttctctaagtctaggtcctcggcagtgatcgaatagccaagctggggaggtggaggcaaggtcagctgttcccctcgccgagaaggcagcagctgaactttccgcgttacgctgcccagagctgccaggtgtagactgagaattcgagttttgtttcttccttggggttgtatctgcagccttt

SEQ ID NO: 352760 - DNA, 369 bp, Homo Sapiens
taggccgggtaaaggtaaatgaaggctgagtgataggtggggtctcagtgacagagttcgaggcagcatctaagaaagaaagaaaggtgaagcagtcctggcttgtctgggacttctttccacatgcctgtcagagagcaggctctcagcacagctcatgcaggaatgcctgccctaaattgcagtggtccctgctgtccagtacacgtgaagaccaacacggatatctcaggtgagaaagaccacaagaaaacatggagctctactacggattttccgagagtgtctcatcttttgcaaccgccgatatgcaccccaagtcaacagtcaactggaacctctcgagagtgcaacgatccgtgctacgga

SEQ ID NO: 352761 - DNA, 3356 bp, Homo Sapiens
  misc_feature (2284)..(2308): n is a, c, g, or t
  misc_feature (2435)..(2435): n is a, c, g, or t
  misc_feature (2536)..(2541): n is a, c, g, or t
  misc_feature (2544)..(2544): n is a, c, g, or t
  misc_feature (2546)..(2606): n is a, c, g, or t
  misc_feature (2614)..(2615): n is a, c, g, or t
  misc_feature (2617)..(2617): n is a, c, g, or t
  misc_feature (2619)..(2629): n is a, c, g, or t
  misc_feature (2633)..(2633): n is a, c, g, or t
  misc_feature (2638)..(2638): n is a, c, g, or t
  misc_feature (2640)..(2641): n is a, c, g, or t
  misc_feature (2646)..(2647): n is a, c, g, or t
  misc_feature (2652)..(2665): n is a, c, g, or t
  misc_feature (2711)..(2719): n is a, c, g, or t
  misc_feature (2816)..(2824): n is a, c, g, or t
  misc_feature (2997)..(2997): n is a, c, g, or t
  misc_feature (3158)..(3158): n is a, c, g, or t
gggcctagggcggcggagccgactcgtagcggccgaggcgcgcgcggtccgtgccggcgtcagtctgggattggccggcccgcgacttcctccgccccctgccaatcgccggggacgacttccgtgggtttttccggctcccccgcgtcgctaaggagcgacgggctgtcggccagaccccgagttctcggtgcgctcagcggccgccgacgctaggaggccgcgctccgcccccgctaccatgaggccccggaaagccttcctgctcctgctgctcttggggctggtgcagctgctggccgtggcgggtgccgagggcccggacgaggattcttctaacagagaaaatgccattgaggatgaagaggaggaggaggaggaagatgatgatgaggaagaagacgacttggaagttaaggaagaaaatggagtcttggtcctaaatgatgcaaactttgataattttgtggctgacaaagacacagtgctgctggagttttatgctccatggtgtggacattgcaagcagtttgctccggaatatgaaaaaattgccaacatattaaaggataaagatcctcccattcctgttgccaagatcgatgcaacctcagcgtctgtgctggccagcaggtttgatgtgagtggctaccccaccatcaagatccttaagaaggggcaggctgtagactacgagggctccagaacccaggaagaaattgttgccaaggtcagagaagtctcccagcccgactggacgcctccaccagaagtcacgcttgtgttgaccaaagagaactttgatgaagttgtgaatgatgcagatatcattctggtggagttttatgccccatggtgtggacactgcaagaaacttgcccccgagtatgagaaggccgccaaggagctcagcaagcgttctcctccaattcccctggcaaaggtcgacgccaccgcagaaacagacctggccaagaggtttgatgtctctggctatcccaccctgaaaattttccgcaaaggaaggccttatgactacaacggcccacgagaaaaatatggaatcgttgattacatgatcgagcagtccgggcctccctccaaggagattctgaccctgaagcaggtccaggagttcctgaaggatggagacgatgtcatcatcatcggggtctttaagggggagagtgacccagcctaccagcaataccaggatgccgctaacaacctgagagaagattacaaatttcaccacactttcagcacagaaatagcaaagttcttgaaagtctcccaggggcagttggttgtaatgcagcctgagaaattccagtccaagtatgagccccggagccacatgatggacgtccagggctccacccaggactcggccatcaaggacttcgtgctgaagtacgccctgcccctggttggccaccgcaaggtgtcaaacgatgctaagcgctacaccaggcgccccctggtggtcgtctactacagtgtggacttcagctttgattacagagctgcaactcagttttggcggagcaaagtcctagaggtggccaaggacttccctgagtacacctttgccattgcggacgaagaggactatgctggggaggtgaaggacctggggctcagcgagagtggggaggatgtcaatgccgccatcctggacgagagtgggaagaagttcgccatggagccagaggagtttgactctgacaccctccgcgagtttgtcactgctttcaaaaaaggaaaactgaagccagtcatcaaatcccagccagtgcccaagaacaacaagggacccgtcaaggtcgtggtgggaaagacctttgactccattgtgatggaccccaagaaggacgtcctcatcgagttctacgcgccatggtgcgggcactgcaagcagctagagcccgtgtacaacagcctggccaagaagtacaagggccaaaagggcctggtcatcgccaagatggacgccactgccaacgacgtccccagcgaccgctataaggtggagggcttccccaccatctacttcgcccccagtggggacaaaaagaacccagttaaatttgagggtggagacagagatctggagcatttgagcaagtttatagaagaacatgccacaaaactgagcaggaccaaggaagagctttgaaggcctgaggtctgcggaaggtgggaggaggcagacgccctgcgtggcccatggtcggggcgtccacgccgaggccggcaacaaacgacagtatctcggattccnnnnnnnnnnnnnnnnnnnnnnnnnatactttggtgtttcacttcatgctctgaatactgaataaccatgaatgactgaatagtttagtccagatttttacagaggatacatctatttttatcattatttggggtttgaaaaattttttttnacaccttctaatttctttatttctcaaagcagataattcttctgtgtgaaaatgttttctttttttaatttaaggtttaaaattccttttccaaatcaaannnnnnaanannnnnnnnnnnnnnnnnnnnnnnnnnnnnnnnnnnnnnnnnnnnnnnnnnnnnnnnnnnnnttttaaannanannnnnnnnnnnttanccccncnnaaaanntccannnnnnnnnnnnnntaagaaaatttctctacacaaaatactcgttttggggccctggggnnnnnnnnnaataatttcctcaaaccaatagcggccaccctggttgttctcctgcagtagagaaatatcgcccactaagaaaaaacaagggggcttcgcgggtctnnnnnnnnnacaaacagacataccggctccccgagggtgccacataggcgatagtgtttttgttacgcccacaacatcccgccgcggagaccgctgtctcctcgcgggaggggacttgttttcttgggcgcgtctcctaggcaaacaatgagagagtgttcgctcagcagccggctaggctntcatatcctcgtataatgctctgcgcgcgcccgcggggcagggaccgccacgcttatacaccacaggacgttcgcgatttacgacactattatgtctgtcgcactcctctctcgatccccaggtagctagggagaaggcaacctcgcgcatgctccccaanctgtccgcgtggtatatgtcaccaacaacatatagtctgcccgaacgggtggcggccataccaacaacaatcaaactaagacgccatgcgcgcgtcggcagaggtgtatatagatagtttctatccgcaaccatcttgtcgcgcacaacagtatagtgggccgccgcaggagaaatcatacccaggccagcttcatac

SEQ ID NO: 352762 - DNA, 296 bp, Homo Sapiens
aatggtacacaccagttctcaccagcggggttaagtcaagactttttcagctcatccctggcaagccccagcctacccctggcttctacaggaaaatttgcactaaactctcttctccagcggcagctaatgcagtccttctactccaagggctatgcaggaagccggaagcacaagcatgattttttcaacaggtccatacagcacaaactccatatcttcccaaagtccattacaacaaagcccagatgtccaatgggcatggccccatcccccagccagttcagaaagtgctg

SEQ ID NO: 352763 - DNA, 1085 bp, Homo Sapiens
gtttggcgctggcgcggctggagggccgttagttcgagttcctcatgcgccagcccagcgtcaccatcggccgcaactcgtcgcagggctcggtggacttgagcatgggcctgtccagcttcatctcgcggcgccacctgcagctcagcttccaggagccgcacttctacctgcgctgcctcggcaagaacggcgtcttcgtggacggggccttccagagacgcggcgcgcccgccctgcagctgcccaagcagtgtaccttccggtttcccagcacggccatcaagatccagttcacgtcgctctatcacaaagaagaggccccagcctccccgctgcggccactgtacccccagatctcccctctgaagatccacatcccggagccggacctccggagcatggtcagccccgtcccctccccgacgggcaccatcagtgtccccaactcctgcccagccagtccacgcggtgccggctcctccagttaccgctttgtgcagaacgtgacctcggacctgcagctggcagcagagtttgcagcaaaggccgcgtcggagcagcaggcagacacgtctggaggagacagccccaaggatgagtcaaagccgccgttctcctacgcgcagctgatcgtgcaggccatctcctccgcccaggaccggcagctgaccctgagcgggatctacgcccacatcaccaagcattacccctactaccggacggccgacaaaggctggcagaattctatccggcacaacctctctttgaaccgttactttatcaaagtcccacgttcccaggaggagcctgggaaggggtccttttggcgaatagaccctgcctctgaagccaagctcgtggaacaggcattccggaaacggaggcagaggggtgtctcctgcttccgcacccccttcgggcctctgtcctcaaggtaaagttctctgagcgcccgtcctccagctgttaggaaagctgagctgccctggagtttagagatacgtggcgcagtcagccctccggatctgtgggctcaggctcagtgtacgggcatgcaactgatcacaggtcaaaaatattcc

SEQ ID NO: 352764 - DNA, 1310 bp, Homo Sapiens
cggtccggaattcccgggatcgcaagtctcagctcagcgcgcttatcctgggtccaccggcgctaccgccccccgacgtgagagagcgaagttcttgggccgcgctccctccctacctgggtgccctccccctccgggagcctgggtccccggggcggtcgcggcggctgcatcctcagggccaggccgcggggggagggggcggcacgggcctccgaaagcggggccatggagcccagagagtcggggaaggtaggactggaaggcccgggggccgcccgctccctcccgaggatccccgagccgggctcgggcgaggcggggcggctcgggcggaggcccagcagatgagccaggcttgcagggaaggactcgccggcccgccctctcttcccgcacttcggcgcccgaccccgggagggtggcggagaggagcggacgcttccgttcggtgtccgcgcatcctccccgagctgccgagcgtccgctgggtcgatgctgggttgggtgacccccgagtggagcgatgcgaaggtgcttcctgttttccccaccaccttcggcgttttgaagaggccctgctaaggcttggagtctggatcggacgccagtgggagctgcagggtgggacgcttgagggcttgaccctgcctagatcctccttaccaagaaagggctgaaaagagagggcatctggcatgctttttgccacttctgtttctaggttatgtacttcatggaagtatctgggcattgcttagaaacctgtgtcataaattggctttgggcaagaggctttgagttggaagaaaaggtggaaagaaagtgcttgggggcggagttcagggatttgacgggattgccagcgcttccaggccgtgtcatccaagaccagtgtggttgtgggcaccttagcttggagacagtggcagcctcttgggactaacatctttctggatgttgtttgctgccagttcttgagtattgtttcttatttggcacagaggagaattctctcaacaaacgttttcaactgtttattgagtcccttaaaaactgtccatttaataaacattcgtgatctgtgatttgcattgaacgaggtgctggaagtatgaggataaataggaaatgatcaccttttctcaaggagctctcctgcagttttcactttcaataaccttggacacgccctgaaaaggtttttccccccccgaaaaggaggggaaaagggatatggagggttctttttgaagcctgtaattttttccccggggaagaactaggggaaggaactcctgaaaattttc

SEQ ID NO: 352765 - DNA, 688 bp, Homo Sapiens
agagcgggtgttgatggaaaccttgttatacagcgcatgaccgtatttctcttctcccgttaaagggctaagaaagcctctgactgaacagaatagcttggaaatcaacttcaaatcactgataccaatatcaatcccaatattttataatccttcttccccctacattttgcttctctttattcaaattcaggttcaatctaaaccaatctggggatatttccaaagggtaagggccataagctccatctttgcttgggtttttgttgagctttattggcttggaccatgtactctgtaggtgccgtgtctgctacatgcatcactgtagcttgtggagggagggaggatggaagagatgctcatgccagaaatcacctcttttgaaattcagagtccttcctagtcttcccaggaaaaactacagcatcaaaagaacctcattatccttttctctcttttcgtgtgggacaaccctttcaggcgtgtccaagttattgaagtgaaaactgcaggagagctccttgagaaaggtgatcatttcctatttatcctcatacttccagcatctcgttcaatgcaaatcacagatcacaaatgtttattaaatggacagttttttaagggactcaataaacagtcgaaaacgtttgttgagagaattctcctcctgtgccaaataagaaac

SEQ ID NO: 352766 - DNA, 295 bp, Homo Sapiens
gagaattctggatcctcgattctggtcctggtcagcctccggggtggaggaagctaactgcatgctgtttttattgtactgggcaggggaatgggaggaatagtcaggggctgagtgagaatggaaagcagcttggggtgtatggagaagactgagccgaagctgatgccttgggcttcttttagttcaacataagtagtaattgactcgtaactccctcccccagtttcatctccatggcacattttcttttgcacctgccaggggacctgtgccttttgaatatgctggtggg

SEQ ID NO: 352767 - DNA, 173 bp, Homo Sapiens
cccaaggcctcccgctacacccttcctcccgctatgcccttcctcccgctacaccctcttcctcccgctacgccctcttcctcccgctacaccctcttcctcccgctacaccctcttcctcccgctatgcccttcctcccactacaccctcttcctcccgccatgctcttcct

SEQ ID NO: 352768 - DNA, 824 bp, Homo Sapiens
ggctgtaccggtccggaattacgggatatgtcgaccacgcgtcgcgtgacgcgtgggcgagaagaaggtggacgccctcctgagaggagaagcggcgcctggatggcagagtctggagaccgtgtcccggaagacccatgacgcctcgggccagctagtcctcatcagccaggagctgctgcggaagtgagcggagcctgtaacgaactgcgtggtgttgctgctggtaggccaatcgtcactccccagggccggagaggtgacctgagccgtgaggtacacaaggctgagtggcggatcaaggagcagaaactcaaggatgacatccggggcctgcgtgaaaagctgaccgggctggacaaaaagaaacccctgtcggatcagaggctgctactccctcatctgacccgtcctcggcgcccgagcttctgcggctgcagcaccagctgatgagcacggaggacgccctgccggaatgcgctggaccaggctcagcaggtggagaagcttgatggaggcccatgaggagctgccctgacaaggcccagaaccatcggcaattccggttctgcaaacggcatccaccagcaggacaaagctcagaaacaagaggacaagcactgatcctgaggggatactgtggagcagcccagtccacaccagagcccccacgcggctgcccggcagtaccttcctccaggccaggagccgggactgtcacttaggagacaaaacagtgttttgtaacaataaccgtactcaccgcgcggacaattccccaccccgatccctcggcagaccagggaacgctttctcaaggccag

SEQ ID NO: 352769 - DNA, 1150 bp, Homo Sapiens
ggcctgggtggcgaattcggcacgagggcatgacctggagaccgccatgcacgtgaaggagaaggaggccctgcgagagaagctgcaggaggcccaggaggagctggctgggctgcagcggcactggcgggcccagctggaggtgcaagccagccagcaccggctggagctgcaggaggcccaggaccagcgccgggatgccgagctgcgtgtgcacgagctggaaaaactggacgtggagtaccggggccaggcgcaggctatcgagttcctcaaggagcagatctcgctggccgagaagaagatgttggactacgagcggctgcagcgggcagaagcccagggcaaacaggaggtcgagagtttgcgggagaagctcctggtggctgagaacagactccaggcggtcgaggccctgtgctcctcccagcacacccacatgattgagtcgaatgacatttcagaggagacgatcaggacgaaggaaactgtggagggcctgcaggacaagctgaacaagagggacaaagaggtgacagccttgacctcccagaccgagatgctcagggcccaagtaagtgcgctggagagcaagtgtaagtcaggcgagaagaaggtggacgccctcctgaaggagaagcggcgcctggaggcagagctggagaccgtgtcccggaagacccatgacgcctcgggccagctagtcctcatcagccaggagctgctgcggaaggagcggagcctgaacgaactgcgggtgttgctgctggaggccaatcgtcactccccagggccggagagggacctgagccgtgaggtacacaaggctgagtggcggatcaaggagcagaaactcaaggatgacatccggggcctgcgtgaaaagctgacctgggctggacaaagagaaatccctgtcggatcagaggcgctactccctcatcgagccgtcctcggagccccgaagcttctgcggctgcagcaccagctgatgagcacggaggacgccctgcgggatgcgctggaccaggctcagcaggtggagaagctgatggaggccatgaggagctgccctgacacaggcccagcacatcaggcaattcacggttctgcaaaccgggatccaacaagcaggacaacagcttcagaa

SEQ ID NO: 352770 - DNA, 1066 bp, Homo Sapiens
  misc_feature (51)..(87): n is a, c, g, or t
ggaatgatagactactatagggcgaactggaggtcatcgcggtggcggcgnnnnnnnnnnnnnnnnnnnnnnnnnnnnnnnnnnnnnatcaggccaaatcggccgagctcgaattcgtcgagagcgggcttttacgcagtgttttgaggtgcaggactgcaatgcgcgcacttccggaccccagactcttcctacggcgactgacacctcagacacgcgttgtggggggcggcgctctggctccggggctgtgcccagcgcgagcgtggccggcacccacttgctgcagagccggcactgtactggggtccttgggggcggctcctccagacgtctctgcgggttgtcgggtgctgccgagttgggttgggggacgctacaggtagtgggtccggagcagcggctggcccctcatctcactgcccttcctcggaccccaccgtcctctggaagcttgtgcagggcacctgccactgtgaccacctggacgcagatacctgctttcccacaacagcaaggaagaaccatggcccaggggtcactgtcattcggggacgtggctgtgggcttcacccggaaagagtggcagcagctggacctggagcagaggaccctgtaccaggatgtgatgctggagaactacagccacctgctctctgtgggctgaactgtctgcttgcttggaaggcccagctggctcagcacaaatcctttaaccgtttctccccaagagggtgtcaagtcagcaaaccagctgtgatctccagtttggagcaggggaaggagccatggatggaggaggaagagataaggacgtggagcttcccagaaagctgacttcatgagaccgaggatctcgttcgttgatcgatgctacatattcagcatgttagatactgaggtggccgagattgactgaaattccgcccacagggccgaacaaaaaagagcactttatgaagaacattgtctggaatccactccacaaacagtttgacaaagaaaaatctgaaaaattggactccagtaaactggtccaatgcctgagataacaaattttcctcat

SEQ ID NO: 352771 - DNA, 298 bp, Homo Sapiens
  misc_feature (155)..(213): n is a, c, g, or t
ctacccgagacatcttaggagatttgtaatagctgtaatgccaggtccaccatatttttagcataaagcaaatgtttacgcgtgatatgactgcacgggctttctttcagctggagccatagcaactcaagtagtaaccctatcttagtctgatnnnnnnnnnnnnnnnnnnnnnnnnnnnnnnnnnnnnnnnnnnnnnnnnnnnnnnnnnnntgtccttgctcaacaggaagggtccattcagtcggatcgggtggcttccaattttatttttggtttacatctcaactatcacagc

SEQ ID NO: 352772 - DNA, 1039 bp, Homo Sapiens
  misc_feature (995)..(995): n is a, c, g, or t
aaggagcgaggcctgggtggcgaattcggcacgagggagctgatgggcttcaatgattcctctccagacatgggagtggtgagccggaactgcacggaggatggctggtcggaacccttccctcattactttgatgcctgtgggtttgatgaatatgaatctgagactggggaccaggattattactacctgtcagtgaaggccctctacacggttggctacagcacatccctcgtcaccctcaccactgccatggtcatcctttgtcgcttccggaagctgcactgcacacgcaacttcatccacatgaacctgtttgtgtcgttcatgctgagggcgatctccgtcttcatcaaagactggattctgtatgcggagcaggacagcaaccactgcttcatctccactgtggaatgtaaggccgtcatggttttcttccactactgtgttgtgtccaactacttctggctgttcatcgagggcctgtacctcttcactctgctggtggagaccttcttccctgaaaggagatacttctactggtacaccatcattggctgggggaccccaactgtgtgtgtgacagtgtgggctacgctgagactctactttgatgacacaggctgctgggatatgaatgacagcacagctctgtggtgggtgatcaaaggccctgtggttggctctatcatggttaactttgtgctttttattggcattatcgtcatccttgtgcagaaacttcagtctccagacatgggaggcaatgagtccagcatctacttgcgactggcccggtccaccctgctgctcatcccactattcggaatccactacacagtatttgccttctccccagagaatgtcagcaaaaggggaaagactcgtgtttggagctggggctgggctcctttccagggctttgtggtggctgttctctactgttttctgaatggtgaggtacaagcggagatcaagcgaaaatggcgaagtgngaaggtgaaccgttacttcgctgtggacttcaagctcaacaccc

SEQ ID NO: 352773 - DNA, 676 bp, Homo Sapiens
  misc_feature (13)..(13): n is a, c, g, or t
  misc_feature (60)..(60): n is a, c, g, or t
ggtaagtaataancctggtcccccagtctcagattcatattcatcaaacccacaggcatnaaagtaatgagggaagggttccgaccagccatcctccgtgcagttccggctcaccactcccatgtctgagagatctaaggagttactgtcaccaaaatcagactctccaatggtttcggtctcccagacttggtctgggttgaagattcggaagagctcagggcagctgaccaggaccatctcacccacatgggcgggcttccaacacgtgatgttgtcccacatcccaggacagcctggagaggaatcattgaagcccatcagctcattggccctctggatcttctccaggcacatggcttgctccttcttgaagatgcagtcagaatgcatggcaggggccataggcagcaggaggagagcagccagggaaacgtgcacgacaccagccatgacacttcttggccagcaccactggcctcccactgacagcagcggcaggtcagccccaatgtgtctctgggctgctcactgcggggcctgtccgtggggccggggcagactccgcaaaggacgcgcagcctgcaagtccgcggcccgcgcggcgcggggatggggagcgtgtgcgccgaggagcgcgcgccgagccgggtctccgcgcctgtgtggccggctg

SEQ ID NO: 352774 - DNA, 311 bp, Homo Sapiens
cccccacgctctccagtcccagatctcatcagagctggctgagtccccaggccacccgccaattacaccacttttttgccaatccccttcatgtccagcctccacacccaccaactgagatcatcttgcccttctctgccagagatactccaagaggtgacagcaaagtcacggtcactttctcagcacctgccccagacacatgggctcttgttcacactcaagccaaacagacagaggctcagcatggttaggcaatttgccccaaggccacaaagaacttctggggacagccatgcttctccctctaa

SEQ ID NO: 352775 - DNA, 290 bp, Homo Sapiens
tcccaggagctgtatatatcccaggagatgtgtagaattagtaataacacatcagctactacaggtatcacaaggctttcaacaagagcccttcaaactatgtaacactgatgtgtttactaactccaaaattcagatagacatcaaatccatgggcacagaaactggcccaaggaattctcatcttcatttctcaacaacttcatcactagagtgacgtctacatcgtggccagtttcccttggggttatcgaagagtacagaatttcacatgcctccctcgtttcttt

SEQ ID NO: 352776 - DNA, 1294 bp, Homo Sapiens
gggattggctggtgagccggccgcacgcggaggatcctaaggagcagctctgttgcgacataggccgagcagcgaggcccagctccctgaaacaacagtaacctacccctgtgggtcatcatcatgccctccgacctggccaagaagaaggcagccaaaaagaaggaggctgccaaagctcgacagcggcccagaaaaggacatgaagaaaatggagatgttgtcacagaaccacaggtggcagagaagaatgaggccaatggcagagagaccacagaagtagatttgctgaccaaggagctagaggactttgagatgaagaaagctgctgctcgagctgtcactggcgtcctggcctctcaccccaacagtactgatgttcacatcatcaacctctcacttacctttcatggtcaagagctgctcagtgacaccaaactggaattaaactcaggccgtcgttatggcctcattggtttaaatggaattggaaagtccatgctgctctctgctattgggaagcgtgaagtgcccatccctgagcacatcgacatctaccatctgactcgagagatgccccctagtgacaagacacccttgcattgtgtgatggaagtcgacacagagcgggcatgctggagaaagaggcagagcggctggctcatgaggatgcggagtgtgagaagctcatggagctctacgagcgcctggaggagctggatgccgacaaggcagagatgagggcctcgcggatcttgcatggactgggtttcacacctgccatgcagcgcaagaagctaaaagacttcagtgggggctggaggatgagggttgcccttgccagagccctctttattcggcccttcatgctgctcctggatgagcctaccaaccacctggacctagatgcttgcgtgtggttggaagaagaactaaaaacttttaagcgcatcttggtcctcgtctcccattcccaggattttctgaatggtgtctgtaccaatatcattcacatgcacaacaagaaactgaagtattatacgggtaattatgatcagtatgtgaagacgcggctagagctggaggagaaccagatgaagaggtttcactgggagcaagatcagattgcacacatgaagaactacattgcgaggtttggtcatggcagtgccaagctggcccggcagcccagagcaaggagaagacgctacagaaaatgatggcatcaggactgacagagagggtcgtgagcgataagacactgtcattttatttcccaccatgtggcaagatc

SEQ ID NO: 352777 - DNA, 448 bp, Homo Sapiens
ttctataaacttcgtaagcggcaccagcagcggagtacagtcacagccgcccggactgttgagataatccagggtggacgaagacatccccagcagccaacatccgcagcagcaacagcagctccgtccggtgtatcaggtgagggggcagtagtgctgcccacaattcatgaccatattaactacaacacctacaaaccagcacatggggcccactggacagaaaacagcctggggaactctctgcaccccacagtcaccactatctctgaaccttatataattcagacccataccaaggacaaggtacaggaaactcaaatatgactcccctcccccaaaaaacttataaaatgcaatagaatgcacacaaagacagcaacttttgtacagagtggggagagactttttcttgtatatgcttatatattaagtctatgggctggtt

SEQ ID NO: 352778 - DNA, 842 bp, Homo Sapiens
  misc_feature (261)..(565): n is a, c, g, or t
cctggtcctgttggtgaaaatgaagggctcttgttccaggcctgtcaccttggcaccctttaattaacagtgaactcacttcattctgtgattttaaaagctgatgcatttcacccaaatgaacgtaaccccacctatttgtcgttgaagtagagctttcctggaggaccacatcttctcgacaggtcgcaggtctggccttgcccggcgctggtgagccccagctggcttagaccgtgtagctcgtctgttaaagtctgnnnnnnnnnnnnnnnnnnnnnnnnnnnnnnnnnnnnnnnnnnnnnnnnnnnnnnnnnnnnnnnnnnnnnnnnnnnnnnnnnnnnnnnnnnnnnnnnnnnnnnnnnnnnnnnnnnnnnnnnnnnnnnnnnnnnnnnnnnnnnnnnnnnnnnnnnnnnnnnnnnnnnnnnnnnnnnnnnnnnnnnnnnnnnnnnnnnnnnnnnnnnnnnnnnnnnnnnnnnnnnnnnnnnnnnnnnnnnnnnnnnnnnnnnnnnnnnnnnnnnnnnnnnnnnnnnnnnnnnnnnnnnnnnnnnnnnnnnnnnnnnnncaccaaaatctggccagaagtccagacagagggaaagtttatcgccgcagagacagatgtaggggtggtcaagagccgtgggcctcgtgtgaggaggatgtaaagttctcaaggtccagatcttggggatctcatggtactaggctccaggtgcacaagggagtctctgcgaacagggtagctggggacagccgaggtgcctgactggaggcctccatcgtagctgtctggaacttagcatctgtacatgacagctgtggggaaagctgatctgaat

SEQ ID NO: 352779 - DNA, 642 bp, Homo Sapiens
  misc_feature (38)..(38): n is a, c, g, or t
  misc_feature (557)..(557): n is a, c, g, or t
  misc_feature (580)..(580): n is a, c, g, or t
  misc_feature (590)..(590): n is a, c, g, or t
  misc_feature (596)..(596): n is a, c, g, or t
  misc_feature (612)..(612): n is a, c, g, or t
catcttaggacagcagagctgcctgagggagggttgtntttaatgtcgtatgcatgctcagcacagtgctggcatggcccatccatgctttctgttgaactatggacagaattcaggaacttgtgtatggagagggtggaagtcagtcctcgcttctttccctaaacattttgcagtgacagcatatggatctttggttggaaaccccatgacactcttctctacttccccatgggccttccctggtttttgtttttcttttcttaaacaatcctggtaatgacacttccaccacaatgagcttttaaatgtcctttaatgataagccagtgtttccttcagagggcaaaggggagactgctgagtcactgtggccatttttagataaaccttttcctgtttataataacacatgctggattgtaggaaactagaaaatacatgaaagtgcagagaaaagactaaaagtcatctaatacttcaggtccgtaggaaataaccactcctggaacagcacacttctttttacactattggttttacactggttggggatnccataaatatatatggttggaancccactttgngaacancatccaatggtggacnaggaatggtcccaaaccatttaggggtgca

SEQ ID NO: 352780 - DNA, 308 bp, Homo Sapiens
cttcaccaccctcctgcctcttccttcagaacactttttccctgaagccctcctgggtagccccctacccacatgcctcagcattgggatgtggggagtgtgggggtcccccttgctcctcagccccatttggagtaatgtcctgtgcagctgagctcacaactcctcctccacctgtccctccacccggtgtcactggcaattgctcacttcctgggcctgcacccactcagctcccctatccctgggcatcagcctcagccagctcccatgtggactaatgacccttgtccctcccctcagctgcc

SEQ ID NO: 352781 - DNA, 218 bp, Homo Sapiens
ggagcgtcccctctgctgaccgtcaccagaggcgggggttgaggtagtctcccctcctccctctctggagctgggcgtgaccccaaggactagccagaggtcccccgaggctggtgcttagcccgggcaggtaggctggatggcggaaagtggggcctggtttagagatggccagaacaccgaaaccaaggctttgtggtcctcacagcgccaagtgg

SEQ ID NO: 352782 - DNA, 1044 bp, Homo Sapiens
ctaaacctaccccaggagagagacgttatatatgtgctgaatgtggcaaagcctttagtaatagctcaaatctcaccaaacacaggagaacacacactggggagaaaccttacgtgtgcaccaagtgtgggaaagctttcagccacagctcaaacctcaccctccactacagaacacacttggtggaccggccctatgactgtaagtgtggaaaagcttttgggcagagctcagaccttcttaaacatcagagaatgcacacagaagaggcgccatatcagtgcaaagattgtggcaaggctttcagcgggaaaggcagcctcattcgtcactatcggatccacactggggagaagccttatcagtgtaacgaatgtgggaagagcttcagtcagcatgcgggcctcagctcccaccagagactccacaccggagagaagccatataagtgtaaggagtgtgggaaagccttcaaccacagctccaacttcaataaacaccacagaatccacaccggggaaaagccctactggtgtcatcactgtggaaagaccttctgtagcaagtccaatctttccaaacatcagcgagtccacactggagagggagaagcaccgtaactttcaagcgctcctgttgttgtcgttgttttaaactttagaatctgaaaaccagaaagaagtcttgtcattgcagcagcatcgattccggtgatagagtttgtatcactcaacatcaggggatgcctgaggagtgcgagctccacagcaacatggcaggcaggaggtcctcagaaggtgtcaggaggttccacactcgccagttcactggagcagagtcccttcgccacacttagggtcccagtaagccatgccagcattaccttttgcgtagttaaacagacgtgtatccagtctagttaaggaagaaacattaagattgtttaatttttaacatatattcaagaattttaatttgtaaagaattgagccacattgaacacaattgaatgagattcagaataaacttataacatcttgaaaa

SEQ ID NO: 352783 - DNA, 365 bp, Homo Sapiens
cttgggtctaaggctggggtgaatggaagggcccacctggaccctggagggacaccaggctcatactaaaatcccaaaaagtgaaaagctttccccaggcccaagcagagaaactggaccttgaagctacatctctggacttagtcctcaaagtaggagacatttgcctctaagctgttctctcccaccccacctttctgtgagccgccggttccctgttgtccacatcaagctgtgtgctgggcactgggtgcaggaatagcttgaccacagtctctatcctgggggtaaaggggtgaccagcccacagagggatggactgcaaacagacagtcccaaagtgccatgagagaagctctcagggc

SEQ ID NO: 352784 - DNA, 290 bp, Homo Sapiens
atgggaagcacagtccacgagccctgagcagaaggaggatttgggaggtggttgctggttgactcagctcctgcttccccccatcagacccatccagaaatcagcttcctgctctctcatgtccctaggccaaggtctgcctacactgagagacctgggtgcaggtggcccccacattacagaaactcatatgattgtttcttctgtgactcagggaaccctaaaccctcacagttcatacatgtggggaaataaatgtcgaggcacagagagggaagagagtcactcaa

SEQ ID NO: 352785 - DNA, 320 bp, Homo Sapiens
ccctcaccatctacccatgcatactggatctcggcagagccctcaccgtctacccatgcatactgggtcttagcagagccctcaccgtctacccatgcatactggatcttggcagagccctcaccgtctacccatgcatactggatcttggcagagccctcaccatctacccatgcatactgggtcttagcagagccctcactgtctacccatgcatactggatcttggcagagccctcaccatctactcatgcatactgggtcctggcagagccctcaccatctactcatgcatactgggtcttggcagagccctcacc

SEQ ID NO: 352786 - DNA, 390 bp, Homo Sapiens
ttccatttcagatctacaccggttgacttttgaggctatctacgttttccaagagttcctgcattttacacttggagatcaaccagggtttcggtacatcacgaggcgcttgtgcgcccgagttactggtcgtgactgttagaaaccttgcgaatggataagtttaaggaaggcacgtaggaagaggaaagtgggcaagagcagttagaggaaggagagctggaagaaatgtaggttaggagtgtttggagaggtaggaggagaaaacggagatcgcacttactctccagagtgaagcctgagctctagtcatatacagatcccacagaccttggagagcttcttgcaaggctcagctcacaaaacctcacttaaaaaacaattctctga

SEQ ID NO: 352787 - DNA, 742 bp, Homo Sapiens
agaggtgacattccttaggctaaataattggatccagggacataacagatttgttgagagaaaatgtggcagtgccttcacccgggacagtggtcaggaagccctgagcatccctgatggatttatccatcctcttctgaagtgctctgctctaggctgggtcctgttgccacctgcctgttctctggttggcttttgcaggagggcagcttacgtgtttgtcaaccagttagaaagccagttcctgtgggtcgagtttaggcctttttggccatagttgagaattttgacttgggatactgggttgttggtgacaaataatgtcttccttttcccccttcccgcctggctcggttatgggaatagccgtcagtgcatccatgtctgtgaccaacacccagccagactaatgtacacagcagggagaaataacattcaaatggtggttcacacatctcatctcaagataagattcttagggttcactgctttattccaaagtgttttcactgtagctccttcatatggaatatccaaactgaagaaattcacatgtggaaatgccaatagacattgattaatcaaggtagcatctttatgtaaatatataaataagtttgggccttgaaatgtaaactgcaggtgtttatcgatgccaccagttaatgttgttaaataccatctgctctatttgctgccaccttatccatggattctgaaattagataaggtggcatcgata

SEQ ID NO: 352788 - DNA, 541 bp, Homo Sapiens
cgtggtgatctagaggatacctcacgccatgtcacaagccacaggaatctgggcacgctatgagcctctgagtctcacggaccacagagactacaggtcagcatgtgagagcttcatgtaggacccagcacctgctgaacggaggttggatgtgggcatcatcgtggtcgttgagtgtggacaccgagagccttcacacaggatggagggtggatgtggcacctgctgaacggaggttggatgtgggcatcatcgtggtcgttgagtgtggacgccgagaggcttcacacaggacggagggtggatgtggcacctgctgaaccaagggtggatgtgggcatcatcgtggtcgttgagcatggacaccaagagccttcacacaggacggagggtggatgtggcacctgctgaaccgagggtggatgtgggcatcatcgtggtcgttgagcatggacaccgagagccttcacacaggacggagggtggacgtggcacctactgaacagagggtggatgtgggcatcatcgtgacatggcgtga

SEQ ID NO: 352789 - DNA, 303 bp, Homo Sapiens
cagccttcttgccttgagcagtggaccccaaacctggagcccccttccctctcccacaccctacctctcaacccatcagccggtcctgtgggctgccgtccaaacaagacctggaatccggcacctcccagtgccacgttgacctcctccaggtctgagccccattctcaagggcctggactggtgaagtagctcctcactcacctccatgccaacggcagctggagggatgctttatcaaccatcaaaccccgttcctcttctgctccatcccctggcctcagtgccgcaggatctttgcac

SEQ ID NO: 352790 - DNA, 296 bp, Homo Sapiens
cccgtgtgtgcatctgcgtcctgcactgccagtggctgccctctgagaaccgggtcactcccttattgagttgtttgtctcatgtgtctgttggacgccccctttgtgacgggcactgtctgagccctgggggtaaaccgggcgtgacgacaccccaggtgtctgttctcaaggttgcccatcctggtgcgttcctctctcaacctgagcggaggcgatgtgtacttggttcctccttcccctctggttaccaacagagaagagttgatcccctccctgttttcagttgaaaagca

SEQ ID NO: 352791 - DNA, 295 bp, Homo Sapiens
tacatgccctcgggaagcaggaggctgggcctggagaggccgacttgagaaagttttgctcctggagaggccactcagaggcaagagctgggtgtgaagaggctgacttgaggtcgattttggcctgcagaagccaccggtagctaggagttggccctggagaggctgacctgaggacaattttggcctgtagaggccactgggagggagagcttggtctgaagaggccaactggagtaagttcagggcttggagaggatgcacaaaaggaaatgctcagcctggaaagtgtgct

SEQ ID NO: 352792 - DNA, 943 bp, Homo Sapiens
cctgcagctgcgctagacttatttgattacatgcttgccttggatcctagtaagcgctgcactgctgaacaggctcttcagtgcgagttcctccgagatgtggaaccctcaaaaatgcctccaccagatctccctttatggcaagattgtcatgagttatggagtaaaaagcgaagaagacagaagcagatgggcatgactgatgatgtttccacaattaaagcccccaggaaggacttgtctctgggcttggatgacagcagaaccaacacaccccagggtgtgctgccatcttcacagctgaaatctcagggcagctcaaatgtggcacctggtgaaaaacagacagatccatcaacaccacaacaggagtcttcgaaaccgttgggaggaattcagccttcttctcagaccatccagcctaaagtggagactgatgctgcccaggcggctgtgcagagtgcaattgcagttctgttgactcagttaataaaggctcagcagtcaaagcagaaagatgtgctactagaagagagggaaaatggatcgggacatgaagcgtcattacaactcaggccacctccagaacctagcactccggtgtcgggacaagatgacctcatccagcatcaagatatgaggatcttggagctaacgccagaaccagaccggcctcgaattctgcctcctgaccaacgacctcccgagcctcctgaaccaccaccagtcactgaggaagatctagattatcggacaagaaatacaggatgttacacaacagacagttcatcattaagctagacccgtcatgccggaagagaaagggcagccctgttaacacatggcttgctcaagcatcatgccaggatgaccccaaagtaaaggtggatggataataagccgggacatttcgagtacacttaaataaaggaacttggatcag

SEQ ID NO: 352793 - DNA, 566 bp, Homo Sapiens
ggaaatggcccctgtggaatgccttgccacagagacagcgcatagcaggctcccgagaaggattaacactggctgaacaccgggaaggaactggcacttgaagtccagacatctgaagcttgtcaagactagtttttggaacttgccccactccatgtgagtggaagcatggcctgatcacccacggtgtgcctgtattgacatctttgttctggttttgacttggcttgacttggtaagactagtctttggaacttgccccactccacgtgagtggaagcgtggcctgatcacccacggtgtgcctgtattggcacttttgttctggttttgacttggcttgacttggtaagactagtctttggaacttgccccactccatctgagtggaaacgtggcctgatcacccacagcatgcctgcacgggcactcttgttctggttttgacttgacctgaattgctggatactctggttttggttttgacttggcttgaattttttggtactcggattttgaatttcgtgattttggtttggtataaacggtaaaagtgtgaaaaaaaa

SEQ ID NO: 352794 - DNA, 540 bp, Homo Sapiens
caagaatgatgggtctgtcttcttgtctcaggcctcccttgagttaaggggatctaccctcgatctggctgtctagcgaggaggaaggtaagaagatagactcacccagagtctctgcagtttcatatgtaatgtctgaatttcagttgtcaagaagcaaaaccaagacacaaaaacagatgacaacagtacacccacagatagttattatacttgttgcagtcaaattttaaaataactgtggttgatatgttcaagaaaataaagggtaagtggaaaatttcaccagaaaaattgattctataaacaaagtaatcaaatggaaattctagagctgaatctaataactcaatagatgggcatcacaaaacattgagtatgaaggaagagcagatgagtgggctggaagaaggtccctgggaaataatgaggcagagtaacagatcaaaactgagagaaagtacaggatggagtgtatgaggcagaggagatctgttggaaaggtctatatgtataggtggagtcccagaagaggagaag

SEQ ID NO: 352795 - DNA, 257 bp, Homo Sapiens
ctccacacccagagcacttagatctgtgtcatggcctcagaggtcgctcactgtcaggcctggccacgaaggcttgcgagagccccagaactggaaggagctgggccatgaggaaccgtgtgggggccccgtctgtttacccacaacctgtctccaatgccaccacggccgcacatgcacacacggtacactgtgatttcctacggcgccgcacggtgacttcagtgggcagggactttctggccagtgtgtcttgc

SEQ ID NO: 352796 - DNA, 325 bp, Homo Sapiens
aatgattccacccactctctttagcttgacggagttcaacccaaaaatccaggtttcccgcatccgatgtggactcagccactttgctgcactgaccaacaaaggagagctgtttgtatggggcaagaacatccgagggtgcctgggaatcggtcgcctggaggaccagtatttcccatggagggtaaggctggccggggaggtcatgagactggatgctaagagtagagtcacctgacgtcactgcagacacctcgcgtgcagatgggccaggacgagggccatgggacctgctcccccttccgggtcctggctgcactcctgc

SEQ ID NO: 352797 - DNA, 2348 bp, Homo Sapiens
  misc_feature (1794)..(1794): n is a, c, g, or t
  misc_feature (1812)..(1812): n is a, c, g, or t
  misc_feature (1865)..(1865): n is a, c, g, or t
  misc_feature (1886)..(1886): n is a, c, g, or t
  misc_feature (1888)..(1888): n is a, c, g, or t
gcctaggtagcgaggcctgggtggcgaattcggcacgagggtgttaagggtcacgcaagatggcggcgcccagaggctgctgaggcgcggaacggaggatggcgctggtggcgttggtggctggggctcggctggggcggcggctgagcgggccggggctggggcgagggcactggacggcggccaggcgctcccggagccggcgcgaagcggcagaagccgaggcggaggtgcccgtggtccagtacgtgggcgagcgcgctgcccgcgccgatcgcgtcttcgtgtggggcttcagcttctcgggggcgctgggcgtgccttcctttgtggtgcccagctccgggcccgggccccgcgccggcgcccgaccgcgccgcaggatccagcccgtgccctatcgcctggagctggaccaaaagatttcatctgctgcttgcggctatggattcacactgctgtcctctaagactgcggatgttacgaaagtctgggggatgggactcaacaaagattctcagcttggatttcacaggagccggaaagataaaacgaggggctacgagtatgtgttggagccctcacccgtctccctgcctctggacagacctcaggagacacgggtgctgcaggtctcctgcggccgagctcactctcttgtgttgactgacagggaaggagtcttcagcatgggaaacaattcttatgggcaatgtggaagaaaggtggtcgaaaatgaaatttacagtgaaagtcacagagtccacaggatgcaggacttcgatggccaggtggtccaggtcgcctgtggtcaggatcatagtctgttcctgacggataaaggagaagtctattcttgtggatggggtgctgatgggcaaacaggtctgggtcactacaatatcaccagctcgcccaccaagctgggtggagacctggcgggagtgaacgttatccaagttgccacctacggtgattgctgcctggccgtgtccgccgacggaggactttttggttggggaaactcggagtacctgcagctggcctctgtcactgactccacacaggtgaatgtgccccgctgcttacacttctcaggagtggggaaggtgcgacaggctgcatgcggtggcacgggctgtgcagtgttaaacggagaaggacatgtttttgtctggggctatggaattcttgggaaaggtccaaacctagtggaaagtgccgtccctgaaatgattccacccactctctttggcttgacggagttcaacccagaaatccaggtttcccgcatccgatgtggactcagccactttgctgcactgaccaacaaaggagagctgtttgtatggggcaagaacatccgagggtgcctgggaatcggtcgcctggaggaccagtatttcccatggagggtgacgatgcctggggagcctgtggacgtggcatgtggcgtggaccacatggtgaccctggccaagtcattcatctaaacctccctcacctgcttgggcggccccgtcccgggaaccactggcactccttggcagaggccagcgcgtggccagccccccggggttcttggatggtgggtggcggaggaccctgcgtgcagtggtgacgctctgtcctgaatcccttagcgggtacctaccaggaggatcagggcaaagtccctctccaactacaagtaaagcctgcggaactcagcttggatggcagcctttggtgggccgctgtggcccgcacgtctctgttctctccaagtaacatgcgacggtgtctggtgtcacntctcccctgagaagcccntcttaggaaagcttagcttgaacacagtgctcgggaggtttctgctctttctntcatggcagtctcttggtttntntctggccaaggccatgcgtgtgcctcggaccgagccccagcttaggcgagggagtcaggctggcttcggccctcggttttcattcaggccaccctgctcatggcccttcctggccgcctgccacaccgcaagctcgctggggggacactagaagcaccgtggcctgggattccatctggagctgtccgcaggcaccagccccagcctcccaccacgctcactgcctggcttggaaaagttaagaagcccctcaggaagagaatcgaggctaagttcctctgcgccgagggccccgagcatatccgccaaggctcagctgcagtgccaggcggaggaggaagatccagaaattgtgaacaatgtttgatttagtagcgtgacttgcctttccctttaaaaacatcttttacaaatctgtcttggaataaagtctattttctgccttttggtttttaagctc

SEQ ID NO: 352798 - DNA, 285 bp, Homo Sapiens
tgtggaagctgagagctggggtgtgagttcctgtggaagctgagagctggggtgtgagtatcctgtggaagctgagagctggggtgtgagttcctgtggaagctgagagctggggtgtgagttcctatagtcacacgaggacagccatgtggccttggggtggatggagatggggactccacatgaagcccaggaccttgaggacctgcctccctcaagattgaagcccaggaacagaccacctactagccggggacgtggggagggggctgaaccccagatctg

SEQ ID NO: 352799 - DNA, 842 bp, Homo Sapiens
  misc_feature (96)..(96): n is a, c, g, or t
  misc_feature (273)..(561): n is a, c, g, or t
ttcgtataccagagccacattgcgggagatggtcccctcgcccagggagccacagtaatcgcccagaagggtggccaacctgaggaaacacttggngcgtgtattttctctttcctctcagacccttcctagctaccaggtgcccagcccaaccctcctcacctggagagcagttctaggaggctgaagggagaaacgttttctgaagttgtgaccaccacaatagaggccgctgtgtccgaagtgaatgaaatgacgccatggtgatgcccnnnnnnnnnnnnnnnnnnnnnnnnnnnnnnnnnnnnnnnnnnnnnnnnnnnnnnnnnnnnnnnnnnnnnnnnnnnnnnnnnnnnnnnnnnnnnnnnnnnnnnnnnnnnnnnnnnnnnnnnnnnnnnnnnnnnnnnnnnnnnnnnnnnnnnnnnnnnnnnnnnnnnnnnnnnnnnnnnnnnnnnnnnnnnnnnnnnnnnnnnnnnnnnnnnnnnnnnnnnnnnnnnnnnnnnnnnnnnnnnnnnnnnnnnnnnnnnnnnnnnnnnnnnnnnnnnnnnnnnnnnnnnnnnntcacgttagctttatttggcggaatgcaccccccaagtggaatctaccaatgaaccagtcctgggagggagctggcgcccacccggcccgacgggaccccgctcctcacccgcctcccgccactggttaccatgacaacctgggactcgtctcctggcagtcccgtcagcttccggtagaagagctcggccacatcccggccgccactgtccccgcggactggcgggtggaaggactcagtccgctctcgacgaattcgagctcggccgatttggcctgat

SEQ ID NO: 352800 - DNA, 1231 bp, Homo Sapiens
gttcttgctcctggggaagctgagaatgtgccgcgcggtggactgtggccggccaaccgaaattggcgcgaaacgtcgccccccacgtgaccggcgccactgcgtgcgggccaatcggacaaggcggccttcttcacctcccgctagccgcaagccaatcaccgtgcgggcctagaatgagtgacggggaggcggtgcgggcgtcggaagggaatctccgggcggggtagtgcaggcgccgggtttcccgcggtccgagctggcgcgggcggaggagaatcgctcttaaagggccagcgcacacgcgttcttttgttccggggccgcagggcggggcaggcccgactttcgccgtcttcttgtctactctccagaacggccatgatttcccaattcttcattctgtcctccaagggggacccgctcatctacaaagacttccgcggggacagtggcggccgggatgtggccgagctcttctaccggaagctgacgggactgccaggagacgagtccccggttgtcatgcatcaccatggccgtcatttcattcacatcagacacagcggcctctatttggtggtcacaacttcagaaaacgtttctcccttcagcctcctagaactgctctccaggttggccacccttctgggcgattactgtggctccctgggcgaggggaccatctcccgcaatgtggctctggtatacgaactcctggatgaagtgctggactatggctatgtacagaccacatccacggagatgctgaggaatttcatccagacggaagctgtggtcagcaagcccttcagcctctttgacctcagcagcgttggcttgtttggggctgagacacaacagagcaaagtggcccccagcagtgcagccagccgccccgtcctgtccagtcgctctgaccagagccaaaagaatgaagtttttttggatgtggtcgagagattgtctgtactgatagcatctaatggatccctgctgaaggtggatgtgcagggagagattcggctcaagagcttccttcctagcggctctgagatgcgcattggcttgacggaagagtttgtgtggggaagtcagagctgagaggttatgggccaggaatccgggtcgatgaagtctcgtttcacagctctgtgaatctggaccaaatttgagtctcatcgaatcctccgctttggcaacacctcaaggcggagcttgactggtgatc

SEQ ID NO: 352801 - DNA, 340 bp, Homo Sapiens
tatactctagtaaaaaaggccatctaaagaatgaggcaaattacacgatacaaaatgctatgcaagatgtaatggataaaagagaaaagaagatgctttttaaaaagcaaatatgctgtgaccctgctatgtagaacagtcaaaaaattctgggtattatctgtgtttgcacacagtaaaaatgttaacaatgggtacctactggatggagactcggatcgctgggacagaggaattttacttttttacttaaaaaaagccaaaaccaggaaaggtaatatttgcacgttaccgattctaacaataagaatgtacagtagactgggcacggtggctcaca

SEQ ID NO: 352802 - DNA, 400 bp, Homo Sapiens
  misc_feature (19)..(19): n is a, c, g, or t
ttaagttggaaaaagtccnccttgtgggaaagtaccatggccctctttcccttcaggtccccacggctgctcagctgcagctggaggctggaacgtgagtcactccccacagggcaggggtgtttttccctttatagccacagagcaggcccaggaagcaatgaaggtatgggcacggccgccccaggacaacggcatttgtgaggagaggggaaaatgcatttcagcagctgatggagaagtaagataggaagggaaagccagtgtttctgagagagagagagtgggtccagaaagctggacatcagagcagaatcttctcttacgataaaacagaagttcagcggtttcctcatgcttagttctgtgttctaggtaccaaaaataaacttattttcgt

SEQ ID NO: 352803 - DNA, 358 bp, Homo Sapiens
gatttttcgaatccttggaagaaatcgactccttcatgtcatccagagggaaacccctgcctcaactgagctccatagattggatccgagacctggccttcttggttgacatgacgatgcatctgaacgctttgaacatctctctccaaggacactcccaaatcgtcacgcagatgtatgacctgatccgggcgttcctagcaaaactgtgcctctgggagactcatttgacgaggaataatctggcccactttcccaccctgaaattggcttccagaaatgaaagcgatggcctgaactacattcccaaatcgcggaactcagaccgaattccagaaaagcgtcgggctagtcgggg

SEQ ID NO: 352804 - DNA, 1447 bp, Homo Sapiens
  misc_feature (52)..(230): n is a, c, g, or t
  misc_feature (1315)..(1315): n is a, c, g, or t
  misc_feature (1370)..(1370): n is a, c, g, or t
  misc_feature (1377)..(1377): n is a, c, g, or t
  misc_feature (1381)..(1381): n is a, c, g, or t
  misc_feature (1395)..(1395): n is a, c, g, or t
cggagcggagggagatccgagcggcggcggcaagctggctgcgagcggctgnnnnnnnnnnnnnnnnnnnnnnnnnnnnnnnnnnnnnnnnnnnnnnnnnnnnnnnnnnnnnnnnnnnnnnnnnnnnnnnnnnnnnnnnnnnnnnnnnnnnnnnnnnnnnnnnnnnnnnnnnnnnnnnnnnnnnnnnnnnnnnnnnnnnnnnnnnnnnnnnnnnnnnnnnnnnnnnnnnnaaagcaaccatggaagacctgggggaaaacaccatggttttatccaccctgagatctttgaacaacttcatctctcagcgtgtggagggaggctctggactggatatttctacctcggccccaggttctctgcagatgcagtaccagcagagcatgcagctggaggaaagagcagagcagatccgttcgaagtcccacctcatccaggtggagcgggagaaaatgcagatggagctgagtcacaagagggctcgagtggagctggagagagcagccagcaccagtgccaggaactacgagcgtgaggtcgaccgcaaccaggagctcctgacgcgcatccggcagcttcaggagcgggaggccggggcggaggagaagatgcaggagcagctggagcgcaacaggcagtgtcagcagaacttggatgctgccagcaagaggctgcgtgagaaagaggacagtctggcccaggctggcgagaccatcaacgcactgaaggggaggatctcggaactgcagtggagcgtgatggaccaggagatgcgggtgaagcgcctggagtcggagaagcaggagctgcaggagcagctggacctgcaacacaaaaaatgccaggaagccaatcagaaaatccaggaactccaggccagccaagaagcaagagcagaccatgagcagcagattaaggatctggagcagaagctgtccctgcaagagcaggatgcagcgattgtgaagaacatgaagtctgagctggtacggctccctaggctggaacgggagctgaagcagctgcgggaggagagcgcgcacctgcgggagatgagagagaccaacgggctgctccaggaagagctggaagggctgcagaggaagctggggcgccaggagaagatgcaggagacgctggttggcttggagctggagaacgagaggctgctggccaagctgcaaagctgggagagactggaccagaccatgggcctgagcatcaggactccagaagacctttccagattcgtggttgagctgcagcagagggagcttgccttgaaggacaagaacagcgccgtcaccagcagcgnccggggggctggagaagggccagcagcagctgcaggaggagctccggcaggtcancggccanctgntggaggagaggaanaaacgcgagacccacgaggcgctgggcccggaggctccagaaacgggtcctg

SEQ ID NO: 352805 - DNA, 1772 bp, Homo Sapiens
  misc_feature (1405)..(1405): n is a, c, g, or t
cggaaagccagtgccgcccgtcagaggggtctcctgagtgcgtgtgggtggctggattctgcatactgggttatcttaaccccggctgtgaaaactggatgaagtagcaatcctttcaaccccaagagtctgtgattcagccagagttacaagatgtctcttcatcctctgaggtttacaaggttctcagaaaacctgtgaagagctgcgcggatcctctcctgccccggcccagcggcagggctgccgcctccctctcccctgggcctgagtgggtggatttcccctcccctcctccttcccaggagaagcacagagggagcggccaagcgagccgtgtctgcaaaccccgcttccctctgcggcggcctctgccatcgtgtcatggggccggaggtccctggtccaggtgactatgaccagagcaggaccaaagtgctgcacatgagcctgaaccccaccagtgtggccaggcagcgcctgcgcgaggaccacagccagctgcaggcggagtgcgagcgactgcgcgggctcctgcgcgccatggagagaggaggcaccgtcccagccgaccttgaggctgccgccgcgagtctgccatcgtccaaggaggtggcagagctgaagaagcaggtggagagtgccgagctgaagaaccagcggctcaaggaggttttccagaccaagatccaggagttccgcaaggcctgctacacgctcaccggctaccagatcgacatcaccacggagaaccagtaccggctgacctcgctgtacgccgagcacccaggcgactgcctcatcttcaaggccaccagcccctcgggttccaagatgcagctactggagacagagttctcacacaccgtgggcgagctcatcgaggtgcacctgcggcgccaggacagcatccctgccttcctcagctcgctcaccctcgagctcttcagccgccagaccgtggcgtagcctgcaggctcgggggcatagccggagccactctgcttggcctgacctgcaggtcccctgccccgccagccacaggctgggtgcacgtcctgcctctccagccccacagggcagcagcatgactgacagacacgctgggacctacgtcgggcttcctgctggggcggccagcaccctctccacgtgcagaccccatgcgtcccggagcctggtgtgtgggcgtcggccaccagcctgggttcctcaccttgtgaaataaaatcttctcccctagacactcccactcgccctgtgtatctgtggcctagccctagcagggtaggcgggaggaggggaaggagctccctcagcagccgccgccatctgcagaccggacaacgttagggtgagtcaggcatttccgctcagggagtgcacaggtggcagctgggaccanaggtggctggggtgcccccccaccaccatgggctgaggcccctccgcgtagcagcttccagctctgcctcaaggccgggccccagctctggggcttccctttgctgatggaacccggatggaggcacaggggctggggggactgtcctcacagataagggtgcatcgaggagagactgccctctgtgcccatctctccagggccatagaaatacattccatagacctaagcagtatttgaatttttataacaatagcatatgtgtttcttatgtgatttactagaaacaatttaatttctcgagttgtacaaaggtgtattttacacctgtgtaacggtcctggacgatcattgtccttcagattaa

SEQ ID NO: 352806 - DNA, 810 bp, Homo Sapiens
  misc_feature (87)..(87): n is a, c, g, or t
  misc_feature (107)..(107): n is a, c, g, or t
  misc_feature (261)..(261): n is a, c, g, or t
  misc_feature (303)..(303): n is a, c, g, or t
tggagatggagctgaagatgctgaagtctcagtccagctctgccgaacagagcttcctgttctccagggaggaggcggacacgtcanggttgaaggtcgaggagctngaaggcgagcggagtcggctggaggaggaaaagaggatgctggaggcacagctggagcggcgagctctgcagggtgactatgaccagagcaggaccaaagtgctgcacatgagcctgaaccccaccagtgtggccaggcagcgcctgcgcaagngaccacagccagctgcaggcggagtgcgagcgactgcgcggngctcctgcgcgccatggagagaggaggcaccgtcccagccgacctttgaggctgccgccgcgagtcttgccatcgttccaaggaggtggcagagctgaaagaagcaggtggagagtgccgagctgaagaaccagcggctcaaggaggttttccagaccaagatccaggagttccgcaaggcctgctacacgctcaccggctaccagatcgacatcaccacggagaaccagtaccggctgacctcgctgtacgccgagcacccaggcgactgcctcatcttcaaggccaccagcccctcggggttccaagatgcagctactggagaccgagttctcacacacccgtggggcgagcttcatccgagggggcacttggcggccgcccaggaacaggcattcccctggcctttcccttcgaggtcggcttcacccccttcaaagccttcctttcaggccccgccccagaaaccccgtgggggcggttaaaccccctggcccaagggcctcc

SEQ ID NO: 352807 - DNA, 1343 bp, Homo Sapiens
  misc_feature (13)..(13): n is a, c, g, or t
ctgatggcagtantctcagggttataaggtagcgggcctgggtgccgaattcggcacgaggaggatctggagcagaagctgtccctgcgaagagcaggatgcagcgattgtgaagaacatgaagtctgagctggtacggctccctaggctggaacgggagctgaagcagctgcgggaggagagcgcgcacctgcgggagatgagagagaccaacgggctgctccaggaagagctggaagggctgcagaggaagctggggcgccaggagaagatgcaggagacgctggttggcttggagctggagaacgagaggctgctggccaaagctgcaaagctgggagagactggaccagaccatgggcctgagcatcaggactccagaagacctttccagattcgtggttgagctgcagcagagggagcttgccttgaaggacaagaacagcgccgtcaccagcagcgcccgggggctggagaaggccaggcagcagctgcaggaggagctccggcaggtcagcggccagctgttggaggagaggaagaagcgcgagacccacgaggcgctggcccggaggctccagaaacgggtcctgctgctcaccaaggagcgggacggtatgcgggccatcctggggtcctacgacagcgagctgaccccggccgagtactcaccccagctgacgcggcgcatgcgggaggctgaggatatggtgcagaaaggtgcacagccacagcgccgagatggaggctcagctgtcgcaggccctggaggagctgggaggccagaaacaaagagcagacatgctggagatggagctgaagatgctgaagtctcagtccagctctgccgaacagagcttcctgttctccagggaggaggcggacacgctcaggttgaaggtcgaggagctggaaggcgagcggagtcggctggaggaggaaaagaggatgctggaggcacagctggagcgggagctctgcaggccaccagcccctcgggttccaagatgcagctactggagacagagttctcacacaccgtgggcgagctcatcgaggtgcacctgcggcgccaggacagcatccctgccttcctcagctcgctcaccctcgagctcttcagccgccagaccgtggcgtagcctgcaggctcgggggcatatgccggagccactctgcttggccttgacctgcatggtcccctgccccggccaggccacaggctgggtgcacgtcctgcctctccagccccacagggcaagcagcatgactgacagacacgctgggactaagtcgggcttctgctggggggcagacctctcagtgcgaccctgcgtccgggc

SEQ ID NO: 352808 - DNA, 272 bp, Homo Sapiens
ggggacaggacagggtcctcaggagggacaagacaagaggagatgagacagcagggaaatcactccagagttgctgatctcttttgattaaagagaaaagattttgccagaggaaggaagatgtcaggagctgttgcagggcaggagagagccccaggcaaggagtttattaggacacagaacggccagggatagggaatctacatggggagggagccttggggagggagccttggagagggaacgactgtctcaggaagcagacaggtgtg

SEQ ID NO: 352809 - DNA, 405 bp, Homo Sapiens
  misc_feature (236)..(333): n is a, c, g, or t
ctcctggccactagtgtggcagtcccagcagaaggtacctccttcccaggtttgctagcaaaagtccagtattgaagctccttggcctggccaggatcatgtgcccacccctgagtgaatcaatatggcctggaagacaaagtcctggctggccaggtcggggtcccgtgtgccctgcctgcagcagtgggttagctgttcagaaggagcccttccagcctgcctgtggctgtctnnnnnnnnnnnnnnnnnnnnnnnnnnnnnnnnnnnnnnnnnnnnnnnnnnnnnnnnnnnnnnnnnnnnnnnnnnnnnnnnnnnnnnnnnnnnnnnnnngaatgcacatacagccacacacaaaagcaagtatacacacatgcagatgtacatgtgaatgcgacaacactc

SEQ ID NO: 352810 - DNA, 430 bp, Homo Sapiens
  misc_feature (59)..(114): n is a, c, g, or t
ttaagtttggctcaaaatactattgaaaatgacatcaacgttaaggaattgaaaggacnnnnnnnnnnnnnnnnnnnnnnnnnnnnnnnnnnnnnnnnnnnnnnnnnnnnnnnngaaatactaacagaagcaagcacattgtgacttactttgtaacgaaatccaagcacagtaattataacagtcataaaagcagtaataaatatagactgtattcgctgagcacatactgtaggctaaacacatactagaggctagacactgttctaggttagggggatgcaaactcttttcttgcagagccaattagtaaatattttaggttttacaggcacacacttgctgctgccatctctcagttctgccataaacaaatggacacgatggtggtttcaataaaactttatgcatacacgtcggcaggagcttg

SEQ ID NO: 352811 - DNA, 651 bp, Homo Sapiens
  misc_feature (20)..(20): n is a, c, g, or t
  misc_feature (46)..(46): n is a, c, g, or t
  misc_feature (73)..(73): n is a, c, g, or t
  misc_feature (87)..(87): n is a, c, g, or t
  misc_feature (114)..(114): n is a, c, g, or t
  misc_feature (137)..(167): n is a, c, g, or t
gggtgtaaaacacttgtagntttgaaaaagtttcccacggttattnaaatgggtaataaacccattttgtccnccaaattcccctgncctgggacaagaaacgtgaatttgtgntctggccatgaaatctagaatcnnnnnnnnnnnnnnnnnnnnnnnnnnnnnnncctatagatttccaactttaacaatatgacaacttgggtgttttgttttattgtgaaaaagattttaaacaatgtgtcaatactgcctattgtcatatattttcttttccttcaaagtcctcccagctggcgttccaaatgacaactttggtgagggaaaaaacaaattcagcagccaggtgtctggcacctaacaccagacaaagatgaccatcaatatttaaacacctaatcctttaaagtgtgaataatgtttacatgaaaagctagcaacaatacagaatgtggttaccttaatttaataatgagctgcatctctgagtatgttttaggaagaatttctattatccaagaatccctaaaggaagatattaactgaggtgaatgtgggaatttgtataagtcaatgcttctaaaggagaacttctttcggtaatcattaaacaaaaagtacacttcttggctaggtgcagtggctcatgct

SEQ ID NO: 352812 - DNA, 1474 bp, Homo Sapiens
  misc_feature (16)..(16): n is a, c, g, or t
  misc_feature (21)..(21): n is a, c, g, or t
  misc_feature (30)..(30): n is a, c, g, or t
  misc_feature (35)..(35): n is a, c, g, or t
  misc_feature (37)..(37): n is a, c, g, or t
  misc_feature (52)..(53): n is a, c, g, or t
  misc_feature (68)..(71): n is a, c, g, or t
  misc_feature (74)..(76): n is a, c, g, or t
  misc_feature (80)..(82): n is a, c, g, or t
  misc_feature (84)..(84): n is a, c, g, or t
  misc_feature (95)..(96): n is a, c, g, or t
  misc_feature (99)..(99): n is a, c, g, or t
  misc_feature (104)..(104): n is a, c, g, or t
  misc_feature (113)..(113): n is a, c, g, or t
  misc_feature (119)..(119): n is a, c, g, or t
  misc_feature (130)..(130): n is a, c, g, or t
  misc_feature (135)..(135): n is a, c, g, or t
  misc_feature (142)..(142): n is a, c, g, or t
  misc_feature (144)..(144): n is a, c, g, or t
  misc_feature (148)..(148): n is a, c, g, or t
  misc_feature (152)..(153): n is a, c, g, or t
  misc_feature (163)..(163): n is a, c, g, or t
  misc_feature (166)..(166): n is a, c, g, or t
cccaggtaaaggtacncttcncccagccgnggcgnancttccgggcccccanncccccgcctggggcnnnnccnnnggannngnaaggtatgcannccnactcnccatgaagncttgcngaaatccgggngcccncctcgangntgtntttnncagcgcgccnttnttgtccgcactcaaagagctcccagcttctcgcccgactgcacgcgcttgaggagcggcgagcgagggggctcggcactcttggggcgcgggcgcacgacgggaggcgatgagtgcagtttggccgggaagctctgagtagtgtgcgagctgcccaccgtgtggcccggcagtggcggcggtgacgcctgcgtgggggacggcgtgtgtgccagcggcgatagagggatgttgccggccgacttgcatcgcgcagagcggtactggcgatggagctttggcgacagtccgtgcagcgtgctgggccgaatgtggtgcgacgccgacgacgcaggcgagttgggcgtgctcgaggctggggaactgctctgggatgaggcgcctaggtaggcggagtcaggcgtggagcggtacctgtgcgtgggcgagcgcgccggcagcccgtgcgtaggcgagcccgggagactatcgctggatgacagcgagcggttcagcgacgacagcgagcggctagtatgcagcaggttcgactacttcgtgatcttccggaagagggagctgcgcttcttgctctcctggccctccttggcggagggtcgcttgttcctccgagccattttagccttgtagctgctgcgccttgcgggaccaatgcggatagaggtattttcgaagggcgttgtggtcactgctaccttgttgccactcttaaggatcagctccacgacctcaggatgcaccatgccatgcacaggctccccattcacgtgggtgatgaggtccccagcacagagtcctgcctcctgggctgggcctccttcctccacatgccagacaatgtggtggacactatagacatccgtgtcacccatgtagacacggatggcacgcagtgtgaagccatacttcttgcccgagcgctggatggtgatgggggagcggagcccactgacagctggtgagtagtcccggctgggtgaggagtcccgtgaggatgggttggaggacagagatcgtggagacatgggactagcaaggggtgaacttccatgtgggtccactgcaggaatcatgacagataaggcagtggctgaggctgatttgatgactttgcccccagttcgagaaggcctcttctctactgccacatcccctgacatctgctggtgccgcgcccggcgcagaaccaagtcattggtagcccttgggcctgatgcatccccatccttcgagggtgggcagaggtcacctgggcgtggacggtcagctgcaacagaaagcaagtgtgttaggaattagtccaaggcca

SEQ ID NO: 352813 - DNA, 1379 bp, Homo Sapiens
accgttgtgaggccgtgaaatgggaggagccctgagctctggcgtccaggtcaaggacgcttggccccctccctgtcccgcagcaagaagcacagctccctcttccgcgaagatcacgaagcagtcgaacctgatgcatactagccgcatagccgtcgtcgctgaaccgctcgctgtcatccagcgatagtctcccgggctcgcctacgcacgggctgccggcgcgctcgcccacgcacagctaccgctccacgcctgactccgcctacctaggcgcctcatcccagagcagctccccagcctcgagcacgcccaactcgcctgcgtcgtcggcgtcgcaccacattcggcccagcacgctgcacggactgtcgccaaagctccatcgccagtaccgctctgcgcgatgcaagtcggccggcaacatccctctatcgccgctggcacacacgccgtcccccacgcaggcgtcaccgccgccactgccgggccacacggtgggcagctcgcacactactcagagcttcccggccaaactgcactcatcgcctcccgtcgtgcgcccgcgccccaagagtgccgagccccctcgctcgccgctcctcaagcgcgtgcagtcggccgagaagctgggagcctctttgagtgcggacaagaagggcgcgctgcgcaaacacagcctcgaggtgggccacccggatttccgcaaggacttccatggcgagctggcgctgcatagccttgccgagtccgacggtgagacgcccccagtcgagggccttggcgcgccccggcaggtcgccgtccgccgcctgggccgacaggagtcacctttgagcctgggcgcggacccgttgctgcccgagggtgcctccaggccaccagggtcgagcaaggagaaggaatccccggggggcgccgaggcgtgcaccccaccccgcgcgacgaaccccgggggccggaccctggagcgggacgtctgcttgacgcggcatcagaacgggcagacggagggatggactggcgggatggccagggctgtggcaaggcggggctgagccccgggcaggaacacaagaaagccggcgcagcaatttttggcgaggcgggccccaccccttggtcccatttgtctgaaaggctgggccggcccggggcttaaagtgtggtgccttaaacctttggcgcgggctccaggggggtggcagaaaaccgcaaccctggggccctttcggtcccgagaggcccccggggaccggaaccctgggtgttggaggggggggaggaaagcacccccttgggcggggcttgtttcaaagccatctttccaaaatatttttcgggggccctataaacccctccttgccccaggcagatgc

SEQ ID NO: 352814 - DNA, 609 bp, Homo Sapiens
gctcggtacccggtgtttatcgatgccaccagcaatcgtggtaactgggaggatcttgaggtgcccccattaaatagcacccagtgttaaagaggaggccaagaagcttctcatcgtcttgagggaaggccactgcaggagctggagaatgcaacagaagcttgtaaggactaagcccagatctgagaaggagtcatacagctgctctgccctgccttcggggagtggagaggagactgaagtccagaaaggtagatgcatgtgtccaacttcacacagagcactatggtgaacaagggctgagacgcagaacaccgcaggcgacttcttgccaagctgcctgctagttcacctccccagagggtgtgtacaccaacgtgcacgcagaagtacaccagaagtacacggttgcctctggcgctctgctctttacactgctgagaatgtatgtttgctccattgttgaaaattcctttctcttcatgttcatctcagatgtctggagcggtctcagtccgttcgtaaagacaggaacatctgctctttgtcaaactgccctgatgcgtgcccgccacaaagaggaataatatcacgctcatcttttccgtg

SEQ ID NO: 352815 - DNA, 727 bp, Homo Sapiens
  misc_feature (87)..(160): n is a, c, g, or t
  misc_feature (204)..(213): n is a, c, g, or t
  misc_feature (678)..(678): n is a, c, g, or t
agcgcactggtaactggtaacttccttgatagcactcatttcttttttcattctttggtgtttttttagatggagttttgctcttgnnnnnnnnnnnnnnnnnnnnnnnnnnnnnnnnnnnnnnnnnnnnnnnnnnnnnnnnnnnnnnnnnnnnnnnnnncatgcagacctcatccccaggaggcagtctgaaatggctcaggnnnnnnnnnncagcaggtgaaatttgtgcagggggatctcacctgaacaaggatcagaaagacaagggcttgtccccaaacctacccaccctcctagtggcagctgggaccctggaccccctcaccaccaccagcctaccccatgctatccatcaccagccagctcatgtcctaaacatctctgcatccctcctctctctccatccacgctgctgcctcagctggtcctggccaccacggctctctcagcgtaggctgcagtcacttccaggctggattccccaccccgtgcccttgacctcctcctgtcctctactccacaaggcagccagaagaatctgccaatgtatccagtcttctcttgggctagagccttctggtggcttccaatctgcacccatccaagccctttgtgtcaggcaccatctcatcttcataaatcctgttttctattgcctggaggactcccccaggncctaacttcccctgttcctaaatgacatttcaccaacccttcaggatct

SEQ ID NO: 352816 - DNA, 1822 bp, Homo Sapiens
caagaaagggactcctgccccagcgtcaagtgccaaagcaggccccatctaccacttcagggtcgacgttggtggcaggagttgttcacggtgtactgattgtcactgcaacacctccacatcaccttgaacttcaagaacagcagcaaagctgtatctgctatcagaggctgttaggtagtccagctttaaaataacacactctttctctatcccatgccctttaaacaagcagccacaggagatgtcagtctccagggcctggccccactgtgttgacagcagtcacgtctgttgagctgacactgctgaggctgaagctggccccgtgcaggtggctggtgagccacaggtgcagtacccggaggtgtgctctcccctagaggcctgtccccaactcctcccctagaggcctattcccgctgctcacagacctcagcagaggcaccagctggagggctccagggacatccttggaaatacaggaggctttcctggcacagggcacagctcttaggaggcctttgtaggacgctgtctccccagcgtgtcctgctcatccaggatggggagaaagaggaggaggccccaggctcagaagccagggacagactgccgacgattaccaaactgaatccaggcagtgccatgaccctgggtgtcccttggttcacatcacccaccagacagctgcggagagagtgcagggaggggctgggaccaaacaggccagaaaccagcagaaaagaggcagaagtgaggtgggtgtgcctggggcaggaagccagcgccgggggggatttcagtggagccttacagccaggctccgtgcggactgtgatgccagagaggcgtgcagcctctgggcaagtcgggagagggcttgggtggtccccacaaggcagaagaggtggaagggccagagaagaccaccaagaccaccgttcccgcaggcctggggtgagtgacctgactgagactagcgggcagagccaagcagggctaaactccaacccagggcccggtgttggacaaagtagctttttctttgctcgtttgtctgtgtattaagaagagactaaaatagccaaacgacgctggtcgcatgcgctggctgtggtctgtctgctgaatgtctatttttgtctcctgacgagacgtgaggaccatgcccttgatccctccgatggaccagaaacccccttccttgcaaaaaaaaggcaattgaattaggaaaagatagcccaacctagctcagatccaccaagataagcacagcaaagcttggctgcatttttgaggaataaaaacctgcagaaagcaccgataaccttcaagatctgaatgagattctattataacccgtctaaacgattgcaaaattcctcctttggttttggaagcagcgtttgctctcccgtggctcggattctctgaggaccagggagttgacacacaaaccccgccatgggtccgagccagctatttctcaaggctcccacctcgccaagctcccaagggcctgctggcagtgcctacgctgtgccaactaccctgtctggtacagaccacggctgggtaagcacccttaaaagcaacagaaatgacgtctggaagctgaaatgtgaaactgtcaagatggcttaggagaggaaggagtggacccgctggtctttggcattttgtatttagaattattctaactttatacataatgtataggccgatcttttggaagggataaggttttcattcttgtgcaactcattattctcattattggccttttaaataaaaagttgttttgcagtgtgaaaaaaaa

SEQ ID NO: 352817 - DNA, 448 bp, Homo Sapiens
  misc_feature (414)..(414): n is a, c, g, or t
  misc_feature (424)..(424): n is a, c, g, or t
gctagcatgggaggggtgagctgtgagtggggctgagcatgggagcagcaagctggtggagtgggctgggcggactgttgggggctgctggcagggctaggaaagtagacaactcccgggggagacgaagagagagtgagtccccaagaaagggactcctgccccagcgtcaagtgccaaagcaggccccatctaccacttcagggtcgacgttggtggcaggtgttgttcacggtgtactgattgtcactgcaacacctccacatcaccttgaacttcaagaacagcagcaaagtgttattctgctattcagaggctgttagggtagtccagctttaaaataacacactctttctctattcccatgcccttttaaacaagcagccacaggagatgttcagttttccaggggcntgggccccantgtgtttggacaggcagtcatgtt

SEQ ID NO: 352818 - DNA, 459 bp, Homo Sapiens
  misc_feature (393)..(393): n is a, c, g, or t
tcccttggttttgggaaaaaaacgtttgcctctccccgtggactcggattcctcctgaggaccccgggagttgaaaacaaaaacccccgcccatgggtcccgaagcccagcctatttcctcaaggctccccaccctcgcccaagctccccaagggcctgactggcagtgccctacgctgtgcccaaactacccctgtctggtacagacccacggctgggtaagcacccttaaaagcaacagaaatgacgtctggaagctgaaatgtgaaactgtcaagatggcttaggagaggaaggagtggacccgctggtctttggcattttgtatttagaattattctaactttatacataatgtataggccgatcttttggaagggataaggttttcantcttgtgcaactcattattctcattattggccttttaaataaaaagttgttttgcagtgtgccttg

SEQ ID NO: 352819 - DNA, 310 bp, Homo Sapiens
tttccagtgtccgcatcgtcatcaaactgaggcagtctcttgccgagctgagggagtcccgcgtgggggtcatcctggaagttgtcattctccagggcctccagctgccggttgatgcgacgctgccgggcagcccggtccagcacccgccgctgcccggggtcctgggagcgaacttcatcgagtagaaagagaccctttgcttgcttccttgacaaaactgcaggccttctccatgtccaggaatcctccggctccagctcggctgctctccctgcctctatggaggtggctggccctcttctctgct

SEQ ID NO: 352820 - DNA, 1058 bp, Homo Sapiens
  misc_feature (756)..(771): n is a, c, g, or t
  misc_feature (784)..(822): n is a, c, g, or t
  misc_feature (870)..(944): n is a, c, g, or t
  misc_feature (986)..(994): n is a, c, g, or t
gctgggtggcgaattcggcacgagggtttcttccgacagttgtgttgtgccaatggtggagaagaaaacttcggttcgctcccaggaccccgggcagcggcgggtgctggaccgggctgcccggcagcgtcgcatcaaccggcagctggaggccctggagaatgacaacttccaggatgacccccacgcgggactccctcagctcggcaagagactgcctcagtttgatgacgatgcggacactggaaagaaaaagaagaaaacccgaggtgatcattttaaacttcgcttccgaaaaaactttcaggccctgttggaggagcagaacttgagtgtggccgagggccctaactacctgacggcctgtgcgggacccccatcgcggccccagcgccccttctgtgctgtctgtggcttcccatccccctacacctgtgtcagctgcggtgcccggtactgcactgtgcgctgtctggggacccaccaggagaccaggtgtctgaagtggactgtgtgagcctgggcattcccagagaggaagggccgctgtgcactgcccggccttcagaaagacagaatttcatcacccaatgcagggggagctcttcctggaccaagggaggagccgctcattcacccaacaaaactgtgtcttatctgccaggaaagaccagcctcactcctgggaactgtctggcaggtaggctgggccccccagtgctgttagaataaaaagcctcgtgccggaaaaaaaannnnnnnnnnnnnnnnaaaactcgaggcnnnnnnnnnnnnnnnnnnnnnnnnnnnnnnnnnnnnnnncatggtcatagctgtttcctgacccagctttcttgtacaaagtgggtnnnnnnnnnnnnnnnnnnnnnnnnnnnnnnnnnnnnnnnnnnnnnnnnnnnnnnnnnnnnnnnnnnnnnnnnnnntgcagtacccggggaatttacccggcctaaaggagcggggcnnnnnnnnnggggatcccaaaggaacttcctgggaaacccttttttttctggggaggaaatctgccggcttgc

SEQ ID NO: 352821 - DNA, 1722 bp, Homo Sapiens
  misc_feature (1602)..(1644): n is a, c, g, or t
cggccgagggggatggagcgagcgccgagccgggtcagagttgaacaatgaccatagttgacaaagcttctgaatcttcagacccatcagcctatcagaatcagcctggcagctccgaggcagtctcacctggagacatggatgcaggttctgccagctggggtgctgtgtcttcattgaatgatgtgtcaaatcacacactttctttaggaccagtacctggtgctgtagtttattcgagttcatctgtacctgataaatcaaaaccatcaccacaaaaggatcaagccctaggtgatggcatcgctcctccacagaaagttcttttcccatctgagaagatttgtcttaagtggcaacaaactcatagagttggagctgggctccagaatttgggcaatacctgttttgccaatgcagcactgcagtgtttaacctacacaccacctcttgccaattacatgctatcacatgaacactccaaaacatgtcatgcagaaggcttttgtatgatgtgtacaatgcaagcacatattacccaggcactcagtaatcctggggacgttattaaaccaatgtttgtcatcaatgagatgcggcgtatagctaggcacttccgttttggaaaccaagaagatgcccatgaattccttcaatacactgttgatgctatgcagaaagcatgcttgaatggcagcaataaattagacagacacacccaggccaccactcttgtttgtcagatatttggaggatacctaagatctagagtcaaatgtttaaattgcaagggcgtttcagatacttttgatccatatcttgatataacattggagataaaggctgctcagagtgtcaacaaggcattggagcagtttgtgaagccggaacagcttgatggagaaaactcgtacaagtgcagcaagtgtaaaaagatggttccagcttcaaagaggttcactatccatagatcctctaatgttcttacactttctctgaaacgttttgcaaattttaccggtggaaaaattgctaaggatgtgaaatacccctgagtatcttgatattcggccatatatgtctcaacccaacggagagccaattggctacgtcttggatgcagtgctggtccacacctggctttaattgccatgctggccattacttctgctacataaaagctagcaatggcctctggtatcaaatgaatgactccattgtatctaccagtgatattagatcggtactcagccaacaagcctatgtgctcttttatatcaggtcccatgatgtgaaaaatggaggtgaacttactcatcccacccatagccccggacagtccgtctccccgccccgtcatcagtcagcgggttgtcaccaacaaacaggctgcgccaggctttatcggaccacagattccctctcacatgataaagaatccacctcacttaaatgggactggaccattgaaagacacgccaagcagttccatgtcgagtcctaacgggaattccagtgtcaacagagctagtcctgttaatgcttcagcttctgtccaaaactggtcagttaataggtcctcagtgatcccagaacatcctnnnnnnnnnnnnnnnnnnnnnnnnnnnnnnnnnnnnnnnnnnnccccgagaccgcgactccaggcatcagcaggactcagacctctcagcagcgtgctctgacgctgacctccccagacac

SEQ ID NO: 352822 - DNA, 405 bp, Homo Sapiens
  misc_feature (294)..(344): n is a, c, g, or t
acaaggaccacaaccggggccgtaggggctgcgagccggcccgggagagggagcggcaccgccccagcagcccccgcgcaggcgcgccccacgccctcgccccgcaccccgaccgcttctcccacgacagaactgcacttgtagccggagacaactgtaacctctctgatcggtttcacgaacacgaaaatggaaagtcccggaaacggagacacgacagtgtggagaacagtgacagtcatgttgaaaagaaagcccggaggagcgaacagaaggatcctctagaagagcctnnnnnnnnnnnnnnnnnnnnnnnnnnnnnnnnnnnnnnnnnnnnnnnnnnncaccgagaccgcgactccaggcatcagcaggactcagacctctcagcagcgtgctctgacg

SEQ ID NO: 352823 - DNA, 306 bp, Homo Sapiens
  misc_feature (17)..(17): n is a, c, g, or t
  misc_feature (29)..(29): n is a, c, g, or t
cgaggcccagcaacctnccagccacccantggcctccaaccagagcaaagaacctgctgagtcggcagctgttgctcatgaacggccaccaggtgggatagggagtgctgaccctgagcggccccctggagccacatgccctgagagcccaggacccggaccccccacaccctttgggggtggtggaatctggtaagggtccgcctcccaccacggaggaggaggcctccggccccccaggagagccccggctggacagtgagacagagagtgaccatgatgatgccttcctctccatcatgtctc

SEQ ID NO: 352824 - DNA, 295 bp, Homo Sapiens
ctccttcatgtgtgcccaatgtttacagagccctctcttactccttcatgtgtggccaatgtttacagagccctccctcactacatcatgtgtggccgatgtttacagagccctctctcattacatcatctgtgcccgatgtttacagagccctctctgactccatcatgtgtgcctgatgtttacagagccctctctcactccatcatgcgtgcccgatgtctacagagccctctctcactccatcatgcgtgcccgatgtctacagagccctctctcactccatcatgcgtgc

SEQ ID NO: 352825 - DNA, 235 bp, Homo Sapiens
cctcaccaccttctgatgtcccctcaccgccttctgatgtcccctcattactctctggtgtcccctcaccgccttctgatgtcccctcattactctccgatgtcccctcaccaccttctgatgtcccctcattacgctctggtgtcccctcaccgccttctgatgtcccctcaccaccttctgatgtcccctcattactctctgatgtcccctcaccgccttctgatgtccccat

SEQ ID NO: 352826 - DNA, 477 bp, Homo Sapiens
cgacgttatctctgtggggggcggcagtgggtaaaggaggagatcacaggtgaaaacaccttccgaccaaagcccttgttgccctctgggtcctccccagagctgtccccactctcgctgtcggtcacccgctccttgcacttgagatcaatgtcagtggtgccgaagccatcgtcagcaatgacatcatcatccccttcctcctcacagatgaccatgcgctcctcatcactcgtcatgtcctcactggccgcacgctgagaacgagaagctcgggtgggcagcagcgggggccgcccagtggccgccaaggcacctccctcaccaggggctgcaaaggggcctggagctccatactgagtagaaggctttgggccagagtacgatgcagggccagacaccacctgcgtcagttcccgtagcgcctgacggtctacttctccgccgtccaggctgtgtaccccacagagagagcgt

SEQ ID NO: 352827 - DNA, 686 bp, Homo Sapiens
gggggtcccgggaggcttttctccaagctgttgccaccagacccgccatgggaaccctggccacagaagcctcccggggagtgagccagagcctggaccgctgtgctgatgtgtctggggtggagggagggtggggagtgtgcaagggtgtgtgtgtgcccggggggtgttcatgggcaagcatgtgcgtgcctgtgtgtgtgcgtgcccctcccctgcagccgtcggtggtatctccctccagccccttcgccaccttctgagcattgtctgtccacgtgagactgcccagagacagcagagctccacgtggttttaaggggagacctttccctggacctgggggtctcgccgtatctcatgaccaggtgctaaatgacccgacatgcatcacctgcctttcgatgaccaacctccctgtccccgtcccgctgacctgcccccgtggcgtctcacggtgatgcctgctcctgacattggtgttcactgtagcaaactacattctggatgggaattttcatgtacatgtgtggcatgtggaaaatttcaaataaaatggacttgatttagaaagccaggcggctgtgtggtccttccagcacggatactttgacctcttgcctacaaccccttccttgggtccgaggctggtagctttgttcacttcagatggttgggggcgggtg

SEQ ID NO: 352828 - DNA, 559 bp, Homo Sapiens
  misc_feature (16)..(16): n is a, c, g, or t
ggggtgagcaggtgancctggggctgccacttgagctcctggagtgtgtgtcttggcccctgtgtggttctccattaagaaaagctcagatagtctcaaccccaccctctccccttgctgcactcagagtaccagtgggagctgaaggatggggaggaacagagcagtgaccacccctccctgccactgataagtcctgcctcgtcgtggggctcccctggattcccaagacaccccttcctccctcagcccgtcgtcctaacccagcaaagatctgggcattgctgactctgcacctccttcctccatgggcatctccaggaccgccctccttcaaggggcactgcccacaccaccgtcctcagcccgaggcatgcatctgagctggagaggcttgctaggcctgaccctggtagcttcccctccccaagattcagaggcggggacccaaagcctcactccaaaccactggcattctcacctcctctcacctccaggcaccaggctgctggtgggaaaggaaggagctgggggatcagaggcttccagtgtggcctcc

SEQ ID NO: 352829 - DNA, 296 bp, Homo Sapiens
  misc_feature (281)..(281): n is a, c, g, or t
gtgggtccatatgcacatggtcttattcctagcctcgtgctttctcctcatcgtggttatcgcccttgacactggggcaggaaagatcttgtgtgtggagagaatgatgtaccgaatcacaaaggtgacggagccaggccaacagctctgaatgcatgcactctagagggctgccacaggtccagcccgtgcagcttaaatccaaagggtgtcctcaagcatgcaaggtcatttccaaggctaggcccgccgaacagcaaatgggggatgaaaggtggatncgctggaaagtggaa

SEQ ID NO: 352830 - DNA, 278 bp, Homo Sapiens
gcaagatccacatgaaggctgcccttgccctcatggagaggggcacacgtgaactcccagagggtgaagcttcccagctagaggcagtgtcagactttgcctgacaggaagcagatgaacgtgggacctattacttctcccccctcaggtgaatgctgtggccatcccctcctgggggaagttcctggctggctgtcctgaatgtttacagctgggaaggcctcaataaccctgttcccagagatgtggctgtttcctgactgggcaccggcacaccc

SEQ ID NO: 352831 - DNA, 1314 bp, Homo Sapiens
  misc_feature (999)..(999): n is a, c, g, or t
  misc_feature (1175)..(1175): n is a, c, g, or t
  misc_feature (1186)..(1186): n is a, c, g, or t
agcggacggatgcggggtggtcctaggtgctgaggagagcgcgactggggcagtgggccggcggccggcgttggggcggggcctgggtcgctgatggccggtggtcctcagcgtgtctgcggcgccgagggggcccctacaagaccgagcccgccaccgacctcggccgctggcgactcaactgcgagaggggccggcagacgtggacctacctgcaggacgagcgcgccggccgcgagcagaccggcctggaagcctacgccctggggctggacaccaagaattactttaaggacttgcccaaagcccacaccgcctttgagggggctctgaacgggatgacattttacgtggggctgcaggctgaggatgggcactggacgggtgattatggtggcccacttttcctcctgccaggcctcctgatcacttgccacgtggcacgcatccctctgccagccggatacagagaagagattgtgcggtacctgcggtcagtgcagctccctgacggtggctggggcctgcacattgaggataagtccaccgtgtttgggactgcgctcaactatgtgtctctcagaattctgggtgttgggcctgacgatcctgacctggtacgagcccggaacattcttcacaagaaaggtggtgctgtggccatcccctcctgggggaagttctggctggctgtcctgaatgtttacagctgggaaggcctcaataccctgttcccagagatgtggctgtttcctgactgggcaccggcacacccctccacactctggtgccactgccggcaggtgtacctgcccatgagctactgctacgccgttcggctgtagtgccgcggaagacccgctggtccagagcctccgccaggacctctatgtggaggacttcgccagcattgactggctggcgcagaggaacaacgtggcccccgacgagctgtacacgccccacagctggctgctccgcgtggtatatgcgctcctncacctgtatgagcaccaccacagtgcccacctgcggcagcgggccgtgcagaagctgtatgaacacattgtggccgacgaccgattcaccaagagcatcagcatcggcccgatctcgaaaaccatcaacatgcttgtgcgctggtatgtggaacgggcccgcctccactgcctttncaggagcatgncctcagaatcccgggactatctcctggatggggccttggacggcatgaaaaatgcaggggcacccaaccggcttaccaagatcttggggaacaaccgcaatttcccccaattccaggcgtcctgcttt

SEQ ID NO: 352832 - DNA, 990 bp, Homo Sapiens
ctcgaattaccgggccacatattgcttgggaaagttttcggggcagatgggtccaggaatgagagaagcgtcatgggggctatgctgtgcccaggcctgagggcaagggtggcattcctgaagcctccccacatgccctgccctgctctggaaacttcaccccattgctccgcgtggactgcacagtgagcctccacttcacctggggagaaaatgaattttgccccaggcctcccggctggcaagtggggaaagagcggcatgaagcagaggctggtccgtctcagcaccatgtccccaccactctatgggaccagcccctcctggattcccagattgggcggcattggtttagtctgagaggtttccaggtcattcatggaaattcctgatggcgtcaggtgggcttctggcttccagctgtcccctcctgggcctctggacattggaaatgtctggctaaaggggaattcggaccacaccaatggggaaggagtgtggaggccagcagctccctgacttttcggcacccttgggctaaaattgggaagggcccagtttcctgtgccctctccgagacagcacctgctgtagctctcaagtggtcaggcacttcatggctgattgctggttgaaaaaggaaccaaaaaccgagggttcttactacttttcacagcccagcttcaattcaggtggagacaggggagtcgtccccagccaggggtcaggacagcaataaggctggcaactctcattgctccctgtccctccaccaccgccaccccctccattcatacactggaaaccccaaaagggtgtgactgacccccttccttcagcagattttcttggttcagtgaacttacagtaccatttttataccaatttaaaggtcaaaagttacaaacatgtaacaggcagacagatgataggctggaagtggagaggatggcgaggagagccgccgtccacctgggaaggagggcgcag

SEQ ID NO: 352833 - DNA, 363 bp, Homo Sapiens
gccccactctcccactctgttcgttcctgaatgttcttcacgaagcgtgcatcagggcgcctggctcccccacctcagccagtgaagtcagaacacgggtttcgcagccatgtttcctggctccgaggacacgggtggcaggcccgttgcagcccagagccactggtccctacagggcgccgcacaccagcaggaaggaaggatggctgtgtccggagcctggcgggaggcggcctccccagtatgtgaagtgcagggatctgccagaaccacctggccctctgtagggcgtttaactggaaataaccctcactgccaagtggagactggggcgtgtgccacattgccagccaccaggaaagc

SEQ ID NO: 352834 - DNA, 584 bp, Homo Sapiens
agcctcattacagctggacagtttcaaatgattcctcaatctccaccaaacctcctctcatactacctcagtggagagggagatggatacctcattattgttgagtttggggtggaagttctagactgcccatttgagtcaacatagacactgcatgtgagggtaagaagaaagaatcttgctaacccccggcagggatgaaactcctagattcctgctcagaacttcttttaacactactctgggtgctggaaggagagggtgttggaataccctggcaaggtatcagcgtctgggccttgccactttgcctttgcaggtgtacatggggatgggaccataattctttttgtggtgttcaacgagagcaaaatgatattgcttctgtctttctaggctgcccctttcttgttcctttgactagagagaacagccttttcgttggaacttggtttttttgttctgaaccagttggcatttctgggttgcaggcttcttcagcttctgaggttttgatgtataaggttaaaaattttaaatccatgttcattccttgagtccttcagtctctagctagtttttca

SEQ ID NO: 352835 - DNA, 506 bp, Homo Sapiens
agggcccgtggccaaaaaggggctcgccaaagaaggaggacacctcggcccctgaccagtgcccgagcaaaggcggccaatgtccaggagccggagaagaagaagaaacgcagggagtgatgtggccgggccaaggacaggcagggagggaggccaggcctcgcttgcaccgcgggacgaggctgaccgggctgttctgtagactcaggaccgtggctccagaactcctgtgccaggcgggagggaagggcggcactggagagatgggcccatcattaggggccagcatcccaggaactggacctttccccagagcctccgcctgtggctgtgatgaccttgggccagaaggtcaaactccgaagactgaaactctgcctgcagcaggactggccgcccctgctgtggggggttcagaaaataaaatgccgcgcagcccttgccagggaagtgtcgcttcaggtgtgtcctacggacgtgtgggaggtggcaggcgccagcctccg

SEQ ID NO: 352836 - DNA, 161 bp, Homo Sapiens
gtggctcttgtctactgctgtagcctcatctggtgtcccttgacctcttgctgggtttgaaaactgcagctgatgatgatctggtagctgaccttgtggtaaacatcctcaaagtgtgcccggacttactgaacaaatacttcaaggaagtaacgttttcc

SEQ ID NO: 352837 - DNA, 882 bp, Homo Sapiens
aaaagggccactgggaatactggcacaaggtggagctctgcaaagcccagctcacggtgtggaaaaatgaacgcaccttgtggtacggcctcaaggaacgggggcctggccgggggaaggggcagaagtgcgagcagcagcctcccgcacccatgggagagagttttgttttcttggccgggctgggcaggtgcgccttcctttctctctcctgtgaagaaccgcaggagggccctcagctgtgaggttgtggatgaacaggcctgttcgccccggggtccgggcctggcacaggaagcagctagactaggggagtccttggagcatctgagaggggttttctttcctctgggaagagtcgcaagtcttatgaggatgccacaatctgggcagtgacccgtggccctggggaccttcctagtgccccccaaaaccaaggaagcattcacgtgagatggggagtcagccttccagctggtgtgtaggaaagccaggtccctgggcccttgtcccatgtggggttgagatccagatctccatgagatattcccatcctccgccgagcggtgatgcgtgaccgtgtgtgcaggccgctgttctcccaagctcggggccatgccgtgccaccgtcaccagagccagctgcagcactggggcagccactgtcgccggacttggggaagcccagggtgaagacagtcactcatccgtgcaagctctccagaagggatgcaagctctccagaaggggtgtgatctctgagcagtggggagtggagtcaccactcgggacatagagggtggacagttcaggcctgtgtctgcctccttgggactgtggagtgggtgccctcagtaaagcgctttgttggaatggtaaaaa

SEQ ID NO: 352838 - DNA, 219 bp, Homo Sapiens
gcctactactactatacggctgcgagaagacgacagaagggatgcaagctctccagaaggggtgtgatctctgagcagtggggagtggagtcaccactcgggacatagagggtggacagttcaggcctgtgtctgcctccttgggactgtggagtgggtgccctcagtaaagcgcttcgttaaagaaaaccaaataaacatataaagagtcgtatcgat

SEQ ID NO: 352839 - DNA, 376 bp, Homo Sapiens
aatgcattcccctcccctaccccaaggcgtgaaagaatcaaatgaaggaaatcaggaagagattctggaataggaataacaagatttcccttcccttccactgaattggccatcagtaattttgcacaaattcaattttgaagtcatgcttcgtaatttgtggtaaatcatattaaattaaacagatccatgtctgggcaacggcttctcttcatttaggaacatatggtggctcagaagcctctcacacagcagaactataaaggctcttccaaataagcagcagagtgaggggcttctggggcaaccctactggttttcctgagaatgttagttaggggtgaccattaattcacgggaactgcagtatccctca

SEQ ID NO: 352840 - DNA, 985 bp, Homo Sapiens
caaacaagctttggagtaaggtaaaggagaaattgccatttgatgtcttaacactcaaaacacactatgcttattttacttctgtgaagactaaaaatcattccataatctccttatttgctcatttagaaaagaaaatgaaaattgaatactaggttgattaataaacactcaaagcttcttcttttagaattttagttaattgaaatcaggtaaatgtctgattttgcctatgtcaccaagtatctctagttgtttttcaaatcatacatcttcttgcttcccaatcttatttcctaacttgaggggaaattgtaaggagacatccttgccttgttatcagagttcataattgaaggagttttaggaaaattcctcctcagcagcttatgtctctctcctggttatctgctgcttctcaataatgtttgacatcaataaataaatctcaacatttattagatcctactttaaaggagacttttctgctgcataagttatgtttcctgttgtctctttttaaaagttatttttctaacaattacccagagtcttgtggcttgaaagaaaaacatttattttgttcatgaacctgtggtttgggaaaaacttggccagaacagcttgtctctgctcccttcagccttccctaggaacagctgatcagttggggaaatggaatcctctgtagctttggtcacccacttgtttgatggttgatgctggccatcggctgtaaacttggttgggacaggcagcatgaacactgacacaggcactttcaggctctctttgtggcctgatggctctcacaataggggctgggttccaagggaaaacagtctgagatagggaagccacatggtatccctttcactacattctactcattagaaggaagtcagtaaggctggcccatattctgttttttaaataggatgaatgtagcttctcttatgtatatatgtgtcaatttaaaacaaaa

SEQ ID NO: 352841 - DNA, 1151 bp, Homo Sapiens
cagaacagagacggcctgccggtctccacactgaattcctgcccagagatccatattgacacagcagacaaggagatagaacaaggagatgttaccgcctctgttacagctttgctggaggggccagaaaagacctgcccctcacggccgtcatgcttagagaaggatctcaccaatgatgtgagctcccttgatcctactctgccaccagttctgctttcctcctctccacctggtcctctcagctcagccaccttcagctttgagcccctaagcagtcccgatggtccagttatcatccagaaccttcgtatcactggcaccattacagcccgagagcacagtggcactggattccacccatacacactctatactgtgaagtacgagacagcccttgacggtgaaaacagcagcggcctgcagcagctggcctaccacactgtgaatcgtcgctatcgggagttcttgaatctgcagacccgtctggaggagaaaccagatctacgaaagttcatcaaaaatgtgaagggtcctaaaaagctctttccagatcttccatttggaaacatggacagtgacagagtagaagcccgtaagagcctcctagaatcattcctaaagcaactctgtgccattccagagatcgctaacagtgaggaggtgcaggagttccttgctctgaacacagatgctcgtattgcctttgtcaagaaaccatttatggtctctagaatagacaagatggtggtgagtgccattgtggacaccttgaagacagcgtttcctcgctctgaaccccagagccccacagaggagctgagtgaggccgagaccgaaagcaagccccagacagaaggcaagaaggctagcaagtccaggctgaggttctcatccagtaaaatttctccagcactaagtgtgactgaagcacaagacaagattctttattgtctccaggaaggcagtgtggagtctgagactctatccatgtctgcgatggaatcttttattgaaaaacagacaaagttactggaaatgcagccaacaaaagccccagaaaaagatcctgaacaacctcccaaaggacgtgtggacagttgcgtgtcagatgcagccgtgccagcccaagactccacgtgagactccac

SEQ ID NO: 352842 - DNA, 1270 bp, Homo Sapiens
ggaattttggttgtaattaaatttttaaaatctgctgatctctgtagaatcttagaggcttgatgatgatggtgttggtgaaaataagaaagaattgcagtaaagtcttgtctggtgacccagagatcaccatgactcgaggcacaaatcactgtggggaaacaattttttgtgatgaaaaggcagcatttgaatactcctgttagtagcagaaatatattatgaaaattaagattattgtctgattgaaacatgaaacaactcatgtctttattagtaacatcataagatagttacatttatgtgctgttagaatatgttgatttttatcaggctttccttgttttgatttatggctgttcctgatttttcatatgtggaaatatacctacctcttccgttggaaagaacatttaaaattaaataaattttaattaaaaaatcaaggagtcttctaatgtaaattttaatgttaactttcaaatccactagtattttttttgcttttatgacaaatagcatacaccaaacatttctgtgaaactatccttctctttcaatgtgtttaattttggagtaacgttttccttgtgactaagttgcaagatcttatttattaactaggtatgaagtataaacccattttggtgcaatattcttgactccttggtgctaaagattgttaaattcaatgcttgatgttacaaggtgttgctaaaacacaaaatgaataaaagtgagagtagtcagaactataacattcaatttgctatttacaaatgaagtatttcatgtaatataagtgaacaactggaaataaagtaggaaagaatttgtatcatgttttactacataggttaattttttaagggatgttgcaaagggattactagagaaagacaaaatgtgaccaaaaaaaagcatgaatatttcttaagtatctcaacaacatgtcaaagctgcgatgtgtaggatgtatgctgtttgtacaaactatttcagaatattttgtaagctataacatatttattgtgcattaaaattaaatactttttccccaaaggcatgcagtcatgagaattacagaaaatttgcaacatataaagtagtttgatctaagaggattcaacacctttgttttgttgctcagtgtgtaatgactgagatttgtaaatctttgtgaacattctgtactggttcccaagagctattcattccctgctacctgatttcagcacaataaatatacttctgctgtgggaaaaatatg

SEQ ID NO: 352843 - DNA, 1194 bp, Homo Sapiens
  misc_feature (49)..(49): n is a, c, g, or t
  misc_feature (63)..(99): n is a, c, g, or t
  misc_feature (1010)..(1010): n is a, c, g, or t
  misc_feature (1013)..(1013): n is a, c, g, or t
  misc_feature (1016)..(1018): n is a, c, g, or t
  misc_feature (1021)..(1022): n is a, c, g, or t
  misc_feature (1024)..(1025): n is a, c, g, or t
  misc_feature (1028)..(1029): n is a, c, g, or t
  misc_feature (1031)..(1036): n is a, c, g, or t
ccacgcggcacagagcgggggatgaacatctatgggcacccggagtcancgcggtggcggcgnnnnnnnnnnnnnnnnnnnnnnnnnnnnnnnnnnnnnatcaggccaaatcggccgagctcgaattcgtcgagagcggagcccagtcccaagatggcggccaccatgaagaaggcggctgcagaagatgtcaatgttactttcgaagatcaacaaaagataaacaaatttgcacggaatacaagtagaatcacagagctgaaggaagaaatagaagtaaaaaagaaacaactccaaaacctagaagatgcttgtgatgacatcatgcttgcagatgatgattgcttaatgataccttatcaaattggtgatgtcttcattagccattctcaagaagaaacgcaagaaatgttagaagaagcaaagaaaaatttgcaagaagaaattgacgccttagaatccagagtggaatcaattcagcgagtgttagcagatttgaaagttcagttgtatgcaaaattcgggagcaacataaaccttgaagctgatgaaagttaaacattttataatactttttttatttgtttaataaacttgaatattgtttaaaatgataattttccttcttcaaatgacatggaaagcaaaactttcttttttaaaaattttcatttatttaatggaaacttgcccattttcacatgtctgcttatttattttatatttttaaaagaagacagtattcacctatgtattttgcataacgattatatcaagtctaggggcttcatgtcatgttattaaaatcagttaagcaatcttttatgtttctatattatttagaatatttgttgttgcaatttttcgacataagaaaatttaacagttgtgtcatgttgtttctgtctgattttaattgctgtctaatgacggggaaagcacgacgaaaagatgtacaatcctgcatccttgcttatttcacaactaaagctttgtcatagacttctaanaanaannnccnncnnccnnannnnnncctggtcggccgcccccggcccctcgaaaagctttcataaaccatttccttgggcgcgccgggcccaggagaggaaagtggaaccgggccataactgggtccccaaaggaaacccctgggcttgggacataagggcgtggcaatccccccaccccaaa

SEQ ID NO: 352844 - DNA, 272 bp, Homo Sapiens
  misc_feature (11)..(11): n is a, c, g, or t
aagaagtaagntcaggacctttaattactgtggtaataatgtgtccagtatgtacttatcagtacatttagtctgcaatgttttaattttttaaaaagttacatgaaactaacattccaagggtcaggaaaaaaaccaattatgtatagtcataaaaattacaatttatgatgcaaataatgtaaaatgttttaaagacaaatggcaaataagatatggaccaaagtcactaatgttttacaacagtaacctttactataataaatactttt

SEQ ID NO: 352845 - DNA, 1504 bp, Homo Sapiens
  misc_feature (78)..(113): n is a, c, g, or t
  misc_feature (710)..(710): n is a, c, g, or t
  misc_feature (934)..(942): n is a, c, g, or t
aaaccttgatatcacataggccctagcctgtagagcgaacgaacgagcgcgcgagtagtgagcgaggaagcggccggnnnnnnnnnnnnnnnnnnnnnnnnnnnnnnnnnnnnagtcgacgggagcggacatatgcccgggaattcggccattacggccgggagttacactcatatcccaggatgggactcagcatgtcaacatatctcaacctgacatgcaggccattggcaacaccatcacaatggtaacgcaggatggcacgcccatcacagtccccgcccatgatgcagtcatctcctcagcaggaacgcactctgttgctatggttactgctgagggtacagaagggcaacaggttgcatattgtagctcaagacttggcagcattccatactgcctcatcagaaatggggcaccagcagcatagccatcacttagtaaccacagaaaccagacctctgaccttagtagcaacatccaatggcacccagattgcagttcagcttggagaacagccatctctggaagaagccatcagaatagcgtctagaatccaacaaggagaaacgccagggttggatgattaatcctcagaacaatggagcaataaagcagaaggagtctttcatcttctggcagcagaaaatccatgaagcccgggcccaggaaaatcagaagtttcccattcctgatacactgtacacatnttttatgcgagagtggagaacaatttattcttgacactttttgtgtatataacccttggaataaattctcagagtgattcattgtgtacaaggaagtatgaaattagggcaatacagtaaattttcatgttactcttttatcagatcacaaactcctagagtctacatgcaagactagtaaagtcttatggagtcttatgatggatttttaacttccccgtggnnnnnnnnntaaaggctgtatctaaaatatcaaaggttctatatgtcacacaatcgtaattccaaaagccattatggataataaagggtgtaaagccttcagatatttccccagttagtagagtgtctgcggtttttgttctactatatgcttgtccatttttatttgtatctcatggtttgcagactgtttgaataatttatagtttcccatccctgttaaaaaccagctcttcaagctgaaatgctaattatattggcattacattgaattatgtacaaaattataaaatttggttatttaaaattaaaaagttaaatccagtggttttgttaaagattttgcttagtattcaatttttattactgttttttaaaaataatgaatcatcaaagtttaaccacaggctggtgcccgggataacagtactgtaattggaaatggctttactctgaaaattaggttagtgggttggtgtaaattatttatttttgcttatgtacttttgttttaaagcttatttaccccaaagtttattattaattttgaatacagcaatttttaaaatgtt

SEQ ID NO: 352846 - DNA, 824 bp, Homo Sapiens
  misc_feature (366)..(378): n is a, c, g, or t
gtatataaaggattaaaaaattccaatttaatacattttggaaaagcaaatgtaaaatgacttgggcttataaaaccagcatttacaattatctgtgaatagtcaaagacaaatcatagaaccaatctgattacaaatccaaagtaattctaatgttggttacagaatcactttcccactcccccagtaaaagtccaggtgttaagttgtacacacccccatgctacacacactccttcatctccttctcagtgttttcataccccagccgcattacacacaccaggcacatcttctctttcacagagcttatcaggatggtatctccttttggcttaaaccaaccaccttgtgtttataaataannnnnnnnnnnnnagtgcctgaattcatcaacatcttctgccttcataggcagcctccccttggctccagttccagcaggacaggccttcctctgaaaggaagcctggggcagtgaggccacactagtcagcgttcggccctccctacaccaatcccagctgggctcctagttgtctagcacctttgcactcaagaaagttatattgtttttctctctcttcctcatttcttgccagtattctgccttttcataacatttatgccaacaagatatctggtcattcccagaccttcctgttttgcacaacccttcatagataaccgagtgactgcaacgctgaaaatctgttgctcttttctcttctaaacctgtatctacctcaataaaactgagtcttttatgggaaccagaagacttaagactaatgggaaccaggagtcataagccagagactcct

SEQ ID NO: 352847 - DNA, 493 bp, Homo Sapiens
  misc_feature (34)..(34): n is a, c, g, or t
cacccagtggtaacagtgcgcctgtcggggcacntggagcgctcacctggttgaattcaaagtcccagaaggccccgctggcgtgaagccggccccttacattttgcgaagtgcattatagtccttgtttttctctccctcgtgggggcaacgaccccctcccctggcagtaggggtggggtaggtgactctcgctagatccctccaaagcagaccggtggcgatgtcagcggatgtcacgagctcgttagctgcgttcggggaaggttggggcgtcagggagctctcggatcacagcagcccccgccctctcctaggcctggcccggcagagcccccagagtggaccccccagcgactggggtcttctccccactcctccctccttctggtctgatgcggcagcgcgggggctgcggggcctgtttgggacgaacagagctctcccttggtaagacttattttgttaataaatggaatacttggctatattc

SEQ ID NO: 352848 - DNA, 2299 bp, Homo Sapiens
  misc_feature (1765)..(1786): n is a, c, g, or t
  misc_feature (1969)..(1996): n is a, c, g, or t
gctcgtccgcccggcttgaggcccgcggggagcgcggcgcaattcgtcggcccgcgggggggcggcctcccggcatcttcgcggcgaccaaggactaccaggaaggggagcggctgggatggcgcgtccgcggccccgcgagtacaaagcgggcgacctggtcttcgccaagatgaagggctacccgcactggccggcccggattgatgaactcccagagggcgctgtgaagcctccagcaaacaagtatcctatcttcttttttggcacccatgaaactgcatttctaggtcccaaagacctttttccatataaggagtacaaagacaagtttggaaagtcaaacaaacggaaaggatttaacgaaggattgtgggaaatagaaaataacccaggagtaaagtttactggctaccaggcaattcagcaacagagctcttcagaaactgagggagaaggtggaaatactgcagatgcaagcagtgaggaagaaggtgatagagtagaagaagatggaaaaggcaaaagaaagaatgaaaaagcaggctcaaaacggaaaaagtcatatacttcaaagaaatcctctaaacagtcccggaaatctccaggagatgaagatgacaaagactgcaaagaagaggaaaacaaaagcagctctgagggtggagatgcgggcaacgacacaagaaacacaacttcagacttgcagaaaaccagtgaagggacctaactaccataatgaatgctgcatattaagagaaaccacaagaaggttatatgtttggttgtctaatattcttggatttgatatgaaccaacacatagtccttgttgtcattgacagaaccccagtttgtatgtacattattcatattcctctctgttgtgtttcggggggaaaagacattttagccttttttaaaagttactgatttaatttcatgttatttggttgcatgaagttgcccttaaccactaaggattatcaagatttttgcgcagacttatacatgtctaggatccttttatcaaggcagttatgatcatcgttttcctgccttgaccccaccatcatcaaacactcagttaaatataaattaacattttttagatgaccactcaacataatgctgaagaatggaatttcctctctgtgacagaacccaggaattaattcctaaatacataacgttggtatattgaagacgaaattaaaattgtccttcagttttgaggccatgtgtaaagtttaaccatattgtaaaatatctattccgtattagaaatagctagttgacagcttatacttctcaaaattcatattgttatgtacacaaactaagtttctatatgtgaagttagtgagtctttttgtgttactccaaaataaaggcaatgatttatttttttcccagtgccaatacaattttgagctaagcactcaaggtggatactttacattttaaagctggaatcagcaacagccctatgggaaaccagacaaagcattgacttttaaatgtagacttttaaaataaactgttttcttttggaactacaattagaatagttaatattcatccttaaaccattattatgtgtacattattgttgctattgtgataatagagaattttatttatttttatgccagcttatattgtgagaacacatttagtcagtttgggttttatcaatcctgttaatgcttgtccttggaacatctttcgcgtattcacggtttgtagttgaaaagtttactgtnnnnnnnnnnnnnnnnnnnnnntgtattgtttttacagaataaatttattggaatgtgtactgggagtaagatttgaggttgtaagcaaactaagttagtgtaatttggcttcatatatgtaacgtgaggtattaatgtaattcatatattaaagcaaaaattgttcacagcaagctgacaatagaatcaagtgcaggtgagggnnnnnnnnnnnnnnnnnnnnnnnnnnnnaaacactctctgggttttagattatttgaaaacactgtaggggatgatggggagatgactacatgatttgcttacacttacatatttaccagcccagtggaccctagattttgtaatttgatattatccatgcattgatttgtatcccattttcttttggttttcttgatgaggagctaataaaaacatgaggaaaatgtgaggcagaccctaaaagcctaggggcccgtttaattaatggtggatgggtgatggtgggccggcttagggggtttggaaaggcaccccgttccctttttttcc

SEQ ID NO: 352849 - DNA, 940 bp, Homo Sapiens
aaatccaaaatcttagatttctgtgccacagcaaaataaaatgatcaacaattaaagatctgtacttaaaatagtacaccatttttagtggagggagggtgcatgcctatatgatggtaagattcttttgaactctaaggacaattcctcatggaaaaaataaatttccagtgcatattataaaaatgatttgcactgtgttagcaaaataaggtgttttaggttgtattttaaagacaattctaaatcatttctctggaaagcaagaccttaaattcttctctttaatagaactgcttttatgcaaagagatggtcttaacatggactaaacagtacataacaataatgtttgttatgtaaatagtatatcacatttgcttagtagcacaattcaacagcaggctgaaagtcgtggctcctctgctcagattgagttttaagttacctaatttatgtaatcagaatctattctaggtggccgtcaacgtaaactgtgtttccctattatatccctctggagactgagaatcaaattaaatagtctttcttcaaagcagtactgtaacatgaatgtatttatctcagtcaacagaacttatatgcccactgtatgtggagcttatttcaatgctaatttggcttagttagcagacctagaatctgaccaggtgagacctagaacaaaaatagctggggtgaaatggataaaagaagtagaggtatatgtcaaggccagacacctatgaggaaggaagagttttcaaagaatatgaggaacatagtgctgagagtgtggctgccttcagcaccgtaccacctatctagagaaaatatttccccatgtgggaaggtcctgtcttgcattcaatcccaccctttttctggcctgcttccttcctccaaagggccttcaaacctcctaactggcttccactccc

SEQ ID NO: 352850 - DNA, 305 bp, Homo Sapiens
aatggtgaagacattaagttctgtcatctagttaatagtaatataactatgtcaatgtcctggttttaatattacattacagttagttatatgaggtgtcacatttggaggaagctgtgtgaaggctacattgaattctgtactatttttgtaacttcctgcaggtttctattccaaattaaagttaaaacatagttaatgggcataaagcttcacactagtaacaaaaatggcttaactttattacatttcaacaatacataactgttttaactctaatttctaaataaaatttacaaaagcag

SEQ ID NO: 352851 - DNA, 423 bp, Homo Sapiens
  misc_feature (236)..(236): n is a, c, g, or t
  misc_feature (272)..(272): n is a, c, g, or t
atattagatgcatggtgtgctataaaaatctgggccttcaaacctcccccaaggatgatagggttggggaggataagaggatagtaaatacgtgcaatgccaatttgtgaacctatagaatgttgccaagtatcaatgtttggttacttcagttgacatatttatttgcatgaaagagtgtaggagatgtttaatatacacttaaatacattcactgcagaaattaagtagaggtntatttttgcatgataaaatataactgcaaagcaacnttttacaccgtattctttggaagattaaatctatctgatccaatattatcttaaaatagagaaattatctccaggagtctgttttaccacccaaaaaaaatgttacatttgctgattcattatattttaaataaaacagccaactattcat

SEQ ID NO: 352852 - DNA, 789 bp, Homo Sapiens
  misc_feature (416)..(424): n is a, c, g, or t
gtcaggatggtctcagatcttataacaagaaggcaatgaagcaaaaggctccaaaggtttgagaaaaagtgccaggaattttatactttgccaaagttgtcttaaaatacaaaggctatagatgttctcaagtttgtaagaacttaaaagtacaaatcatgagtctttgggaaaaaaccgcccaataatgaaattcaactaaagaagaaatgaatcaaattaaggacttaggaacaaagaatcagtaaaaggagtgttagtaaacacttcagaaactttaaaaataatgggcaatgattataaagtcaaatattatgaacactgtctatatagaaataacaagtagagtgtgctggtttcatctttcatagcaggaatcacgtacagtctctaattaaaacatacatgaagctagnnnnnnnnntagcctctttattgttttccgtaattgtccttaattttaggagaaatcttacaagactagattctcttgtggggaaaaaagtatttaaattgagcattttttcagtttcacacttgttttcctttttgttaatttgctatatttgttaaatatagcatatgagcccacttttgtaaaactatttggatatatgtgcctgtatgattaagagagatggttggaatgaatgaagttcaccagatagtacttctttctggctgatgaacttttgaatgatttttaaactttgtacttttatataatgcttattttctttttacaataaaacatgttaatttctacaaggaaaaaaacatgtttattgt

SEQ ID NO: 352853 - DNA, 908 bp, Homo Sapiens
  misc_feature (54)..(62): n is a, c, g, or t
cccaataataaaccttggatgttttaaaggcacaccctttatttttttaaattnnnnnnnnnttatttggtaaacctaaaattcatttgggccttacaatttgccaaccaaattcccatgaatattcccaatgagtcacggcccccaaacggatggaaagagggggctatagcgtgcaggtttgaaatcaaaagtctttaagagcgcggaagtgcatgccacctttgggtccaagaattgggcccgaccctttggttcacttcaagctttgtggctcctcttaatcttgggtcgagatccctttggagccacagcgaggaaccctgtggtcctcaggcaggtgtaccttgagtcagccaggagccctcttttcctgtgtcaaagcctgccctcgggctctgctcacctctggtgaccctccaagatgcccctgccctcagtttcccctcatgatctggcctctgcccccttctctagccacagcctctagtacactttagcaataccaccagactagttagagttccccaatcaccaagcaagacatgcagtttcatgcctctgtgccttcgctcatgctgtttcttccgactggaatgccttcccctgctcctcctgccttgtctgcctggcaagttcatctctcacgatcccctcaaaggccccctcctccaggaaggcaacccctgtgcccctcccctccaggctacctctgcactttgtcaatgcttctcttgtggcacttatcacactgtattttacttgtttacatgtttgtctccccttctagactgtgaatccttaagggcatggactgtatcttatgcatctctgtatttctgcgcctagcacggtgcctagcacacagtaggcgctcaataaatgttgaatgaatgaatgatttaatc

SEQ ID NO: 352854 - DNA, 1799 bp, Homo Sapiens
  misc_feature (566)..(566): n is a, c, g, or t
  misc_feature (1728)..(1728): n is a, c, g, or t
cgggattgggatctgaacatggcggcggtggtagctgctacggcgctgaaggcccggggggcgagaaatgcccgcgtcctccgggggattctcgcaggagccacagctaacaaggcttctcataacaggacccgggccctgcaaagccacagctccccagagggcaaggaggaacctgaacccctatccccggagctggaatacattcccagaaagaggggcaagaaccccatgaaagctgtgggactggcctggtacagcctgtacacccgcacctggctcgggtacctcttctaccgacagcagctgcgcagggctcggaatcgctaccctaaaggccactcgaaaacccagccccgcctcttcaatggagtgaaggtgcttcccatccctgtcctctcggacaactacagctacctcatcatcgacacccaggcccagctggctggtggctgtggacccttcagaaccctcgggctgtgcaggcttcccattgaaaaggaaggggtcaccttggtcgccattctgtgtactcacaagcactgggaccacagtggagggaaccnggacctcagccggcggcaccgggactgtcgggtgtacgggagccctcaggacggcatcccctacctcacccatcccctgtgtcatcaagatgtggtcagcgtgggacggcttcagatccgggccctggctacacctggcccacacaaggccatctggtctacctactggatggggagccctacaagggtccctcctgcctcttctcaggggacctgctcttcctctctggctgtgggcggacctttgagggcaatgcagagaccatgctgagctcactggacactgtgctggggctaggggatgacacccttctgtggcctggtcatgagtatgcagaggagaacctgggctttgcaggtgtggtggagcccgagaacctggcccgggagaggaagatgcagtgggtgcagcggcagcggctggagcgcaagggcacgtgcccatctaccctgggagaggagcgctcctacaacccgttcctgagaacccactgcctggcgctacaggaggctctggggccggggccgggccccactggggatgatgactactcccgggcccagctcctggaagagctccgccggctgaaggatatgcacaagagcaagtgatgcccccagcgcccccagcccagcccactccccgcatggggaggccgccaccaccaacacctcatcatccttctcatcgctaacaccaccacctccatcggcacccaagcgggcatcatccccccacactgctcaggggaggggagggatcaggcgatgagactgtgaggccaaaagaagcgggcctgttggaggctgggaaccccgcagcgcgaggctgcctcatcaacggcaagaggaaaggaggggtctcgggacatctccagaccctaccaactgggagggtcccctcctccttccctactcctgggacggcagcaaggacatgggggctgctgttagcttctccgtcaggaggcctcatctcactgtagccctggaacccagggtccatcttgcccttcccccatccatggttgggaaagaagctcagcccctcacagtggcctcaagtgtgatgccttacaaaagcaccactcagatgggcagctggactctggtgtcctgagactctgccctcttcccacagcctccctgccccacccatccntgcaaagccattttttcagacagagccatttcctaagaacattgaaagggttgggaatgttggctgggcca

SEQ ID NO: 352855 - DNA, 1009 bp, Homo Sapiens
  misc_feature (49)..(85): n is a, c, g, or t
  misc_feature (856)..(857): n is a, c, g, or t
tgtatagactcactatagggcgaatcggagctgcacgcggtggcggcgnnnnnnnnnnnnnnnnnnnnnnnnnnnnnnnnnnnnnatcaggccaaatcggccgagctcgaattcgtcgagagcgtggaagcgggggtgggatctgaacatggcggcggtggtagctgctacggcgctgaagggccggggggcgagaaatgcccgcgtcctccgggggattctcgcaggagccacagctaacaaggcttctcataacaggacccgggccctgcaaagccacagctccccagagggcaaggaggaacctgaacccctatccccggagctggaatacattcccagaaagaggggcaagaaccccatgaaagctgtgggactggcctgggccatcggcttcccttgtggtatcctcctcttcatcctcaccaagcgggaagtggacaaggaccgtgtgaagcagatgaaggctcggcagaacatgcggttgtccaacacgggcgagtatgagagccagaggttcagggcttcctcccagagtgccccgtcccctgatgttgggtctggggtgcagacctgaggagcgctgcgaccctcctaggctattgactgttaagtcctcaggtttggcccagattccagttcgtgcctctgaggtccaccagagggcgcatgaagcccaggctgttgccaaaccctaccctgccccacaccaaggagccagccaaaggcaaataaagttattgagtgtttagtagaaagggaaaaaatacattcccaatatcccccgttacatactcccgcccatactccacgctatcaccgcgtgggaccccatatcccatccagcgttattttnngtcttgtggggcgcgccccgggcccctggaaagactttttcaaaaaccattctgtgtgggggcccggggccccccggagggaaaggaacccgggggccattacgggtttcccaaggagaaccccgggccctgaccaaagggggtgggattcc

SEQ ID NO: 352856 - DNA, 894 bp, Homo Sapiens
  misc_feature (52)..(87): n is a, c, g, or t
  misc_feature (674)..(726): n is a, c, g, or t
cggactgatagatcactatagggcgaatcggagctcatcgcggtggcggcgnnnnnnnnnnnnnnnnnnnnnnnnnnnnnnnnnnnnatcaggccaaatcggccgagctcgaattcgtcgagagcgggataatatgcattcctagttttcagccaagtcggggatgttagtgattgtaccagcccaaagcacttggataatcagggcccttcttccttttataatcaatcatcaacatcagaaaaagctacttgttttatttatattcccttccaaatccgctctggaacatgcagtaactgcaccaaacttattttagtaacaaatatcattggcaactttggaatatatttgatattccattaggatttttctaaaaggggaaataaactatatatatatatgtatcttacccccaattcttccaacagaatttctataggaagccatggatgatggcataagtttgccacatattacatgattttaaataatcctcaaaatacccaaggaactcttaaagagttttggtatgagtatactactttggtttaattttagcttcatggatgttctgcatggaaggatttttgttttccacattttcccattgctagcagagtgaaatccaagagaccaaacatttgcaagcattgtatttgagcacttttgtnnnnnnnnnnnnnnnnnnnnnnnnnnnnnnnnnnnnnnnnnnnnnnnnnnnnngtatctagaaggctacctcagaatgagactctctaacctacatcagaaccagagaagaatgtgcactatgtgggtctgttatcattatctctttacgtggtatcttttcggagattatccaagtgccagattactcagtgctatacattgcttaagttaaacaaaggg

SEQ ID NO: 352857 - DNA, 1602 bp, Homo Sapiens
  misc_feature (974)..(986): n is a, c, g, or t
ttttttaagctttcaaagacaggtttatttatatataagtgcatgaaattgaatacagaaactttattaaaatactgtatattacaaatttttaatccaataaattctgtgtaatgacatttaagtgctggattcactttttaacagttgtcttgtgtgtatcagtaaagagttcaccctgtatattacaaagaggagagccacatgtggacctcagaaatggtcctgtgattagacactgaatgatagtaattgtgcatcttttccttaaagcaatgaattggaacctagatcttatctttgtagacctactttctataattaaaaataacttgcatatgtttattgctgccctttgaagaaaatgagaatggtgaaaaataatttaaaataaagatcaacatctctaggctaaactgatgcttactgcaattaaaattacttaaaattcactgcaaaatttgtgttctccaggaaattatgctatatacataatgagatttgtacatgaattgggaaataaaaaattgcttatataaaattaaaaatcaataatatacaatatttacagcttgttaggtattatatataaacatagtttttaaaataatccttcaaaattaaactgttttatgtaaacatgcagtacacatactcatatagtttatagtcttaacagaaggggaaattgtgttcacataacacagggtacttcatcaaatatgcctttgtttttgtgtattacccctccaacatttattctcctgtcttttaagcttcacagtacatttagtatttctatagttaaaaataaatccctgatggtaaacatatttctaaaggttaaagtgtgtgccctgtactacagtataaaactaacactgttcactagaatctctagtttacacaaaactaaattttaaagtctcacacttaattttcttaactacatttttttccatttcatacttggnnnnnnnnnnnnntaggaggaataccacatcatgaaaatatagtgaaagtagctgtcatctgtcacagtcaatgactaagtaactgatttacattgaaccatatgaagttagtagctactattcgttaggctttctaaactttgaattcccagtcacaggtgatgtgtatctagccaactcactggtgccaatcctgaatcttgctaaatccattttgcacaagtatcttaactttcaaggcactaaggcttcatttagcttttaaaatctgcctgtgatttaccaaaagattcatcagtggtctgagagttaacacaatttgaaagtgagacttttaatacttgtcaggtaaactatatttttgctatttaaataaagacattttagctagttaactttcaagataaagttgattccctcatctcagaataactagagtcaggggctaatatttttggtagaatcctatgaattttggatggctaaaacaaaaaataccgtgaatttcctatttgttcatctaaatgcgtgcagctcaagtctgaatgtgtgtattggtgagagggccaaatctttcaaaaaaattcttccattgtaaatgcatccaacatcaaaaacattaagaaag

SEQ ID NO: 352858 - DNA, 470 bp, Homo Sapiens
ctgaaaatatcgtcctgaaagtgtgctcgaagatcctcgacgaagtgaccaccaccgacgaactgattccttccggtgaaacctcttcttatcgttcaaatccgattggtctggcggagtttaccctgtctcgccgcgatcccggttatgttagcagaagtaaagcgactgctgagctggaaaatcagcgtctggcggggaatgtcagcgagctgacagaggtgtttgcgcgcattaagcagattgctggtcaggagcatattgatccgctgcaaactgaaattggcagcatggtctatgcggtgaaaccaggcgatggttctgcgcgtgaacaggcggcgagctgccagcgtgtgattggcggtctggcgaatattgccgaggagtacgcgactaaacgctatcgttctaacgtcatcaactgggggatgttaccgctgcaaatggcggaagtaccaacctttgaagtg

SEQ ID NO: 352859 - DNA, 129 bp, Homo Sapiens
aatttgaggtagtttgtttgtatactgtttctccaaacacttaatatttcttacatcaaagcaacaaaattgtgttcagtgctgtacatttggtgtatggtaggaaataaaaattgataacgagttttg

SEQ ID NO: 352860 - DNA, 561 bp, Homo Sapiens
agcacatgacctggcaaagcatcccaaccaatgaaataatagaaattccataaattaagcccttgaccaacttaacatttctgtggtgtagtgcattaaaataacggatacactgaattctttcactttggtgcataaagtgaacgttgaagtcagcagcactcagtgaagaatgcctagtggcctcttgaaaacacatgtgctgggacctccagttaaaggacaaccacaagtttattccatccatgtgaaataaaactcacatcaacattttaacttagttgtgtgtagatatatacaagtgtgagaaatttgacagctgagtcaaatgtacaacttaagaaaaaaaatattaccaaactacttgtaagaaaactatcttccctgtatcataaggtactgaacatctgagtccttgcaggaaacgcagcctggcgtggcccttccttgagtgtccacctcctttgataatccttggttaggctgtggctagagtcatgatatctttgctattaaaatattacattaacaaaaacctttaaaaccaaaaaaagaacgctc

SEQ ID NO: 352861 - DNA, 447 bp, Homo Sapiens
gcctggtgtctaacgttcctccagtttctggtgctctgatgcattgcttttcgggcttgtcttactacagcagctttcttcggtcctcagtcatttaccacttgtcatatgtcctttctagtttccagggatattcttttttatatttatggctttatgccatttatctcagttgtcatttggcgtttcaagaaggagaggtggtagtgtttaagtggaattaactacttgtgtttctgatgtggtcttttatatttcttacagggttttgttttaccaagtactagtcttcagtctatcctgtttacttgattttttcccactcaactcacaaacatttttgaatcatctcatgaattctgctttccatttacatttttgcccttttgtcttttcctcttcgctgttaaacttcctgaaaaaataaaactagttgattcacttctt

SEQ ID NO: 352862 - DNA, 758 bp, Homo Sapiens
  misc_feature (514)..(557): n is a, c, g, or t
cattaacatagatttacactttattttaaatttgcatcctgagataataaaattttatctgacaagtgaacaatgacagaagcagcagtgaaagtttcggagaggcaggtatccttcattttggcacagctgtatatagattgagtttttccagggaagtcattcctggactcaagggagaaaaaatgaattcattccacaggctatgtaacaatgcaagatgcatgaaagttcttagtttggatgaacatatccgctattattcttttctggtaaagctgtcccaacaggaatcctctgacaaaaagttgaaatcctaggcttctccaccagatatttttatcaatgcccactctctagttacctggatatcctgttcttgcagccagattcatatttgtatgtggttagtccaaggagggcaaattcgctcgtagattatatactttcaaacacttgttacttgtttcaaagtccaggcattaaaacaattttacactatttgcgtactagnnnnnnnnnnnnnnnnnnnnnnnnnnnnnnnnnnnnnnnnnnnnagaacatttgagaaattattgccttgattcatcatgttgaatttatacacagaactactttaagagtcagaaattgatatttagtccaatgctagaatatgacattataacattttccacatttgtaatcctatatgtgtgtgtatgtatgagcaacatgtacacacctaaataaattaggccagtgatattctaaaacag

SEQ ID NO: 352863 - DNA, 280 bp, Homo Sapiens
  misc_feature (216)..(216): n is a, c, g, or t
caccaaatatataatttattatgttgcttatgcattgaacactgtaactccattattccagcaactaaaaaccccatccaatcacttggttcatctcactgttacaatctctagggggggttgccctttgcatcaaattcaaatactgttcctatagcacaggaaaactataaacacaatatataatcgtatccattcacatccagtatacagganggccaggggacacaggggaatgacatggtcaaattgctgaaaaaataactaccaacccagattt

SEQ ID NO: 352864 - DNA, 979 bp, Homo Sapiens
cttctagatgaagttaaacgttcgttttcaccttacgatgggaacaactgtagtgcaggcggctctgctctatttgccactcttggccctcttgctattaagggaaaggctttgaagagcacagcactgacagggctgtaaagatggaaggagctggtatttttaccatgcgtagattcccaagagaacttgtactaaaaagcagaaagttacaaggaagcagaattaggccaacatttccagcaattaaaacaatgatgggaaactccaatccatgaggaggctggtcagtcacctcaaggatagtggcctaaagaagtctgaagtggctgatgtccataacttctgagtctgtttccaaaagaaagactcttgctaatgctgttaccagagagtagagatttgaccagcctctccctaaaatgtaagcttctcaacaacagtacaggaagaagtgcaagagtagactagaacctttaaggaatttggggctggaacggagctatgttgcatctgttgttatacaggtagattataagttctacatgcaccagccaaaacttaggacaggatgtccccaaattaagatactacagattaccaaatcagaaataaccagctggatttaggccagctcacatttatttggaaattaccctccctgattaacaggcttctgagttgtacgtggaggactaatgagacttgtacaagacaccacggggcttggggtccaggtcccagttggatatcggaacagacacagataagtgtgtttcctcattaaggtggtgagagtgtgccttttggcattcagaaaagggtttagcccccctaagagttggaaataaagattcccaactggaaatgttgcagaatccctacaagtgtctcaataaaagccattttaaaagaatattgttgctactgtttgcttttcaaataatctggagatcgttggctatggcaacgtgctgcc

SEQ ID NO: 352865 - DNA, 1207 bp, Homo Sapiens
  misc_feature (33)..(34): n is a, c, g, or t
  misc_feature (58)..(58): n is a, c, g, or t
  misc_feature (65)..(65): n is a, c, g, or t
  misc_feature (75)..(75): n is a, c, g, or t
  misc_feature (124)..(124): n is a, c, g, or t
  misc_feature (160)..(161): n is a, c, g, or t
  misc_feature (247)..(247): n is a, c, g, or t
  misc_feature (510)..(520): n is a, c, g, or t
aatgtgaaactccagacccctaaccataaatcnnacactcttccttctaatagtaagncaatagnagacattatnttaaatattcagatgaatattctatagccagatgtatttatagtattanaaagcttaagaaaccatttcaatcaacacaaatatnntcagaagtatatgtgtatcactcatcctgaattttcgagcaacaagcagtttgtttcaagttcattaaaatcttgtggcagattanaatcagattctattattacccattgagttgttttgaaaggtgtttcatgaaagcacaaacaaaacagtatttaaaccaaatgaccatctaagagcacaactttgtgaaaaacgtaaatcttcataaaccaagtaaaatgttttcgattacaccatttccaatttaccagctttattcatattcagtacactttaccactcggcaactacaaaggccaaagtattactaaaataaaactaaacatttaattaaacttccacttnnnnnnnnnnncccaaactgagaaatttttaagtgttacaaattttattaaaaattaacatttcaagaggtcatacgtatacaaatcaaactgcaaaaaattccaggcataaaaactattatctgggttagtgtgccatctttcttctccaaatgtcaaaatgtccacaaaaaaagtctttagaaagtcaaatccactgtccatttgtgttgggtaagaaacctatgtcttcattcactgcatggaatccatgttaaaagaaccctgtcttggttgtatattatcacaggactcttgtattaatccatttttcctcaattccccatagtagactgccatcttgatttctcagtggtagggtccatttgaaactcttcaagctgactgggtgtaaatgtttccaccaatgtctacttcattgtatggggcctttagaggattcagtttgaggttcatatttttgctatataaaatactgactttcccaaagatttcctttatcctctaggataaaactccaacgtctcagtcttcaaaatggcatacctcaaataaaagaactcgattatttgttcagaaccaacagcaaccaaattaattttaatctcttaagtcacctttaaaaaaaagaagaaagatgatattaatgttttgattttcaagcatttcttggccaacgattcagtgtgatgaaacaa

SEQ ID NO: 352866 - DNA, 898 bp, Homo Sapiens
ccgtctgcttccgccccccaatcgtccctacaggtcatacgaagcgaggcctgggtggcgaattcggcacgaggatggccggagaggcagcagcaccccgagctgtcaggcgttccgccgcggccgcgaggcccgccggccggcggggagctacgcccggacggccagcaggcccgcgggagtggggctgccgcggctgaggcgaggcgggccgcgcgcgtcggcgtcacagcccgcggcagaggcgcccagggcggccgggcccacgacgccgaaagcgccgctgcggttgccgcctcggaggctcccccgggccccggcggctggacccggcgcgggcgggaggctcgggcgggcggtccggcccgggactcgggtttgggcgaccaggaggtgccggtggccgcgctcggacccggtgacttaagagattaaaattaatttggttgctgttggttctgaacaaataatgagttcttttatttgaggtatgccattttgaagactgagacgttggagttttatcctagaggataaaggaaatctttgggaaagtcagtattttatatagcaaaaatatgaacctcaaactgaatcctctaaaggccccatacaatgaagtagacattggtggaaacatttacacccagtcagcttgaaaagtttcaaatggacccctaccactgagaaatcaagatggcagtctactatggggaattgaggaaaaatggattactaccagagtcctgtgataatataccacccagaccgggctctttttacctgggattccatgccccgaaatgaagacctaggttttcttaccccaacacaattggaccgggggatttgaactttcctaagaacttttttttgggccacctttttgacattttgg

SEQ ID NO: 352867 - DNA, 408 bp, Homo Sapiens
tgggtgtaaatgtttccaccaatgtctacttcattgtatggggcctttagaggattcagtttgaggttcatatttttgctatataaaatactgactttcccaaagatttcctttatcctctaggataaaactccaacgtctcagtcttcaaaatggcatacctcaaataaaagaactcattatttgttcagaaccaacagcaaccaaattaattttaatctcttaagtcaccttcgcatgtatcactgcagccgtttcaaaatcggctttgaaagagttaaaagccaacacccaataggagggaaaaaaacaagttttatttttgttgaaacgtagtcagggttccattgttcttttaaattcgatctgagatgcgtcccacctcaccgggattccatttgggtggac

SEQ ID NO: 352868 - DNA, 643 bp, Homo Sapiens
gagacatcctctccatgggatgatgacagcggccgcctcatcagctggagcggctcccaaaagaccctgcgcagcccccgcctggacctgactggcagcagcgggcacagcctccaaccccagccccgagatgagctctaggtccaggtgatgactgcaaagcagtgtccaggagcaggccactactgcccagagagcagaggaggaggttgttggcagggactgcagatcctgtcagacctggccaccaccttgggcatggccactctgccctctggacctgtctttcatcgggagaaaccactcagagatggatcccattccctaaaggtctcacagcaaaggagcaggactcccaggcccctgtaccctgcctggcctgattcagggccttgtggcccccagcttctgtttcaagctgggcagaccccaggatcccttccctccctaaggactcagctgaggggcccctctgcccccttctacctccacctcagcaccctcccccagcttgatgtttgggtctccccagcaccctcctccctggccggtgcaaagtacagggaggtaaagcaggacccttgcagacatgttgcccagcacacagtaggccctcaataaaagccatttgcactttaaatat

SEQ ID NO: 352869 - DNA, 2031 bp, Homo Sapiens
  misc_feature (175)..(175): n is a, c, g, or t
  misc_feature (372)..(410): n is a, c, g, or t
  misc_feature (961)..(987): n is a, c, g, or t
cttccactctggtagtatgtccacaaaaaaagatggtttttctgtcgtgttttaataagctgttttgttggtttctttgtgataaaatgagacagtgccccaccatcgtctgcccctcctttaaatactttttctcctcactcactgggcctctctccattaatttcctcttagnctgtttccaaccacaataattggagggggccccatcctggtgaccaccacccgctcttattagaatcgtccttgtgccactttcccccccaccgtgattaaatctatttatgaccccatctggaggtgtaaagaccctttggtgttgtataaatacacaatgacctttgttaaagtatttccccctgttcccgtcgnnnnnnnnnnnnnnnnnnnnnnnnnnnnnnnnnnnnnnngttcatggggtacctcttaaatgggtaattcctcttctaaggcctttgaattttgaaactgtgttgttgggtgcgtcaaaaaaattacaggggggtttcttaagaaatgacatcacacagtgcctctaataacggggggaatacacagacttttttgtttttgttctccagaagaaaaagggggatctctgtccaatgcgcacccctaccggtggtactaatgctcggagccccccccaaccctccaacttcttgccaatatcgccgaagttctccagctcccccatgttgctgaattaaaggcctccaaattatttcaccaagtcttgtctcccccgtgttttgccactcagcggttctcttctaaagcttcttgagaatcacagggttttattgagacgaccacgttaaccaaaggcttctattatatagagaaaattcttgagttcccctaactcggttaacaacctatgagttcttcttggaaagaggggttttctcctagtagacaccacgccgtagggcccttacaaataggtggtgtcttaaannnnnnnnnnnnnnnnnnnnnnnnnnngctgcaccaaatttaagaacgccctttcaggcaagcagtggtctctagctgttaaaacatttccttagtggatcacaatagcttctaaaactgcctttctagtaaaggccatcagagaggtaatactaaactgtgcatttgccaaataagaatatgaattgtataaaagctcatattccaatcctagatcaaatggcaaaagttctacaaagttggtttccatgtttgtataaaagctccgactgattttatgtattttgctatgaaattacctttgggtcttataatcagtatacctctactcaggaatgtgcaaatgattttatacagcacgacgctagtaccgctctgtatgacagtaagggaaaccgatcagcttcttttctaaatggaaagaaaatatccctagtcagaaataaactgacaaatttacattctcctctcttaaaaaagtaaataaaataacattattcaaaacgtgaattagctatagacatacaatacaattacatagatacatatcaatacagcacattcaatctgccaaaaaattaatgattacaaagccagtatggatgctgcaatatcaagagagatgtatgtacaatgattagagcatttgtaattgcactatacctacaggcagtctgtttgttaaattacaggtactttctgagcaagggaaataaaaagtaagctgtgttgtttgaggctgggagaatcaaggatgagaacatctcattactgttgggcggctttggtactcatttaacaggccgtgatttttctccctccccctttgttgttccaaaagagtgatttatatggaagtttacactagtgccaaataccactgtagttaaaatgagaccagtatcatggcctaattctaacgtcccagcagctttgaacaatcatgatttattttcttaaatcaaatttcaactcaagctgcttgacagaagcttgtcaatacatgtgctgtattttttttgcatttgttgaaaaattgcacatatagaattccaaacatttctcctggcc

SEQ ID NO: 352870 - DNA, 484 bp, Homo Sapiens
  misc_feature (14)..(14): n is a, c, g, or t
  misc_feature (73)..(73): n is a, c, g, or t
  misc_feature (107)..(107): n is a, c, g, or t
aaaatcacggcccngtttaaatgagtacccaaagccgcccccaacagtaatgagatgatccccatcccttgantactccccagccctcaaacaacacagcctaactntttttttcccctgcctcagaaagtaccctgtaatttaacaaacagactgccctgtaggtatagtgccaattacaaatgcctcctaatcattgtacatacatctctcttgatattgcagcatcccatactggctttgtaatcattaattttttggcagattgaatgtgctgtattgatatgtatctatgtaattgtattgtatgtctatagctaattcacgttttgaataatgttattttatttacttttttaagagaggagaatgtaaatttgtcagtttatttctgactagggatattttctttccatttagaaaagaaaatatccctagtcagaaataaactgacaaatttacattctcctgcttcttaaaaaaa

SEQ ID NO: 352871 - DNA, 854 bp, Homo Sapiens
ttcagaaatgccacagaagcaagcttcaacaactgtttgcctgagacctgttacaaatcatgctaagaatgacccatattaaaaatagttatggtgaagccacctcccgccccatcccatctcctccagcaaggcagggtgcgggtgcctacggaggctgctgcctgtccacaaaacagagaaacccctcaaaatttgtctggaaaaatgatgagatttactctttagaagaatatcagtataaggatttaacaaacgtggccagaccagtggtaatgcaaggttatctaaagtagctaagtgaacttctattacagcacaaaacctatacaagataatgcaaaaagaaaagaagtaacttggctccacataatcagctattggtttaccttatgagatactgatatttacgacctttaagcttcttgaatttgtgaacaaataatacacagatcaggataaatgtattgacttactaccatctttataaaaatcgaatatacacacaaacacatcaacaactgtggaactgtatccattaaactttgataagacaacacaaagaactaatagctaagatgtggctgagttgaaagcacttccaatagtattttaattttaaaaggtccatatttacatggtatgctaaatgctcttgcatctcattttaaatgcatgatgaactcaagaacaaagataatggttgcagcagatcttccacgagggtttggctggtgtgggctgacttcacgtgagcagcataccaaacacctaagtaccattcctttctcattctgcttctttccttttctggagcttccttcaaggaaactaaaccttcattactgggattg

SEQ ID NO: 352872 - DNA, 784 bp, Homo Sapiens
  misc_feature (739)..(739): n is a, c, g, or t
gatagtatctccttgccacacaatatgcagaagttgacaacctgtgaaaaccaaggtaactaatatgtatgtgcctagtctgtgtggcgcttggtaacaaagtgctgtacatattatgtataaaatgtgtattggttagcatttagtactaagaaattctgagtttaaaataagtgatttttttcaaagtagcgatatctatatctgtgtttatctaaaaatactggcttgaatagaaaacattctcagatgattcaagattgagtaaaaatgagaatcccatacattccattattaaattctgccctattcccaattgttagcatctggctgatattaaggtctttgattgtcacaatattctcaataaatgagacattctgaactgccctggcgatattttcaaaaagagcaattaaaatgtgtaatccctctaatacagctgatagaactgttgtgttaaagcaagtctggaaatttgcatgatagtgtggaaaccaatggaggtccaaaatattaatcatatctaaaatatcagaaaatatcaatactagtcttctttatgcatatttttgactttttaagagggcttatgaattcaatgtttcttctgaggcaatccttttaatgtaaatactaaatacttgcatgtcttttgacaaaggctaaactacaatctattaatatgcacatttttgataaaatataaagtaccctaattaaagaaattgtggtaganggtgtatgtcctgaatactatacctgtttaacaataccaaatgtt

SEQ ID NO: 352873 - DNA, 433 bp, Homo Sapiens
gtctaaatcgagcttttctactacatgaaactgttggaaactgatctcattttataagaaatgattttcccctcaaggaggcgtctgtaattccagaacagtccagacatcagctgtacctcatgctcagtagtttttatttgagtttcttttgtgagttaactatgggagatttaacctcttttgccaaagagggaagtgtgtgtgtttttttaatagaaaatatggaccaaaaatttttttccctgaagaatgtattataaccctatttgtgtggttattacatcctgtgaaatgtatatatgttaaaataatgggggtgctggaaggtcatggcagactagctgctggttagtgtggaggggaagtggtttactttgtagagtttacatggttttatgcgcacactaattgtaataaactatgccaaacc

SEQ ID NO: 352874 - DNA, 445 bp, Homo Sapiens
  misc_feature (47)..(47): n is a, c, g, or t
  misc_feature (85)..(85): n is a, c, g, or t
aactccattgcaattacttatcttcctcttctatctctgtatacgcnggggcatagaatgctcgtatacatctctttaacaaccnacaaaccttaagccatgtagatgaagttagtgcatcaacgggatacagttccatattgccttaaacctccttgttttagacacactaacatttataccaaattgcagattattctgcagagagggaattgcatgtttgtgttgtatatttagtatgaacttttttcagaatataatatttcttagttatcaaaagtagttggaaaacatttgcaagactatgaacatagaattgctgcttttatattttaactgcagattgtgaatttcactgccttatattatttatttctgaaacaaaagaggcatttttcaataccactactacctcaatcccacttcctacccacacattcctgtt

SEQ ID NO: 352875 - DNA, 954 bp, Homo Sapiens
  misc_feature (3)..(3): n is a, c, g, or t
  misc_feature (10)..(10): n is a, c, g, or t
  misc_feature (15)..(15): n is a, c, g, or t
  misc_feature (19)..(19): n is a, c, g, or t
  misc_feature (23)..(23): n is a, c, g, or t
  misc_feature (27)..(27): n is a, c, g, or t
  misc_feature (29)..(29): n is a, c, g, or t
  misc_feature (37)..(37): n is a, c, g, or t
  misc_feature (43)..(43): n is a, c, g, or t
  misc_feature (46)..(46): n is a, c, g, or t
  misc_feature (58)..(59): n is a, c, g, or t
  misc_feature (75)..(75): n is a, c, g, or t
  misc_feature (79)..(79): n is a, c, g, or t
  misc_feature (282)..(282): n is a, c, g, or t
  misc_feature (284)..(284): n is a, c, g, or t
  misc_feature (286)..(286): n is a, c, g, or t
  misc_feature (292)..(292): n is a, c, g, or t
  misc_feature (294)..(294): n is a, c, g, or t
  misc_feature (296)..(296): n is a, c, g, or t
  misc_feature (298)..(298): n is a, c, g, or t
  misc_feature (304)..(304): n is a, c, g, or t
  misc_feature (306)..(306): n is a, c, g, or t
canttatcancccancctnaccngcantnaaacatcntccacnatnactcctataaanntcccctgtctattttncatntaccgtcattgccacatctgatagctcctattcacctgctaagtcacttccctatcaacccactgtcatctccattaccccgtccaacccctgcctaccgaacacactcattcctccactcacccattcacgcacacctattcattcacttcctgcaccatccactcatccaatcgggtgggcgatgacaggaaatagaaatntntntatatntncntncatgtntncactttacacacatgagtgcaggagggcagacacaacactcagttttgtattaagagccaatgaagaaggaagagggattacaacaggtgcagggttgtgggagccgagacgagattagttttcctgttaagtggctcggagagaacagacttcttgcagatgtcgctggaggatgagaagtgtgacgggagcctctgcgaagaggcattcctggcagagggtgccgcaaatacaggcgcacagaggtgtgcgatggctccgctgtgactggggactgccgactgtgactggggctttggggaagggctctggctctactggctgtgtgagcgagctgctggatacttcggagaatggggtgtgagccagggaggtgtggaagtcacctgctgccccgggacacccagatgatgccctgcccacctcccctgcagacaccaatgtgctccgctacatccagctgactcagctgaagatgaatcgttgcagcctccagcgggaagacagtggggctgggtcccagactcgggatgtaattggctgaggccaatccagggggacctctctatccctcgccctcccacctcaccatgtaacttcccccgactcatgtgtttgttggtaaaacacttgtcactggtgatcat

SEQ ID NO: 352876 - DNA, 1661 bp, Homo Sapiens
  misc_feature (40)..(40): n is a, c, g, or t
  misc_feature (1070)..(1103): n is a, c, g, or t
  misc_feature (1578)..(1614): n is a, c, g, or t
ggagaaaggtagagcataaacaggagggaaagaaaatagnagaaatggccatttagggtaatacgagaaagaccgggtaaatatgaccaagagacacaatgggggcaaggatgattgacatggaggttaaaagggcagggtaaaagtcatagcaaggagagggcgtctagaggaggagggtggtgggcccaccccctacacaataaagaaggtcccccggagaagagagggctatctataatgtcgcactaattttactagacgtgttccccacagctacaggccattttcccgagccttgggcccaggcactcaccttttgcccccgccccagccacttacttggtgggttcccggttgcgggcctcctgcaggtagcacagcgcgcgtgcgtagtcccccaggtggtagaagcaaatcccggcacggtaggtggccttgaagttgccctgctgcttctccagtaccttgagacagtactcgcgcacgcgctcgtagtttaccagctcaaactgcagcaggcaaacagcaagggcaccacgaccggcactctcagagcctgctggcacccccagaacccacctgactgcgaggagccgaggctccaggcggcagggaaccaggcctaagggattgctccggcaaccaggggcgccaatccgctcgcctatcgaaacaggcgcaactgcgccgctgctagggggcgccaaaacacggacaggcgccactgggcgatccacccagagctgtcggtgggcaagagcactaagggccccgcgcgggggcgagggccgggacctcgagagcctggctcagggcagacttcctcaccttgggtccacgtgcggccagggggtggaaagaatgactcaggggaagcgaggccctgaatacccgacccaaagaccatttccgtgcatcccagctccctccagccacagacccctgtcatcccctacccctaatccctttccttgatcaagctctgaaggctcccccagaagcccacagccctggacccttcagccccagggcccctggcccccaagtcgccaagctctcccgattgnnnnnnnnnnnnnnnnnnnnnnnnnnnnnnnnnngacggcgtacccgtgagggagtcgtaacactccacctccgtgctctccaccaggcgccgctgctcctcgctgaggcgcgccggcccggggctgctggtgggcccgggggcgggggcgggcagcccgctagggcgggccccctgcgccgccttcagctgcagcagcgctcggtggtacttgccgatggcctcccggaacttcttctctcgatagcagcgctggccctctgccttgaacgccacggcggcacgcaggctgctgtcgagcgccgcgcccaggctccccgacggctctggggtaggaccgggacgagccgagccatggcgggagcccgagcctgggcccgagcccggtggggagagggcgggaggcgggcgcggcggaggctaccggggcagcgctgagcatcagcaccggggacagcgcgccgcgctccgctctcgacgaattcgagctcggccgatttggcctgatnnnnnnnnnnnnnnnnnnnnnnnnnnnnnnnnnnnnncgccgccaccgcggtgagctccattcgccctatagtgatctatacat

SEQ ID NO: 352877 - DNA, 879 bp, Homo Sapiens
atcaggccaaatcggccgagctcgaattcgtcgagagcgggcgctgtccccggtgctgatgctcagcgctgccccggagcctccgccgcgcccgcctcccgccctctccccaccgggctcgggcccaggctcgggctcccgccatggctcggctcgtcccggtcctaccccagagccgtcggggagcctgggcgcggcgctcgacagcagcctgcgtgccgccgtggcgttcaaggcagagggccagcgctgctatcgagagaagaagttccgggaggccatcggcaagtaccaccgagcgctgctgcagctgaaggcggcgcagggggcccgccctagcggcctgcccgcccccgcccccgggcccaccagcagccccgggccggcgcgcctcagcgaggagcagcggcgcctggtggagagcacggaggtggagtgttacgactccctcacggcttgcctgctgcagtcggagctggtaaactacgagcgcgtgcgcgagtactgtctcaaggtactggagaagcagcagggcaacttcaaggccacctaccgtgccggcattgccttctaccacctgggcgactacgcacgcgcgctgcgctacctgcaggaggcccgcagccgggaacccacagacaccaatgtgctccgctacatccagctgactcagctgaagatgaatcgttgcagcctccagcgggaagacagtggggctgggtcccagactcgggatgtaattggctgaggccaatccagggggacctctctatccctcgccctcccacctcaccatgtaacttcccccgactcatgtgtttgttggtaaaacacttgtcactggtgatcataacttgtgtggtgtcttggaggggaaac

SEQ ID NO: 352878 - DNA, 777 bp, Homo Sapiens
ctcattttaacttttaaaaaatctccttgctttttaaaaataaatattacccacatagttttcagatcttttttgtctggagagcattaaatatctgcactcatcaaagggaatatagcaaatgttgatcatctgtcagcagttttgcatgtgacacctttatatgaattattttcccaatttttgctctatgtaatgggtcaccataaaactgtaagacttgggcaaatgctatagaaaaggttcaggtttcagtattctctctgaaggcatcattcctggggcttccggcagcatcacacgcttccagtgcctgcaggggtgagggtgtgtggcaccagaggcaagcagctcctctcttctgtaggagctttgggttttcagaggtgcagggaaggcagttttacaggttaccgtaaaacagaggttccgtccagtgttccttatgatgcctccccatttaaaaagaaaagagatctatggaaaactgggaatgtaatgtggattctgtcagagctcctacagagcacagttgcctttagtttcctttaaagatgtaaaaatattgtataatacagttttgtccctacacaattgtatttgccaagcttagtgcattatgatacctttatttatttgttttgggcagtattactatatatatataaacatacagttactgttttatatattcttaggtcattcaaagccatgtatgctgtaaatgtgctagtctttagaatgacacataataaataactgacaagataaaaaaaa

SEQ ID NO: 352879 - DNA, 468 bp, Homo Sapiens
ttgtggagtaatagaatcaatactgccaattccagaaaacatcaggaatttgctggacgtttgaactctgttaataacagagctgaactatatcaacatcttaaagaggaaaatgggatggagacaacagaaaatggaaaagccagccggcagtgaagagtgacttgaagaactaaatttagcatattgcaaaaatattttgtgcggaattcgatataagtacttttacagcaagatggtatagttatgttgcctggactggtttttacatttttaaaatatttcagctgtcatttttgtactaattataaaattggcacataattcaaaaatatacatttgagatgatttgtcctcccaaattatacaagtttattttatggtataaagtgttctctctggaaatgtttttaaaaaaattcttaggcttctctttgcgaaataaaactattaaaatatttgaaatgc

SEQ ID NO: 352880 - DNA, 557 bp, Homo Sapiens
attaaaaatgaaagaaacacagctaaacaatttatttacaattgcacaaggtttgaaacagctatcctattcctgttaaagcttcacatttaaaaatgtctacatgatatgtgcttgtacaaggcttgagtatcaaccacaaatgtgactttagcagctttattgcataatgatccacataacgctgcattatttgcttagtttagcctacatcataaagtgctattcatagatgggaaattaacagcctctaaacactgaagttctccatgatatttgctacttgagttgagggtaaaaagctaatttaatgctaccagcctgagtaacagatttccattaaaaatataacaacaaggacaaccaaaaaaaacaggcctaaaagttttggttaccctgttaaaacatgtcaaaagcattccataaatgattactgctacaatgcataaaagtagtttctgaatattttaacctcaaaaaaataagtactttaaataaaaaccacctacttgaaagcaacacctttcaaaaacagacacacaatttagatagaatgt

SEQ ID NO: 352881 - DNA, 1200 bp, Homo Sapiens
  misc_feature (379)..(402): n is a, c, g, or t
cttaatagtgtaaaaattccctgagctaagctaaaaccatggaagaaacatgctacttcagtgtgtagcagtgtaccaagactagcaagagtttgcttcaggattttgttgaataattaagataatattttgagtgtgtcagggccattcaaattgttggtgttgcatcacagctaccttaactgtttttaacatggatcctctgtgcctgtgaatttagcttgcatgcttgtacttgacttcttaggatgggtagctgaaaagaccaccattttaagcatttgagaattcttaaatatgaaatttattcagaattgaagatggtgacctattcagagcctttttgtccttgtcaacagactgggacagtgtctgattnnnnnnnnnnnnnnnnnnnnnnnngccttgccacacacagctaatattctaatggtaaatttctctgtatcaggtggggaaatgtgctgaaggacagtatgtatcccttgcttcatttttaggtcgtaggtttggaatgtcttgtcccagttcttcaaacactcttaaatttttcttaagtaatgtaaaaatggaactgccaattttatttctcttgcaaaaatagtaaatacttgatgttacattattcccaggtttaatgaaagaacccaacttagtttttcagtgaatttgacacctattttttagtgatgaaatttttctttgagaactggcaaggatgcagtcagctgtttgcagtttttagcctgattttggggtctatagagattgctttattggatacttcaagtcattcttgcttgcacttcccctattgacacatgaaagctgtgttggtgttttattgtacatacttcagatgcacataggaatagaagtgtgttataaatctagctttctttatgatgtttctgataatacgagaattgaaaactttaccttctcttgtacatagtcagactatttgtattaaatttacatttcattctaagttccaaagtttgaaaattattagtttttgcagatcacacactaatgtaaccatttttatgaaaggtgaaagtggatttatgcaggcagttctatatatagaaatacaatttctttttaaattttttaggaccccttaccaaattaccaaaaattgttatgggaaatcgaactgaaattaaaggaagggctggaatattggaaagtcct

SEQ ID NO: 352882 - DNA, 565 bp, Homo Sapiens
  misc_feature (79)..(79): n is a, c, g, or t
aattgagtccaatctttgcatcaaacctacctgctacaataatgactttataaaactgcaaaaaatgtagaaggttgcnccaacataaaaagggaaatatggcaatacacccatgatgtttcccagttaacataggaattaccagataaatactgttaaactcttgtccagtaacaagagttgattcatatggacagtatgatttattgtttatttttttaaccaaatacctcctcagtaatttataatggctttgcagtaatgtgtatcagataagaagcactggaaaaccgatcgtctctaggatgatatgcatgtttcaagtggtattgaaagccgcactgatggatatgtaataataaacatatctgttattaatatactaatgactctgtgctcatttaatgagaaataaaagtaatttatggatggatatctttaatttttactgcaatgtgttttctcatggctgaaatgaatggaaaacatacttcaaattagtctctgattgtatataaatgtttgtgaaattccatggttagattaaagtgtatttttaaaagat

SEQ ID NO: 352883 - DNA, 1124 bp, Homo Sapiens
  misc_feature (4)..(4): n is a, c, g, or t
  misc_feature (12)..(12): n is a, c, g, or t
  misc_feature (15)..(15): n is a, c, g, or t
  misc_feature (22)..(22): n is a, c, g, or t
  misc_feature (24)..(24): n is a, c, g, or t
  misc_feature (26)..(26): n is a, c, g, or t
  misc_feature (40)..(40): n is a, c, g, or t
  misc_feature (53)..(53): n is a, c, g, or t
  misc_feature (60)..(60): n is a, c, g, or t
  misc_feature (74)..(74): n is a, c, g, or t
  misc_feature (99)..(99): n is a, c, g, or t
  misc_feature (103)..(103): n is a, c, g, or t
  misc_feature (142)..(389): n is a, c, g, or t
  misc_feature (521)..(521): n is a, c, g, or t
ccangtcttcanggngtttaanangncccacagactcaanttaactagggttngtcccanatcagccccagganttataaaaatgagctctactcccantttngtttaaatacacatccaggccaggcacagtgctcacacnnnnnnnnnnnnnnnnnnnnnnnnnnnnnnnnnnnnnnnnnnnnnnnnnnnnnnnnnnnnnnnnnnnnnnnnnnnnnnnnnnnnnnnnnnnnnnnnnnnnnnnnnnnnnnnnnnnnnnnnnnnnnnnnnnnnnnnnnnnnnnnnnnnnnnnnnnnnnnnnnnnnnnnnnnnnnnnnnnnnnnnnnnnnnnnnnnnnnnnnnnnnnnnnnnnnnnnnnnnnnnnnnnnnnnnnnnnnnnnnnnnnnnnnctccgtctcaaaaaacaaaaaggtgacacatccagctctttctccaggtcactgcgctggaggacagatgtgccgtcttgtcctgcctgtttcacatcagcataggatcaaaggatgacaatgctgacagcntctgaagccgaactcaacagtctcataggctcctcacttgtcacttatttttccctagctccctcaaccgcaccccatccctttagatcgtgcgtctgttttagtgactctgacacgatgccgtcctcaccttccaaatacccagttatttattcaagaggggggaagtgggtagaggatgggatgttttggaagcactttgcaagttaccactatctgaaaatcccctgctgttgcggggagaagctttgaatgcactgaagagaattccttctaaatgaaggcaggtgatagtgttctttctgtaagtaaagggaaagaaaaaaaacatagtttgcttaccaggtggagacaagattcaagacatagcagaagagtggaagacaaatattttccacttaaatgaggctgtttttgacgttctctgccaaggatttagagctttcgttgaactaacataaaaggagtgcgagtcttagtagagatgttccgtgtgtgccgcccgtgctctgaactgcgtttccacctgctgtggtgcttgtgcagcctggcagttcattgtcatctttaataaactaaggaaataaaattctgtctttcgtc

SEQ ID NO: 352884 - DNA, 515 bp, Homo Sapiens
  misc_feature (53)..(53): n is a, c, g, or t
  misc_feature (63)..(63): n is a, c, g, or t
  misc_feature (70)..(70): n is a, c, g, or t
cccagcattaaaataataagattgtatagtttgtatatttaggagtgtatttntgggaaaganaatttanatgaactaaagcagtattgagttgctgctcttcttaaaatcgtttagattttccctcgtttgtacagctccaccttttagaggtcttactgcaataagaagtaatgcctgggggacggtaatcctaataggacgtcccgcacttgtcacagtacagctaatttttcctagttaacatattttgtacaatattaaaaaaatgcacagaaaccattgggggggattcagaggtgcatccacggatcttcttgagctgtgacgtgtttttatgtggctgcccaacgtggagcgggcagtgtgataggctgggtgggctaagcagcctagtctatgtgggtgacaggccacgctggtctcagatgcccagtgaagccactaacatgagtgaggggagggctgtggggaactccattcagttttatctccatcaataaagtggcctttcc

SEQ ID NO: 352885 - DNA, 494 bp, Homo Sapiens
tgtaggtcggcactagtgttttccacggttatcacctttgacaggtgatgtgcatctatagatagtggaagcccaccccatgaggaggtgttaatagccagcatggtttcacttttggtaatcaggtaatccatgtgtatatacttagattcgcattattttaacatttctctgctactctgcacttcaggttcgttaagctattttaataattactggggttatggcaaacaccaatggaaatgtatatggcaactgctttcctgagcaagtgtgatttgttttatggctgttcaagttataaaattgttcttacattgtaggtaaacaaaatcttgatgtttttaaaggtcactgtaacttaaggttcaaatttctggcacagttttattagtattcacttcggaagctaataagataccatggttttctatgttactcccattgtaacattagtaaagtgactttcaataaaagatttatgttattttgaa

SEQ ID NO: 352886 - DNA, 1338 bp, Homo Sapiens
cctggagctgccagaatacaagtcacttgatgatgtgaggagctggtgatcaatgctacagcgacaatcaacaatttatcttactaccaagtgaagaattccataattcaagacaaaaagctatatattgctgaattgctcttaaagcttcttgtcagtaacaacatggatggaatcctggaggctgtgcgtgttttcggaaatctctcccaggaccatgatgtctgcgatttcattgtgcagaacaatgtccacaggttcatgatggcgctgctggatgctcagcatcaggatatctgcttttctgcctgtggtgttctcctcaatctcactgtggataaagacaagcgtgtcatcttgaaagaaggaggtggcattaaaaagttagtggactgtttaagagatttgggtcctactgattggcagctggcctgcttggtttgtaaaactttatggaacttcagtgaaaacatcactaatgcttcgtcatgtttaggaaatgaagacaccaacacactcttactcttgctctcatcattttgagatgaagaactagcactggatggcagttttgatccagacctaaaaaactatcacaaactccattgggaaacagaattcaaacctgtggcacagcagcttctaaaccgaattcagagacatcacaccttcctggaacccctgcccattccctctttctaacatgatgcagattaacagtagaaacgagaactcacgtctccctcattcttaagaactggtaacaaacgtgaacatttttttcagcattaacaaatgtggaaagtttttcaagaactggttttagtgagtagctgaagtattttttaaaattaagcatttcttcttgttaggtattatggaaaaatgaatatacacattatatttcctgttgagagaaatgtaagatgaaaatatgtgcattttcaagtaaatgactttttcttctattctctattaaacaatttagttctagtcttaaaatcttgatttaacaattttggaactgaagtgttcataagttaaatgaactgtgcaatgaaggctgttagattatatagaaagaagggtaggcaacatgagtggaacacgttacaacataggatctgtactaattcttactatgtcaaataataaatgctctcattaggtaccagtatttttttggtctttatattaagagaaggagtaagcagaaaaacttaaagaaaactgctttgggccatctgttctttattaaataagtaaaatagataaaacgagagtatattttcatttgaaataaaatgactggactaagacagtccttctaattgtaaa

SEQ ID NO: 352887 - DNA, 821 bp, Homo Sapiens
  misc_feature (768)..(768): n is a, c, g, or t
  misc_feature (811)..(811): n is a, c, g, or t
atttaagccctcacgatggaaatacatttaggagataaacccgattggcataaaaaacaagcccttaagtcaattctcagaaggtaggcattacacgataaaaattgtacgggaatggcaataatcaaacacgttattggggaaaccccaaccaccaaacggaagctatctaagttaactgctaatacagaaaacttaatgtaaacctgtttggggtctctattgttttagaatgaaaggcaatgtaaaaatgtgggtataaataattagtaaataaaaagtatgaaaatgatacggtgttaaaaaaaaccaatggtaaggctacaaaactcaagtaacaaggtttgggacaatgtcctaagggttaaagtgccaaagccatttctgtactaactgttctcttgttccggtaccggggagaaggatgacccctccttattctccaattcatgtacagtattttgtcctagcagcataaagacctagctcttttcttacaagaggcagaaacaagacaggctagttcataaacaaactgtgtaacttctcaaaatgaatctatttcataactcggacaatttctgggtggtgactgagtacccctttagtgagtacccctttagtgctatatttgtgccattcattatctggttcatatttcttttctgttagatgatacacatttcttcaaaaaaatttctaatgtcacttttgtacttttttaaataaagtatgtttaactgttgggctctcaataatttgtgaaanttcagtgttttctataatgttaatggggaaattcagcaataanctttatttgt

SEQ ID NO: 352888 - DNA, 345 bp, Homo Sapiens
  misc_feature (226)..(226): n is a, c, g, or t
aaaatttcacaaaactaagggtaaaagacatttaaagaattaaacttaaataagtgtgtgcagcatttctacttctgaagttattaaagctaaaactgcactaagccttttgagacatcctttattcttaaaaagctcataaataattggcttattacatataaacttcaaaaaagtgggttataagacattgctttagaatcttgcccctccaaatcttccctcnaaagatcttaatgagtaaaacaactgctacatacatatgcagaatgtgtaataaaacaaaaagcaattgctatatgaaaatattcgtaagaaaagtaaagcaaattgtttctttgtgct

SEQ ID NO: 352889 - DNA, 642 bp, Homo Sapiens
  misc_feature (26)..(26): n is a, c, g, or t
  misc_feature (49)..(49): n is a, c, g, or t
ggaggaaagaggtgtgagagcggtangcagcctgccgcaaacacacggntggctccccccgccacgaaggttgagaacaaagccaggggcccagaggagcaatagccctgggccacaagcgtgggtaggcctttcacgtattccgtctgcacaggcaaccaaggccagtagaaagctatggctgcaaaaccctggggtggacgatgtttgatgattagacggtcatctctaactactaaactaatatctgcattcttgttaacataaatctctccttggctattttaatagccacagtcccaaacttcatcccagcttagatttctcagcactgaggtaaactctgcattgtcatcccagcgtacacctttaatgttttattgatttcactggcactgtatttggacctgtccttgtatatgtagagacatatgtggcttcattggtaatttacaagcaaaagatgacatgacgtgacacctgtatgaaaatgtgatgattgaactccctgtgtacagcgagtgaattaaaatgtctgcctctccagacatttcttaatgattccacttaatagactctatgtgtgctgaatgttcctgtgtacatatgtgtgttaaataaaacaattgtattgaaaaaaaa

SEQ ID NO: 352890 - DNA, 402 bp, Homo Sapiens
  misc_feature (18)..(18): n is a, c, g, or t
tcctggtaaaacataaancctctccctgggcctattttaaatagcccacagtccccaaacttcatccccagccttagatttcctcagcacctgaggtaaactctgcattgtcatccccagcgtacacctttaatgttttattgatttcactggcactgtatttggaccctgtcccttgtatatgtagagacatatgtggcttcattggtaatttacaagcaaaagatgacatgacgtgacacctgtatgaaaatgtgatgattgaactccctgtgtacagcgagtgaattaaaatgtctgcctctccagacatttcttaatgattccacttaatagactctatgtgtgctgaatgttcctgtgtacatatgtgtgttaaataaaacaattgtattgaaaaaa

SEQ ID NO: 352891 - DNA, 363 bp, Homo Sapiens
  misc_feature (5)..(5): n is a, c, g, or t
  misc_feature (8)..(8): n is a, c, g, or t
  misc_feature (28)..(28): n is a, c, g, or t
  misc_feature (313)..(313): n is a, c, g, or t
  misc_feature (315)..(315): n is a, c, g, or t
ctacncanccttaagggtacatttgctnccaggtaacatgtttgtgagtaatactacaatgtgcatatatctattccatgttctgctttgtctgtttgggatatttgtcatacactgattcagtaccatgtgtattcccttgcttttgtggtctcatccgttgatgctacgtcccccaaattattgccacgaccagttgtaatgaagcttcacccttctgtattgtgctaggaattttacagctataggttttacattatagtcttcattcattttttaaaattgacacatgtaattgtgcatattttggggnanaaaaattatatatatgtgttgtataacaataaaaatcagtacttctat

SEQ ID NO: 352892 - DNA, 979 bp, Homo Sapiens
  misc_feature (96)..(96): n is a, c, g, or t
  misc_feature (446)..(446): n is a, c, g, or t
ctccacggagctccagccagggccgcggttcgcctgcacgtcacggctactcaaacccaagcacgtcccgaaagcggtattttctgcgtctgggangtttttgcatcctcagttcccaccgctggggctggcggcgaccaactgtaagagaaactcactgggaggcgaggcaggggggtgcggaggatgggaaggcgactctgaagggtgggaagtgaatgctggacttgatcgtctttctctttctttcagcgcagacctgtcgcagccagagagctgtcatttcagtaccgggattcagaattgatccagtccgcagcggagggggcacatcccagctaccgagctgctgagtgtctctggctggaacaatagtatttttttctctgcgaggctgcaattaacatcttatttgttctggctccatacaggctttgtcaggatcncggtgcggcgaccgacgttgggctcttgcaatgatttgtgcttgacaatggaatcatggtttaggggtataaacttttgtttcgatttgtagtcttaatgtatctgattctttttcaagtttccctagtaacaggtttgggaacggggtgggaagaagcgagaaaagggggtaaagagaaaaaaccagattatatagaaaggaaaaagggaaaagggatgtttccccaccttttaatctaactatctatctgtctgtctatctatcatcatagatagtcattttgcctcctggacagttggctgacgaagtgtctgataaaccagcttcagatacatgctacaaaaggtcattcgcctcctgattatgtttctacttgtaaacgcagttggtggtttgcaaaacaagtgctaaaatagtgcagtgatgtggtgggaggaaaccataatgggtaattcatataaagtgctggaatcttcgtaagggtgagtttctcgagcggcaggtgaagttgaataaagcaattttccatca

SEQ ID NO: 352893 - DNA, 2222 bp, Homo Sapiens
  misc_feature (481)..(544): n is a, c, g, or t
  misc_feature (672)..(672): n is a, c, g, or t
  misc_feature (885)..(885): n is a, c, g, or t
  misc_feature (1045)..(1045): n is a, c, g, or t
  misc_feature (1053)..(1053): n is a, c, g, or t
  misc_feature (1121)..(1121): n is a, c, g, or t
  misc_feature (1134)..(1134): n is a, c, g, or t
  misc_feature (1136)..(1136): n is a, c, g, or t
  misc_feature (1152)..(1154): n is a, c, g, or t
  misc_feature (1157)..(1158): n is a, c, g, or t
  misc_feature (1169)..(1169): n is a, c, g, or t
  misc_feature (1176)..(1176): n is a, c, g, or t
  misc_feature (1203)..(1203): n is a, c, g, or t
  misc_feature (1327)..(1327): n is a, c, g, or t
  misc_feature (1340)..(1340): n is a, c, g, or t
  misc_feature (1347)..(1347): n is a, c, g, or t
  misc_feature (1361)..(1364): n is a, c, g, or t
  misc_feature (1366)..(1367): n is a, c, g, or t
  misc_feature (1379)..(1379): n is a, c, g, or t
  misc_feature (1389)..(1389): n is a, c, g, or t
  misc_feature (1400)..(1400): n is a, c, g, or t
  misc_feature (1407)..(1408): n is a, c, g, or t
  misc_feature (1413)..(1413): n is a, c, g, or t
  misc_feature (2181)..(2182): n is a, c, g, or t
cgctggggctggcggcgaccaactgtaagagaaactcactgggaggcgaggcaggggggtgcggaggtatgggaaggcgactctgaagggtgggaagtgaatgctggacttgatcgtctttctctttctttcagcgcagacctgtcgcagccagagagctgtcatttcagtaccgggattcagaattgatccagtccgcagcggagggggcacatcccagctaccgagctgctgagtgtctctggctggaacaatagtatttttttctctgcgaggctgcaattaacatcttatttgttctggctccatacaggctttgtcaggatcgcggtgcggcgaccgacgttgggctcttgcattgctttctgcttggcaatggaatcatggtttcggggtctaaacttttgtttcgttttgtagtcttaatgtatctgattctttttcaagtttccctagtaacaggtttggggacggggtgggnnnnnnnnnnnnnnnnnnnnnnnnnnnnnnnnnnnnnnnnnnnnnnnnnnnnnnnnnnnnnnnnatgtttccccaccttttaatctaactatctgtctgtctatctatcatcatagatagtcattttgcctcctggacagttggctgacgaatgtctgataaaccagcttcagatacatgctacaaaaggtnattcgcctcctgattatgtttctacttgtaaacgcagtgggtggtttgcaaaacaagtgctaaaatagtgcagtgatgtggtgggaggaaccataatgggtaattcatataaagtgctggaatcttcgtaagggtgagttactcgagcggcaggtgaagttgaataaagcaattttccatcatttgttcccctcactcttgcatttttttccnccgcttgtttctctccccctggggcgattatggatagccaagaacaccattttaaaagagattgatagtgaaaacaggaagtttatggtctgttatccactggagttgtttgaaatattaaaattggtcctttacttcttaatgcatattaatagagtgnccctcttnaaggctttcccgtcttaaacgaatgcctgggataaacactgtaaggggaaacagttaataattccccngcaggccttaacnanttccccagtaacaaannnccnncaagagagcancctgggnggcattttggttttgtgtcattttggntctttacaatattttttattcatttaaggaaatgttaaaaggaaataattagggtttatgtccagaacaaattttgaaacaccgtttaagcaacacattttcttttaaaaacaaagaacattgngcaacacaaaggngaaaaangttttatttatttnnnntnncctagagatcgnaattatgggngggggaagggnatttggnnagttntgttactttatccagaggaaaaaaagcatgacagatgtggaataaaaacggaggaagaaaatgctttggatggtttatacatacaaaaggaaagaatgtaatgtgaggttcagttatacctctattttgcatctagtgatttctcatattatcttgtaacactagattttgatgtttcttagaaattcttaaagtcatgacacagtggcataagaataacagctgaaagggacaatttaaaagcctaaatcctaaatggaaaggttcacttactcccaggatcatttatattcaagtagaagtcagggcagggtcagaaacagaagagccacccttaataaagcgcttcacccttcagcattgtttctcagtaaccttcataaattgcaggctactgagctggcctgatgatgatccttctgagatatagttatagcagatgatttgtggatgataactacgccaagcaagacactgtctccaagtaaccccaggctcgtctgacttcctcaggggattataataaagaatcaccaaaaagaaccctatattgaacaggctatgtctctggacactaaggcaacagcactaatccaaaggcaaagaaaggaggaaccacctttgtttcatgtctgcaacctgctccatatgaaagcattgctgacatgttgacccaacagcaaaaagagagcagcagtttacgcaccctcagctctctgtcctttcctttctattgatgttggtccacttttatgactgaatacatgnnaaaatcaccatttcaaattataggccaaaaaaaagccaca

SEQ ID NO: 352894 - DNA, 1530 bp, Homo Sapiens
  misc_feature (901)..(911): n is a, c, g, or t
  misc_feature (932)..(1090): n is a, c, g, or t
ggatcacaaggctatgaacaaatatgcaagtccattcaactgcaattgaatattggagttgagcagattcgagttgtacatagagatggaagagtaattacactgtcttatcaggagcaggagctacaggattttcttctgtctcagatgtcacagcaccaggtacatgcagttcagcaactcgccaaggttatgggctggcaagtactgagcttcagtaatcatgtgggacttggacctatagagagcattggtaatgcatctgccatcacggtggcctccccaagtggtgactatgctatttcagttcgtaatggacctgaaagtggcagcaagattatggttcagtttcctcgtaaccaatgtaaagaccttccaaaaagtgatgttttacaagataacaaatggagtcatcttcgtgggccattcaaagaagttcagtggaataaaatggaaggtcgaaattttgtttataaaatggagctgcttatgtctgcacttagcccttgtctactatgattttttccagatgtttcctaaagaagtttccagaaactttgacttgaaatgtttgcagatcaactataagcacaaagaagagataacttccaaaagagtgctgtttttaaaaataataattaggaaatgtttatttagcactttcaaacttttcactttataaatgacaagtgctttgaaatgcagaagtttatgtacagttgtatatacagtatgacaagatgtaaaataatatgtttttcatgcagtttaaaatattactaacttaagggtttctatgtgctttttaaaatattccttctttgatgttgacatcaaataaagtatgtggtttaaaaaaatctccaaatacctttttttccccccaaatactttctaaacnnnnnnnnnnngagatggtatctcactctgtnnnnnnnnnnnnnnnnnnnnnnnnnnnnnnnnnnnnnnnnnnnnnnnnnnnnnnnnnnnnnnnnnnnnnnnnnnnnnnnnnnnnnnnnnnnnnnnnnnnnnnnnnnnnnnnnnnnnnnnnnnnnnnnnnnnnnnnnnnnnnnnnnnnnnnnnnnnnnnnttccatgttgcccaggctggtttccgaaaactccggctcaagtgatctacctggcctctggcctcccaaaagtgctagggattttaccgggcgttaaacccacccatgccccagccctacctcctaaaaatttatttggataacccctccttccctcccagcttcgtccctcccctttttaaaagcctttttcccttgggggtccttaaacccctaccactaacggtaaaacttctgaaagggaacccattcccctacacagaaaaagggaaccaagccctgtgaaaccggcaacaataaacggaaagtccccagaattttattccatcgcctttcacagcggccgcctcccctccacaagattctttctaatatggggtcactgagctatccctccccacccctttcaacatttgcaccccctccaacccacattattt

SEQ ID NO: 352895 - DNA, 607 bp, Homo Sapiens
  misc_feature (15)..(15): n is a, c, g, or t
  misc_feature (371)..(404): n is a, c, g, or t
acgctgattgccatntgcattgtctactgaaaagctgtggcagcgagtggtattattgaccatgtgttctcatgtctttttgcagatttaaaggttttattgtagtgtccatttaatatctgcatgtgtgtttaatctctgaataccatgtaattaaactgattaacttgtgatggtgatggtgattagcacacactaaaaacccaatgaagcaattgtctccctcttcttaactggaaatcacacttgtgaggtatggtatccattatcaacagtggattcatgattgacttcatattttgtgtatctggttataaattttgtatagcatttaatttggcacttaatataaatccatttgatttgaatannnnnnnnnnnnnnnnnnnnnnnnnnnnnnnnnncactttagtttcgtgagccttgggaaactgattctacaaatatcttatatagagataaatgtatcaggcatttttttgcaaagcgatatatacattcctcttatttattaaatcactggctttggtgttatgtagagatatttgtagatctcagaacagaattaaaatattgtgaaaattacagcttaataaatgtttattgt

SEQ ID NO: 352896 - DNA, 408 bp, Homo Sapiens
  misc_feature (11)..(12): n is a, c, g, or t
  misc_feature (265)..(265): n is a, c, g, or t
  misc_feature (342)..(343): n is a, c, g, or t
aatagaataanngttgggtctgagagctggtaccatgttactcgatttccgatgatgaatcctctcaccagctcaagggcaccaacttgatggatatgaatgtaatgtctaaaatgactaagctttgatattgtaagtagcctgaccatatcatgagattctgagtaacttgatttgtctggcattgttctgaagtggatccactttatcaaagccacagatatatggcaaagttgaaaagataatgtgaaagttcctttagcanacagacgtcccaggccctggtttcaatcacaccagtaggacggaattttaggcagttgatcataaaagtttgtccanncttaggaaatgtacaattaactagaaagaaggatccactatgattgactataaaatgtgccacct

SEQ ID NO: 352897 - DNA, 970 bp, Homo Sapiens
  misc_feature (25)..(25): n is a, c, g, or t
  misc_feature (35)..(35): n is a, c, g, or t
  misc_feature (42)..(42): n is a, c, g, or t
  misc_feature (57)..(57): n is a, c, g, or t
cccacaaaacaaccaggtcagggtnctcaggaagnagttctncttcaccttaaacanacccaaaaatactcaagtactgggataggcaagcatgtgtgtttactgtggattggtccctgaaggctcctttgggtgagaacatgtgaaccaggcaccctggtttgtttggagcattgctgccccagaagcttctatgggataggtggtgcttgggattgatgtgttgtggccatgcagccctccctgaggattgacttctgcactaatccagtgaaggaggctgtgtcaaaagaagggctcagaagccctcttttcagaggcaatgattcctgtcagtatgaggtcccttagttactaaaaagggacatgatttaactccagtttgatgaacctcctccgagtttactttattgtcttcaaatcttttgttttcttcctttttgtgagatttgtgggttttgtgccttataaatggaaatgtatgaacacaatatatgcctcatgtagaattttctgttctgggttattgggataagaaaaaatatatattgctcttcaactagtgaatgaaagaaacttcagaaagctagaattgcttatcaatcaaaagactttctcaatctattttggccacaaacaaacatattcaactgaagctttccaataatctttatatcaagaaagcatgcgtcttgtcagctacattgttttcttagatggatttctcctgttaatcctcaaatatctgaacttctgtgttacccaagtgtcttatacaagcttctggtgtctaggacaaatttatggcaaataaaattagcaaaactgaactgggttgaactgaacaagaggatgggggaattgtgcaaatacattgttagtagaaggtcaatttaaaataggggactaggaaattatttgaagttttctttattacggattccaaaggacttattttggaaagttggga

SEQ ID NO: 352898 - DNA, 1218 bp, Homo Sapiens
  misc_feature (5)..(5): n is a, c, g, or t
  misc_feature (7)..(7): n is a, c, g, or t
  misc_feature (201)..(201): n is a, c, g, or t
  misc_feature (1009)..(1064): n is a, c, g, or t
cctcncnttcggattctcactaacttttgttactattctaaaagtttgaatttgctggggtgtttattctgaggattatttaaccattgttctatttggcataaccctatttaatggtgcttagagctgaattacctacagaaactgtttctggtttaaataattagcacaaattggcctaagtattcatgagcccatgtntctgtgaagtaattattaaaccaacttaatgattcttatgtaaggtacactttttattttaatacattggtagtctctatgacttgtagcaatgttttacaaatgtttaaaatgctaaacttaattttccaagcttttcttgacaattagatacctatcctgtagttactgaaaatctgggtagtaaatctacccaattaaaatggcactttataaaagggaatagagaagagatgggactatttctatatttaaatgctgctggctattcctttgtatataaatgaaaaataccattcattaaaattaagtactcgtttaagtatggctcttaattacatttcattcatttatattagagtaaatggcttcataactactttacaatttaacccacaagcatattaaatctgtttgttataagattggaaacaatctttgagagggactaatttaaacaagtcctcctttagtcttttgggtcgcgtagttgctgaaacctacctaactgcagcctacaggataaggaagttcacagcctgcggggtcaatgaacccatgcgcgacctgcacagagcccattcctacaaaatgcctaaacatttgtaacactttgggtcccctctggtctttagatggtcattgaattcggttccaaaacgcgacgaaccgccacgccatggcgggttcacgccctcgcaatccccaccactttttgggaggcccgagggacggcgggatctacccggaggcccaggaattgtgaaaacccgttcttgcccaaccatggccgcgaacccccgttctnnnnnnnnnnnnnnnnnnnnnnnnnnnnnnnnnnnnnnnnnnnnnnnnnnnnnnnnttcccatctcctcagccttttccccgcaggtctttagcccatccccaaactcactttaaaacactcgcaaaacttgccgaaggttgccacctcgccctttccatatcatcgaacccctgtcccctcccaccccttgggccacccgcgaagcatt

SEQ ID NO: 352899 - DNA, 1103 bp, Homo Sapiens
  misc_feature (5)..(5): n is a, c, g, or t
  misc_feature (7)..(7): n is a, c, g, or t
  misc_feature (16)..(16): n is a, c, g, or t
  misc_feature (20)..(20): n is a, c, g, or t
  misc_feature (24)..(24): n is a, c, g, or t
  misc_feature (27)..(28): n is a, c, g, or t
  misc_feature (38)..(38): n is a, c, g, or t
  misc_feature (45)..(45): n is a, c, g, or t
  misc_feature (73)..(73): n is a, c, g, or t
  misc_feature (89)..(89): n is a, c, g, or t
ccttngngccgccatnggcncagnacnngcccagtgtncctgggnatcttgctgtagctactggacatctctnttctctcctgcttttntttcctgactaggtgacctgtccaggaaggattagaccctgtactttccactctttcctcacctccttccttttttctatgcctggcgggagctggacagtttcatctcttgcatgtatcgaaggatgatcgcagtgatgtggagagcagctcagaggaagaagatgtgaccacctgcacaaaaagtccctgtgacagtagctccagcaatggtgccaatcgggtgaatggtcacatgggaggcagctactgggctgaagagtaaggtggttgctatagggacttcagcacacatggacttgtagggccactggcaacatactcctcttggcccttcccatatctactcttctgtgattgggagactgcaaggcactgaggagtatcaaagaagcaaatattttcactttgaaagaaaactgccattttgtatttaatagcctccaggttctttcagtaatgttatttgctctgtgtgtttttgtgtgtttgttgatgtgcgtttgtgcatatgcgtgagtttcattgccggggttggggcacaattgtggactggggccatgaggccttccctggtccccactgaacccaccttagttccacatttggctgcatcttgaattatgccgactccagacttctcctccttttttgcccttggctcttgacactctaaacccctggaccatctgaatggagcagccaagttcagtcccacatttctgtactgttcctctttcacagctggaatatgtcacatgatgaagttgtatagaaacagaaccatggatggatggccaggattgccgtggtccctagctagatccccttcctatcaatcacctgatagcaacagggacagctgccaataccctgctctttactcaatggtacccagggagggagcatgggaagagggtgagctgagggctggaggagggcaacagccactgggtgagctgttcacggtcttatactattgtttgtgattaaaagtgcttcaacccaaaaaaa

SEQ ID NO: 352900 - DNA, 371 bp, Homo Sapiens
  misc_feature (302)..(302): n is a, c, g, or t
  misc_feature (332)..(332): n is a, c, g, or t
  misc_feature (336)..(336): n is a, c, g, or t
ggaccaggtctgttaacgggattccagtgccacctgatcaattagaggacatggccgagaggtttcattttgtttcctccacatcagagctacacctaatgaaaatggaatttttagaattaaagtaccgtctgctctcactgctggttcttgcagagtcaaagctgaagtcttggatcattaagtacgggaggagagagtcagtggagcagcttctacaaaactacgtgtcttttatagaaaatagcaagttctttgaacaatatgaggtgacataccagatcttgaaacagacagctgangatgtatgccaaagcagatggttcagtggnagangctgagaatgtgatgaattcatgaatgaaccaccg

SEQ ID NO: 352901 - DNA, 446 bp, Homo Sapiens
  misc_feature (2)..(2): n is a, c, g, or t
  misc_feature (10)..(10): n is a, c, g, or t
  misc_feature (14)..(14): n is a, c, g, or t
  misc_feature (28)..(28): n is a, c, g, or t
  misc_feature (34)..(34): n is a, c, g, or t
  misc_feature (55)..(56): n is a, c, g, or t
  misc_feature (62)..(62): n is a, c, g, or t
  misc_feature (77)..(77): n is a, c, g, or t
  misc_feature (84)..(85): n is a, c, g, or t
  misc_feature (99)..(99): n is a, c, g, or t
  misc_feature (126)..(126): n is a, c, g, or t
  misc_feature (134)..(134): n is a, c, g, or t
  misc_feature (138)..(138): n is a, c, g, or t
  misc_feature (164)..(164): n is a, c, g, or t
  misc_feature (175)..(175): n is a, c, g, or t
  misc_feature (201)..(201): n is a, c, g, or t
  misc_feature (229)..(229): n is a, c, g, or t
  misc_feature (232)..(232): n is a, c, g, or t
  misc_feature (263)..(263): n is a, c, g, or t
anctaacccngacnctgttgaggatccnggaccngggagttggaaagagggaagnnaaatcnttaaaagagggaccnggtgaanngacacactgcaatntgactgacctgctgagattccaagacnggaaacgnaacntacatgtgcacgcacacctcctcccntctagaacccnactgtttttgacttctgttctcttancgggcttcccattcctcctatgcccccnacnttatctgagaggcagctgtctgttttgtagnagaaaagagatagtctgtttgagtgatgcacactggatcacagagcaagttatggacaaagatggaactgtctctgagtgtcattacttaacttgctaatccacatagggactgggggtatccactcataaaaagcagggcaggacattttaaagccagacaggggctgtgtagagaaggaac

SEQ ID NO: 352902 - DNA, 756 bp, Homo Sapiens
  misc_feature (133)..(133): n is a, c, g, or t
  misc_feature (282)..(282): n is a, c, g, or t
  misc_feature (324)..(418): n is a, c, g, or t
cccggatcatgaatgccacgagcggcatcacgcatgcgatggggccggggactgtgaacggagggcaccccccgagcgcgctggcccccgcggccaggtttaacaactcccagttcatgggtcccccggtggnccagccagggaggctccctgccggccagcatgcagctgcagaagctcaacaaccagtatttcaaccatcacccctacccccacaaccactacatgccggatttgcaccctgctgcaggccaccagatggaacgggacaaaccagcactntccgagattgcaaccccaagcacagcggcggcagcagcaccnnnnnnnnnnnnnnnnnnnnnnnnnnnnnnnnnnnnnnnnnnnnnnnnnnnnnnnnnnnnnnnnnnnnnnnnnnnnnnnnnnnnnnnnnnnnnnncggcaacatgcccgcctccgtggcccacgtccccgctgcaatgctgccgcccaatgtcatagacactgatttcatcgacgaggaagttcttatgtccttggtgatagaaatgggtttggaccgcatcaaggagctgcccgaactctggctggggcaaaacgagtttgattttatgacggacttcgtgtgcaaacagcagcccagcagagtgagctgttgactcgatcgaaaccccggcgaaagaaatcaaacccccaacttcttcggcgtgaattaaaagaaacattcccttagacacagtatctcacttttcagatcttgaaaggtttgagaacttg

SEQ ID NO: 352903 - DNA, 561 bp, Homo Sapiens
  misc_feature (66)..(190): n is a, c, g, or t
gatttgcaccctgctgcatgccaccagatgaacgggacaaaccagcacttccgagattgcaacccnnnnnnnnnnnnnnnnnnnnnnnnnnnnnnnnnnnnnnnnnnnnnnnnnnnnnnnnnnnnnnnnnnnnnnnnnnnnnnnnnnnnnnnnnnnnnnnnnnnnnnnnnnnnnnnnnnnnnnnnnnnnnacatgcccgcctccgtggcccacgtccccgctgcaatgctgccgcccaatgtcatagacactgatttcatcgacgaggaagttcttatgtccttggtgatagaaatgggtttggaccgcatcaaggagctgcccgaactctggctggggcaaaacgagtttgattttatgacggacttcgtgtgcaaacagcagcccagcagagtgagctgttgactcgatcgaaaccccggcgaaagaaatcaaacccccaacttcttcggcgtgaattaaaagaaacattcccttagacacagtatctcacttttcagatcttgaaaggtttgagaacttggaaacaaagtaaactataaacttgtacaaattggtttt

SEQ ID NO: 352904 - DNA, 1661 bp, Homo Sapiens
  misc_feature (796)..(855): n is a, c, g, or t
  misc_feature (1213)..(1213): n is a, c, g, or t
  misc_feature (1298)..(1298): n is a, c, g, or t
gtagcgaggcctgggtggcgatttcagacgagggccgggcggtcctgccgagctgtgagggcaacggaggggaaataaaagggaacggctccgaatctgccccagcggccgctgcgagacctcggcgccgacatcgcgacagcgaagcgctttgcacgccaggaaggtcccctctatgtgctgctgagccggtcctggacgcgacgagcccgccctcggtcttcggagcagaaatcgcaaaaacggaaggactggaaatggcagaccatatgatggccatgaaccacgggcgcttccccgacggcaccaatgggctgcaccatcaccctgcccaccgcatgggcatggggcagttcccgagcccccatcaccaccagcagcagcagccccagcacgccttcaacgccctaatgggcgagcacatacactacggcgcgggcaacatgaatgccacgagcggcatcaggcatgcgatggggccggggactgtgaacggagggcaccccccgagcgcgctggcccccgcggccaggtttaacaactcccagttcatgggtcccccggtggccagccagggaggctccctgccggccagcatgcagctgcagaagctcaacaaccagtatttcaaccatcacccctacccccacaaccactacatgccggatttgcaccctgctgcaggccaccagatgaacgggacaaaccagcacttccgagattgcaaccccaagcacagcggcggcagcagcacccccggcggctcgggcggcaacagcacccccggcggctctgnnnnnnnnnnnnnnnnnnnnnnnnnnnnnnnnnnnnnnnnnnnnnnnnnnnnnnnnnnnnaacatgcccgcctccgtggcccacgtccccgctgcaatgctgccgcccattgtcatagacacttggatttcatccgacgaggaaagtccgatatgtcccttgagagaataaaaaaatgggttctgggaccgccatctaagaaagctggtcccgaacttcctggtcgggggtgcaaaaaactaagattttgtaattttttattgtacccgaaataattccaagataaggtagaaaataggcaaggccacccgtagccgagaaagaatagcgcgccttgcttttgaggaacgtctcgaaatctcggtgaagagaatacctcacggagtgcgagaacaataaaataaaaaggagaccgttnagcccccgaggcggccgaacaatgtttttaccccatttcactagccgacatcgggaaacgcttctggtcgtatacacgaggaganattctttttcacgccccctctgtcgggagacagaaaagaggtaacagccgcgttttacactggtgatgtggccgcgataaaatcttttatgcagccacaagaggcgttattggtattcactagagctctgttgactagtatgactgagcagggtaatattacacactcttgtaaaaattccgcgttggggatgtgcccaaacgtatgtgggcggtggcatttaatgaactaaaacaaaaagaatgtacgctagtgcacaggacggaatgagctgcgttgttctctactctatcgcacgcgcacctaagaacaatctcaacacaggcgatagcaggtagtcagcgctccccgccgtgtatcctt

SEQ ID NO: 352905 - DNA, 887 bp, Homo Sapiens
  misc_feature (278)..(278): n is a, c, g, or t
gcccagttctctccgggccagaagtgcccctcccattccacccgggggaaccgggttcaagtcccccgaaaaggcttttgagacaccctttcaggtcaatagtgatccatgtgggccaggctgaggccctggcttgggcacagtcctgtaggcacagtccactgccaacgctatccacagacaaaattttctcaagcggaggggctgccacctctgtagggcaggacgctggtggggctgggctgctggtggttcaggtggaagtcacaaaccttgcnggaggtgtcctgcctctgcatgtccaggccccccaggcggcagggactctgctccaccaccagatgacaaagggctgcagaaacccgggctcctcaggctgtcccaggtgtcctggtctgaagagtgttccaaagcattctctccaggaaacgctgccacctgtgcctgggtcagcctcctaggctctcctgactgagcataaacaggcagcccactgacatcccgggatgagagagcagcacctatagaccccctcctggcttctaagttagccagtgcctgaagctgcgggcccgcctggaacacgctcccattgccaccagaaaccgtcgttgtatggctttcttcagaacggggagagacagtcacatttactggaggggaaaaacctaaacattttgggaaacaggtgaacatggcgtgtactgtgtcatggcccactcactgcactcaccacccaaaaccagctaggccaagtcacctgccctgcagaaaagtcaaagcatcgatgctccttgctccttgggattggtagcaattttaaaaaatacgtccctattctctattcacaaagacagattttgtattaaaaatatgctctaagagcc

SEQ ID NO: 352906 - DNA, 481 bp, Homo Sapiens
gggcttctcccggcctctgctgttggcagcaagagattcagtggtatcgttggacagggcttctcttctgggccttttcactgaggccagtccctcctccgcagcctgtgaagagaagacccaatcagctagaataggaaggaataggcaaaccgctacctcctcttcctggtgtgaacagaagaagccaaaccacgctaattcaccgtgcacagtcacctggcacccacttcagccatgcccacctcacgttccctcttctcgctgctagctccctctagctgctccccatccatgtctcggctgaggtgcttgggtccaaggttgtctgggtgtatttctttcttccgtaggaattctgtgattcctaatgactcagcaacctgaaaagaaatgggccaagagaataaacttcacccaaacagcacacacccccagaagcacattcacatgcaagaattaaacgacttcatagagttaa

SEQ ID NO: 352907 - DNA, 458 bp, Homo Sapiens
  misc_feature (416)..(416): n is a, c, g, or t
  misc_feature (432)..(432): n is a, c, g, or t
  misc_feature (457)..(457): n is a, c, g, or t
ctataagctgtgagatacaagccttgtgtgatttaggatcgcttggggtgaataatcctagctctatctgcagggttttatcgtggtttccctgagtttaaacatgtaacaggggagcagaaggagggataaatgatttgtttatgctcaataaagatgttgctgctgttctgtcagctaacctttgctttcataacctgcataaacttgcaaagtctttatttattctcctaccagcaaattattggaattcatagtcatgtctaattttagttagcttagggatggcactcaacagggttataaaagggggagaacatctctctcattcctgaatttccaaggctggattacggtaaagctgtggagatcacagtaattgaggtttcccaggacactcccatagtgggttatgntcccaaatctggtttntaagaaaatggatctggcctacctnc

SEQ ID NO: 352908 - DNA, 1228 bp, Homo Sapiens
gtgggacctcttcagctgtccatccaggcagaaccagttgcagcaggttgcccacatgataaatctgtcgggaagatttgggccagacacgccaatgcgccggccgcctgatgctcctgctccctcgatggtgtccaggagaatccgagtgctgggcacaaagctccaggagcgtccgagggcaggtttgagcctcccgctgtccctgtctcgagttatgtggttggtcaccaccactgccatgccaaggtcccgggccagggtcttcagctctcgggccagctgcatcatcaaggcccaagccttccctctgctgacctcccagaagtgggggaaacccaccgcagtgaccgagtccacaaccaccaccttcacagttcctgaagaaccagtcacctgctgggccacagtgcctcggagctcctgcagcacatccagcatctggaagatgtcaaatgcatgcaccacctggatcctccggagagcttctgcctgttcctcctcatcctgggttttagcctgaagcagctggaggaggcgggaagctgtcagccctccattggaatctacatataggacgttttgctgcaggccatgggccacatttgctgccatacagagacatacctgagttttgccgctacctgggcctcctacaatttcagtcacttctccagtatagagaccagcatcaagcagtttatcaagactgccaatgccagtggacaggatggcagtggaggtcttcagttcctcgtagagatcagcgccattcacggggaaagccgagaactgagccagcagcacccgcctcagggcaaccagggccttgtaagacaagccacatttctgagctacctcttccaggtctgcagaaaccaggtccaccactgtcttgatcctgtggctcctgagaagctggatcatctcctcggtaaggccagggcacagtccgaccctgagcacgcccatgttccccgcaggccggaacagccccagggggactgcacgtcacgtgggcattcgcggggggtcctctccagacgcccctcccctaccccttcctagagaggacacaggcgcgctggctgccggaggagaaaggagagaggaggaggcggcaccaagggtagggctgggggtcatccgcccgcccgggatccgccgggattcccgcgcccagagcccgcccgccgggtcgcgccgcgctgccgcttccgggttccag

SEQ ID NO: 352909 - DNA, 652 bp, Homo Sapiens
  misc_feature (249)..(249): n is a, c, g, or t
ggcgttggagaggaccccccgcgaaatcccacgtgacgtgcagtccccctggggctgttccggcctgcggggaacatgggcgtgctcaggtcggactgtgccctggcttaccgaggagatgatccagcttctcaggagccacaggatcaagacacccgtggacctggtttctgcagacctggaagaggtagctcagaaatgcggcttgccttacaaggccctggttgccctcagcgcgggtgctgctgngctcagttctcggctttccccgtgaacggcgctgatctctacgaggaactgaagacccccactgccatcctgtccactggcattggcagacatggagggcgcactcaagtgggaacctgggaggactgcagctgcctcaggtccccgcagggagatcgtggagtggggtcaggaatgctctgaagaaggcacgacttgggcatggaggaacagatggactttcgctgaatgctttcgatgaacgaggcactgcggtcagcacttcacgtcttgataaactgcttgatgctggtctctatactggagaagtgactgaaaattgtaggaggcccaggtagcggcaaactcaggtatgtctctgtatggcagcaaatgtggccatggcctgcagcaaacgtcctaa

SEQ ID NO: 352910 - DNA, 419 bp, Homo Sapiens
  misc_feature (12)..(12): n is a, c, g, or t
  misc_feature (17)..(17): n is a, c, g, or t
  misc_feature (44)..(44): n is a, c, g, or t
  misc_feature (61)..(61): n is a, c, g, or t
  misc_feature (78)..(78): n is a, c, g, or t
  misc_feature (401)..(401): n is a, c, g, or t
gtggattgtgcnacccnttagttaaatttcacctcccgacttcnagcatagatcacagganatcacatggcacacggntaaacacgtatggcttcaaatccatagccggtggtgtaaaatgatcatattcattcaaaggcctacacagtacaaatgagcacgctgccatgtactggtttgagcagtaggggctgcatcgcacagcgctcgtcccccgggacttacactgcatgattccctcgctgtatatcctcaaccctcccataatgcaaggccttgttcattgatgtgctttcgtcggctgtcggaaagttctgagcagtggctccagaccaccttgtcttgctacttggaactttttattcataccagcctttgaaaagttactgtgccaataaagnggtacaactgtgttcttc

SEQ ID NO: 352911 - DNA, 982 bp, Homo Sapiens
acgccgccgcggcgtgctctgcagactccgggtcgccgctccgccgggacgcgttggccggggcgcgcggtgcttggctgcggtgctcacactcatgaggagccggaagctcacaggtgcagtgcggtcttcagcgcgcttgaaagcacgaagttgttcggcagccaggttggcctctgcccaggaagttgctggttccacgtctgccaagacagcatgtctgacttcctcatcccacaaagccacagacaggcgaacgtccaagaagttcaaatgtgacaaaggacatcttgtgaagtcagaattacagaagcttgtccctaagaatgacagcgcttctttgccaaaagtgacacctgagaccccttgtgaaaatgagtttgctgaaggcagtgccttgcttccaggcagcgaggctggcgtttctgtgcagcagggggctgcaagtcttcctctcggtggctgcagagttgtgagtgactctcgcttagcaaagactagagatggcctgtccgtgccaaaacacagtgccgggtccggagcagaagaatccaacagcagctccactgtgcagaagcagaatgagccagggctacagacagaggatgtgcagaagccaccacttcagatggacaacagcgtctttctagatgacgacagcaatcagccaatgcccgtgagccggttctttggaaacgttgagctcatgcaggacctcccacctgcgtcttcatcttgtccttcaatgagcagacgagagttcagaaaaatgcatttcagagccaaagatgatgatgatgacgacgacgatgatgcagaaatgtaggggccatacaaaaataatgtccttgagtattaagtaccattaaacaatttgacaaatttaggcacattacaacgattgatataaaatgtattctcccagagaaatggtctaatcaactttcagaactgaccatctaaggccatagtgcacagcacc

SEQ ID NO: 352912 - DNA, 1132 bp, Homo Sapiens
  misc_feature (65)..(125): n is a, c, g, or t
  misc_feature (189)..(189): n is a, c, g, or t
  misc_feature (712)..(712): n is a, c, g, or t
  misc_feature (937)..(974): n is a, c, g, or t
  misc_feature (1009)..(1009): n is a, c, g, or t
  misc_feature (1072)..(1072): n is a, c, g, or t
  misc_feature (1074)..(1074): n is a, c, g, or t
  misc_feature (1077)..(1077): n is a, c, g, or t
  misc_feature (1092)..(1092): n is a, c, g, or t
  misc_feature (1096)..(1096): n is a, c, g, or t
  misc_feature (1110)..(1110): n is a, c, g, or t
  misc_feature (1112)..(1113): n is a, c, g, or t
  misc_feature (1121)..(1121): n is a, c, g, or t
  misc_feature (1123)..(1123): n is a, c, g, or t
  misc_feature (1128)..(1128): n is a, c, g, or t
ggcgcgctcagtctggcggcggctgccgtgagctgactgacgttccgggaacgccgcagcagccnnnnnnnnnnnnnnnnnnnnnnnnnnnnnnnnnnnnnnnnnnnnnnnnnnnnnnnnnnnnnatggtgtcatggatcatctccaggctggtggtgcttatatttggcaccctttaccctgcgtatnattcctacaaggctgtgaaatcaaaggacattaaggaatatgtcaaatggatgatgtactggattatatttgcacttttcaccacagcagagacattcacagacatcttcctttgttggtttccattctattatgaactaaaaatagcatttgtagcctggctgctgtctccctacacaaaaggctccagcctcctgtacaggaagtttgtacatcccacgctatcttcaaaagaaaaggaaatcgatgattgtctggtccaagcaaaagaccgaagttacgatgcccttgtgcacttcgggaagcggggcttgaacgtggccgccacagcggctgtgatggctgcttccaagggacagggtgccttatcggagagactgcggagcttcagcatgcaggacctcaccaccatcaggggagacggcgcccctgctccctcgggccccccaccaccggggtctgggcgggccagcggcaaacacggccagcctaagatgtccaggagtgcttctgagagcgctanagcctcaggcaccgcctagaatccttcgatctcgcttcaggaagaaaagtacctcatcctcggccaccgaaaccacgtgagtgagatgagccaacagcaccggatccacagaatgtttcttctctgccttaaagagctattcactaataacatagaaatccgcaagctgggtgtgctttgagtgtgcagcctcacaaacatggccttttctctctccccttccannnnnnnnnnnnnnnnnnnnnnnnnnnnnnnnnnnnnngctggggagaggctaaagggaaaggtagtaggggngggggtggtgacctttaagtcttctgaggttggtaattttccacaattggattgtcattatananagnatgtgttttttaganaaanaaaagaaacacccnannctgctggnangtaanttgt

SEQ ID NO: 352913 - DNA, 632 bp, Homo Sapiens
  misc_feature (8)..(8): n is a, c, g, or t
agaagtanataaatatggtcctgttttattctttagaaatagatgtgtagttgtaattgttatgctttacaactgcaaaaatattcattaacatgcattaacctgtaagcactggttagaggggtgtacccagtaaggtcatctcctaatctgtgtatagaacataatagagctctcctccctttctattcactcctgtccctagacctaaaagaaataaaaaaagttcctgactatgcatctaccagcgcatctgtgctgcttaaggctggacctacttttcttatcaaacagtataaaacaaacatacactgaattcctggtttcggaagtattttttcatatcctcaaccgagcataccaagtgttacatcttgagggatcacaacgaagcatgcattgatgtaaaacaataaaatggggagtagcaatggggctgttaccaaaaagcaactccaagaaaataagatttagcaaactgtaaaatcaaaaacatcacacaatgggacacttttattaacaaagtaaaggcttagtgaaaaagcagcaaatgagatagacattttaagtaaagaaagcatttctttgcttgaatgtcctttagccaattaaaaaattatttattttaaaac

SEQ ID NO: 352914 - DNA, 1425 bp, Homo Sapiens
  misc_feature (376)..(431): n is a, c, g, or t
  misc_feature (1114)..(1129): n is a, c, g, or t
  misc_feature (1339)..(1347): n is a, c, g, or t
ggctggatgaacagtctgtccagccctgggagcggcggaccttccccctggcgcacagtccccaggcggagtgtgaggaccagctggatgcacaggagcgagcagcccgctgcactcgacgcacctcaggcagcaagactggccgggagacagaggcagcgcccacctcgcctcccattgtccccctcaagagtcggcatctggtggcagcagccacagctcagcgcccgactcacagatgagcgggagacagccatctaaacagactcactaactattggcattaaagcttcagaaatctctgcgtttgatattcaaacatcatatgccggaaattttcacagtttttagtgaacttaaggaatttagatcctannnnnnnnnnnnnnnnnnnnnnnnnnnnnnnnnnnnnnnnnnnnnnnnnnnnnnnncttgtcacacacctgagcacttcctcccgttggcaaacagaagttcaggatgagaccctgctggcctggtcctggcacatcctctgcactgttgaatcactggacttactgatcttagatgaccaccccctccctcacacctgtgggcagggcagaacagcctggcgggctacagtttagcatggccttcttgagctagggtggaatggggcagggtgctctggactcttaccccctcccctcccatctgttggcttgggctctgctgtggcctccttggctgggtccctgggttttcgtgctggaacatccccaccagagcctctctgccataactcccagctgctctccccgagtgctcagctggcagaacacctttcctttctcacccagaacttaagagactgattttttgtttcatctgcatttggtcttctctgttttgactctttcactgcagtaacctggctgtggctgctcaggttcccctcctcatgccccttggtacccttccctgtctgctctcccatgccatgtacacacccacaacccgtccttccacttggaatatttttaccacctatcctgatctttgaaggtagggttaggactacttaacctctattcccactcccctgcaaactgggggttgtgggaagtgagcagccatctccctgtgtgannnnnnnnnnnnnnnnccctctgattcactttgccatgtttccttcacatccagatccctgtcggtgttagttccactcttggtctttcacgctccccttgcctgtggaacattgtctggtcctagctgtggttcccattgttcccccttcacccttctttgttaaccttgtgcctgtctcctgtatgatcacatcaccaaaaagggggaggggggagaagactcnnnnnnnnnggccattttgtaatcgtataaaaatagtagacaactgcttaatggttggggttttttcacaattttcaacattagtga

SEQ ID NO: 352915 - DNA, 300 bp, Homo Sapiens
  misc_feature (69)..(69): n is a, c, g, or t
  misc_feature (244)..(244): n is a, c, g, or t
gtaattccactcccatgaaactttggtcatttgtttatgcattaagtggggcttatctttggttttggngttcatttgaactcttgaaccttagtttagtgaagatgaactgtctgttcttaggtagaaacgcgtgtttatttaaaaatcagttttaaaaaatgagctaccatatgtgctgtctattataaatgggacaccaaacaaaattttctattacagttgtgtacttgcaaacattttnctatacagtacttcatagatgcatacaaatgagctcacttattacaaagacaaacg

SEQ ID NO: 352916 - DNA, 635 bp, Homo Sapiens
  misc_feature (575)..(575): n is a, c, g, or t
gctttcaaattattttattgcccatcaaattgtaaatgtttcttcaagactcttgatcagataattatgagaagtcacacaacatacaggagatgactgggcttcaatcgactttacttgtcaataacagagtacaactgaactttaagtgggagctgaatttctttctttcttttttgaaacagagttccactcttgttgcccaggctggaatgtaggggaccccatctcagaggagtaggagagatacaggccaaaaagcagagagctacaagggagagaacaatcatgaaggaaaagccagttaggtgaatggttttcagtgaaggatgggacgtgaacacggggccctgtgtgctggagcttcagaaaatggggtcaacccccaggcaccttttcagattcctgcctcctccccacagccctctgtgcccctacctctgctttttacctaaggcagaactttgttttcctcaaacgcccacttcctttccttatcccccaaatacacaaaccttgcctcttcctctccagggaaacgctgaccagtttgtgtgaacgccatcacccacacncttgaaatatatctggaaagtgccggaagtgaactgggggatccttgcctcccaaaacag

SEQ ID NO: 352917 - DNA, 1073 bp, Homo Sapiens
aagcgaggcctgggtggcgaattcggcacgagggcccgggcggcgcgcgatcgaggtcgggtcgccgtccagcctgcagcatgagcgcccccagcgcgacccccatcttcgcgcccggcgagaactgcagccccgcgtggggggcggcgcccgcggcctacgacgcagcggacacgcacctgcgcatcctgggcaagccggtgatggagcgctgggagaccccctatatgcacgcgctggccgccgccgcctcctccaaagggggccgggtcctggaggtgggctttggcatggccatcgcagcgtcaaaggtgcaggaggcgcccattgatgagcattggatcatcgagtgcaatgacggcgtcttccagcggctccgggactgggccccacggcagacacacaaggtcatccccttgaaaggcctgtgggaggatgtggcacccaccctgcctgacggtcactttgatgggatcctgtacgacacgtacccactctcggaggagacctggcacacacaccagttcaacttcatcaagaaccacgcctttcgcctgctgaagccggggggcgtcctcacctactgcaacctcacctcctggggggagctgatgaagtccaagtactcagacatcaccatcatgtttgaggagacgcaggtgcccgcgctgctggaggccggcttccggagggagaacatccgtacggaggtgatggcgctggtcccaccggccgactgccgctactacgccttcccacagatgatcacgcccctggtgaccaaaggctgagcccccaccccggcccggccacacccatgccctcctccgtgccttcctggccgggagtccagggtgtcgcaccagccctgggctgatcccagctgtgtgtcaccagaagctttcccggcttctctgtgaggggtcccaccagcccagggctgatcccagctgtgtgtcaccagcagctttcccagcttctctgtgagggtcactgctgcccactgcagggtccctgaggtgaagtaaacgccggcgctgggcttggccagtcggcagtgagcgtgaaaaaaa

SEQ ID NO: 352918 - DNA, 1221 bp, Homo Sapiens
  misc_feature (111)..(150): n is a, c, g, or t
  misc_feature (336)..(346): n is a, c, g, or t
  misc_feature (1179)..(1179): n is a, c, g, or t
cgacactcacttatctaagtggtgacggtgcggttgataaagcaccccccactggaatagaatgggttgtggaaaaaatggcaacgggagtaggggccacgatcaatagannnnnnnnnnnnnnnnnnnnnnnnnnnnnnnnnnnnnnnncttcattggcgcaatgggggagctcggggaagacgtctaggtggcggggcccctgccaactgctggggtattcaatcgccggggggccgtcggttagggtccggggcatttgaggggttaccggggccgcatcgagaagcctctgttacgggggtggcccattgggatgttgccgcgggccctgannnnnnnnnnnattcaacccgttatgggccagcccagggggcggtgattacttatgctggaggaaatggcgttggttagccggccagtcgtgctcgggtgggggcccaggtaaccattccacatacgggttacggaatggttttcccacccggaaagccgggccctccagcaagcccgggcggcgggggtctcctcaaagcatggatggggatgtcggagtactgggggcttcatcggctcccgccaggaggtgagggttacagtaagggtgaggacgcccccccggcttcaccaggcgaaaaggaggggttcttgatgaagttgaactggtgtgtgtgccaggtctcctccgagagtgggtacgtgtcgtacaggatcccatcaaagtgaccgtcaggcagggtgggtgccacatcctcccacaggcctttcaaggggatgaccttgtgtgtctgccgtggggcccagtcccggagccgctggaagacgccgtcattgcactcgatgatccaatgctcatcaatgggcgcctcctgcacctttgacgctgcgatggccatgccaaagcccacctccaggacccggccccctttggaggaggcggcggcggccagcgcgtgcatatagggggtctcccagcgctccatcaccggcttgcccaggatgcgcaggtgcgtgtccgctgcgtcgtaggccgcgggcgccgccccccacgcggggctgcagttctcgccgggcgcgaagatgggggtcgcgctgggggcgctcatgctgcaggctggacggcgacccgacctcgatcgcgcgccgccatcccgggaattccggaccggtcgctgcggnggggggtataagaaacagccgatgggtggggataaagagaat

SEQ ID NO: 352919 - DNA, 490 bp, Homo Sapiens
  misc_feature (2)..(2): n is a, c, g, or t
anaaatactgaccatttaattcctaaaatccaagaaacttagttttctaattagatccttaaggtacttagtagagctaactacattttgaaagtcttctgttttatattattcagtaaatgtttgggtggatagcagatatatttttctggataaatgcatccaagtattttattctttagttcattcttacttttaagtcttgatcatattgaatgcttctgagttttctattagaattcaggataagtaatataagcaatgcaaattttctcattaatttgaaggaatcgttaatagaatcagtctaattgtaaaagacattacatttgaaaaatagaaatgtaaatgtttactgtaacttaatactatgtcagtttagaagctgagttttcatatttcattataatcttaagagttaaggggattgaggttagtatttaaaaatttgcttttctgttattttgattaaatataaaaccatactaac

SEQ ID NO: 352920 - DNA, 2325 bp, Homo Sapiens
  misc_feature (2020)..(2058): n is a, c, g, or t
cggtccggaattcccgggatccgcgacacccccgggagacccaccccagctgctgctgccacactcgcgggcgctgcccggtaatggcctgggggagtcccgagtccgacgcgccgctggcctcagcctggacgcggacccctccgcgagcgcgtctgtgacccacggaaccggcaggcgctctctgcttgtggcgcccagagggcggcgctgacacgggcgcgatccgggaggcgaggcagggcagggcactttcgtcccggggcgatcccaagagacgccggctctgggaccctcgccgggtcctcgtcccgcagcctcttctcggcctcccgcgatcctgcctgcgccctctgcccaggactcgtctctcacgtcggctccccgccagtctcgggagcctccgcttccctcggctcccgctagcacaaaccggaacctctccccctccaccacataaacaaacccggaggccgggctggacgcgacccagagcctccgccacccgcttctgccactcaatggaggacggtctgctggagatcatgaccaaggacggcggcgacatgccggcgcccctggaggtgtccaccgtgccggcagtgggggacgtgatctccggggagtacaacggcggcatgaaggaactgatggagcacctgaaagcccagctgcaagccctgtttgaggacgtgagggccatgaggggggccctggacgagcaggcctcgcacatccaggtgctctcggacgacgtgtgcgccaaccagcgagccatcgtctccatgtgccagattatgaccactgcgccccgccaggcggcttgggcgtggtcggcggcaaggggagcttccagagcgacccccaagagccggagactccttcgcctgggatcggggacagcggcttgctgggtcgcgatcccgaggacgaggaggacgaggaagaagagaaggagatgcccagccccgccacaccctccagtcactgtgagcgccccgaaagcccctgtgctggtctccttgggggggacgggccacttgtggagcccctcgacatgcccgacattaccctgctgcaactggagggcgaggcctccctgtgaggggactccgtggggcactaccttcccgggctgtctttgggtttccgagtgcatgacgcgagggggactgaacggcgcggtgcggcatgcttcacttggacagctgctcttgtgggtcaggcagagagagactccctcgaggaaggatttgtagggtgaaggactttgggagcatcgagaattctttctgcccaactaagcgaattatagcgaactgcggaaaggtgaggctccgggagaggaagcgcccatctctggactcccatccatccctatcctgtcctttcccccttcccagacaacaggagaacccgtgaattgtgtaaataaaattctgctttttctattctgaaaaaggacttacctaggaccatggcaaataatctctaacaatttacctggaaattaaggaattgggggtattttgttctggcaacaggaaatttacccttctgctgaaatccaagatattcagtgctctgcagaagcctctccccctcacagatctctgcggctgctgattggtaaaggaagcttgaggagggaactgcagccctaggaatctgggtgaatggggttccaagggcccctgggctgggaggagctggctatgaatgtgcatgaagacataatagctcaacctctaggattttgcatgcagagcggatcctgccttgtcactgacttcatctgggattgcttttccactccctggggcttagagaacaaagagcccggttcacaggcagagactcgggggtgctcagcagcagcccagatttaggggacatttgagggactcttggggccgcagccaaaaactgtctctcctggctacacctgcttaacttcagttcctttttctgtcaatatgtccttgcccactgcctctcggtgttgccttcataatgtctnnnnnnnnnnnnnnnnnnnnnnnnnnnnnnnnnnnnnnnagccctcaggggcagggcttgtggctctggtgttaggttcaggggcttcagacccttctacgagctccaagctatcaatggcgcttttctctccctcttcccccaaccagggcatggagcatgtggctgtcctgaggttcttttactgatgtgccgcccttccacctcctcaagtggtgactttgtgtgccctccccctcctttgtgtattccttctcaatgctttccttggtgttaaccttaataaaaaggcgtcattctcccctc

SEQ ID NO: 352921 - DNA, 1286 bp, Homo Sapiens
  misc_feature (1217)..(1217): n is a, c, g, or t
tgtgtctgctcctctgctgcctctcgtgcttacgttcctgtgtctctgcgtttcgttcccgtccttgtggggtctatccgctcgttctcgcttgctccctttgaccctgcttctcttgcgtcaggtcgtggtcggcctccctgtgcgatggtctcgctccgttatgactctgggtccttccggactttcttcctccacattgttccggtattctgtgcctgacttccgcgatatcgtctaggcttcggatgtgtaagcgctcattctctggactcccaatccagtcccgtggtcctgtccctggtccccctgttcccatggctacctggtagcaactctgtgttatttgtggtaaagtcagaatttctgccttttttctattctgactaaggacttaccgtaggatccatggcaaagtaatctgtactatgttacctggatatgtaaggtacttgggctattttgcttctggctacatggatattgtacccttcgtgcttgagatccaagatatgtcagtggctcttgcagaatgcctgctccccctgcacagatctctgcggcctgctgacttggtaaaggaagccttgaggagggaactgcatgccctaggaatctgggtgcatggggtttccaagggcccctgggctcgtggacggagctggctatgaatgtgcatgaacgacataatagctcaacctctaggatttgcatgcagagcggatcctgcctcgtcactgacttcatctgggattgctttgtccactccctggggcttagagtacaaagagcccgggttcacaggtcagagactcgtggggtgctcagcagcagcccagatttaggggacatttgagggactcttggggcctgcagccaacaactgtctctcctggctacacctgcttaacttcagttccttgtttcacgtcaagtatgtccttgcccactgcctctcggtgttgccttcaaaatgtcttgtgtgtgttatgtgtgtctacttgtgtagtagtgtgtgaaccctcaggggcagggcttgtggctctggtgttaggttcaggggcttcagacccttctacgagctccaagctatcaatggcgcttttctctccctcttcccccaaccagggcatggagcatgtggctgtcctgaggttcttttactgatgtgccgcccttccacctcctcaagtggtgactttgtgtgccctcccccntccttttgtgtattccttctcaattctttccttgaaattaaccttaataaaaaggcgtcatctcccctc

SEQ ID NO: 352922 - DNA, 766 bp, Homo Sapiens
gtttggtgcctggaatgctgacctagatctggaaactagcccagatgaaagcaagaatgatgaggccacagtgtccatgaaagtagggtgaggagggtgtccagtggagccagagggagtgccaagagggaggtccttggaacacggaggatccagaaggcccaggagtagaaagcagcgttggcatttgtaagaaagtagaagaggtggttggccagaggacaggccctgttcaagatctgaccaggacatcagagctggcctctccctcccttcttccttgcaggccacagctgagcagccttaactgacacctccttggcaccagcacacaaacaatggcccatggcctgacgtcttccaggatgccctaggcccgtgcccttcacctgttctgcagctgtaagactgtggtgtttgccctccttgatccttccaggtactgccccaccctgttcttctccccattctttgagtgctgagattggccagtcccatgctgagatgagggagctggaggaggggagactggctctcactcctcattgctgcccattgggatgggatgaacttcacagctctggtttcctctgttcttctctcagctgcaggtgatttaagcttgttggatttatataacattgggaaatggtaaactgtgtaaatttgctatgttttccagggacagttatttatggaagggcatttttaactcgagtgctagaagtgttaaatcattataataaattcatgctattcagacttt

SEQ ID NO: 352923 - DNA, 960 bp, Homo Sapiens
  misc_feature (120)..(197): n is a, c, g, or t
ccgggggcccctccccccaggaaagctttcagctcatcggcagccgtcctctccctgctgcgcgggggccgctgctgccgccgtcgccgctcctccttgccctcctccttgtccttgctnnnnnnnnnnnnnnnnnnnnnnnnnnnnnnnnnnnnnnnnnnnnnnnnnnnnnnnnnnnnnnnnnnnnnnnnnnnnnnagagggggttttgccctccttaccttcctcactgctctccttgggtccggcctcctccagccccagcccgaagaggtccgagtcattcttcagtctgaaggcggggagagggagcttggggggtggggccggctcggcagggacctcatcctcgtcagtcacatcggaggggtcatctcgcacgggaaagtcatccgccctgcgctgtgtgtctgatccctcgctctcaaagtcggggtcatccatgacgaaggacagcatttgtgcagcaatgggtccctcaggggtcactctccgacgaggaggcctgctcacccttccccggctccatctcagcagggggcctggtgctgctgcgcttctccggacctgtgcgaacagagacaccgcctggccaggggggtgctgcggtcctcgtgggagctgtccccctccgtggcttcgaagctggtatggaggaccacttggtctctggctctgagcactgctggggagctggggcagggccttttgtgggagctgccacttctgcttcctcctcactcgaaagagtgatgtcttgactggggacggggcctgcaggcagcgggggactcccacgtggctggtcttcgaggtccacatcgtcctggaaccctgccaccatcgggttgccgcccagggcctccccatcactgtcgctgtcctgctgggcagccttggcccccaccttcttcgacgcgtgggtcgacgatatcccggaattccggaccgcaccagcctg

SEQ ID NO: 352924 - DNA, 1461 bp, Homo Sapiens
  misc_feature (563)..(637): n is a, c, g, or t
gtagcgaggcctgggtggcgtttccagacgagggtggcagctcccacattaggccctgccccagctccccagcagtgctcagagccagagaccaagtggtcctccataccagcttcgaagccacggagggggacagctcccacgaggaccgcagcacccccctggccaggcggtgtctctgttcgcacaggtccggagaagcgcagcagcaccaggccccctgctgagatggagccggggaagggtgagcaggcctcctcgtcggagagtgaccccgagggacccattgctgcacaaatgctgtccttcgtcatggatgaccccgactttgagagcgagggatcagacacacagcgcagggcggatgactttcccgtgcgagatgacccctccgatgtgactgacgaggatgagggccctgccgagccgcccccaccccccaagctccctctccccgccttcagactgaagaatgactcggacctcttcgggctggggctggaggaggccggacccaaggagagcagtgaggaaggtaaggagggcaaaaccccctctaaggnnnnnnnnnnnnnnnnnnnnnnnnnnnnnnnnnnnnnnnnnnnnnnnnnnnnnnnnnnnnnnnnnnnnnnnnnnngcaaggacaaggaggagggcaaggaggagcggcgacggcggcagcagcggcccccgcgcagcagggagaggacggctgccgatgagctggaggctttcctggggggcggggccccgggcggccgccaccctgggggtggcgactacgaggagctctaggccggcgtgggcagtggccgccctggggcggggggcgtgcctgtcactgcctggggaggcatttgcctctgtaccatcgcctttgccgctgccccgtggctgccgtgtgcgcttctgagctggaagaggccgggcattggtggtccccaggctgggccctgcaggtgctgggccttcaggcccagtgtgagcctgctctgcaagaagggaggggacagctggcttcagccaggctcggtggacaccctggccctctcggggcagagccgccagtgtttctcagggatgtgactgaggcccaggagggacctgtgagggtctgtttacagaggctgggcaggggccgcttggctgtggggtgtgcgctgccccggcacctgcttgccctccgcgctcatctggggccgcagcatgcctatggttccgcttccggccgggagccctgaacacgggtgtgcagactcaccctaaagggcggcccaggccccacgctagaaggctggcgagaccgaaggcagcatgtgaggcctctcctgggagtgggggttgtgtttcccacagtggcctcagctgcgcccccgctcaggtgagcccgaaggcaggagccgggaggcactcctcccaaacactccactcagaccataaagcactcctgtttcactctgc

SEQ ID NO: 352925 - DNA, 570 bp, Homo Sapiens
  misc_feature (64)..(64): n is a, c, g, or t
  misc_feature (67)..(67): n is a, c, g, or t
  misc_feature (70)..(70): n is a, c, g, or t
  misc_feature (73)..(73): n is a, c, g, or t
  misc_feature (84)..(84): n is a, c, g, or t
  misc_feature (90)..(91): n is a, c, g, or t
atcctcttttgcctggcctttgagaataacttactgtgtgacttttcggcaagttccttccccnacnctnggncctcagtttcncacttnnggaaagcaaggagtttgaccagatgatcacaatgggccttcctagctctggccaccaagaatttgtgaacattagagctcctggtctggtgggtagagccagagctgctgactggtctctctgcctccagaggggatttattggacctcagaggtggcagggccctatggagcaccaactgccctcaaccccaccctgtgcccaagactgggaagggattgatgtcaggctgtggccataggtagcatgagttgcccaaggagggacagagcatatctttgctgaggcttggctgaggggcttatgatagggcttgcagtacctcacagccccctgtgggcacagacaccctgaggtttacccaggcaaatatattgattagcaggacaagggctctctcctcagtttctgctcccttccatctctctcccatacttgtctgaaaagggagacaaaaaattttatacaagtggcatctc

SEQ ID NO: 352926 - DNA, 441 bp, Homo Sapiens
  misc_feature (123)..(123): n is a, c, g, or t
  misc_feature (428)..(428): n is a, c, g, or t
ataaggtctgttcttaaacctacctagttgattttcatatctttccataaagtgtcatgattctatcatagaccctgacttaacattgtaaggactatgagtcctccattttttaattaattntcttttagcaaattaggacttcggcaggttttcctctcctaaactcattctttcctccacaggattgctttgtccatctcctgctttcatttcaagtgcataaacaaaacctcaaagggcctgggaaggtgaggcaggccagagtctgtgttctgtgttgagtgtcaagctatttgttaagaaggtctgcaacaggcctttggtgtgggctctgccagagactgttctgaacactttgcttgagatccgtgccctgtaaaatggatatgatgttttactgatgtctgtaatacatttgtaaactnccaataaaatttg

SEQ ID NO: 352927 - DNA, 889 bp, Homo Sapiens
  misc_feature (327)..(348): n is a, c, g, or t
  misc_feature (664)..(689): n is a, c, g, or t
  misc_feature (736)..(736): n is a, c, g, or t
  misc_feature (783)..(786): n is a, c, g, or t
  misc_feature (788)..(788): n is a, c, g, or t
  misc_feature (806)..(806): n is a, c, g, or t
tacttcacaggtaaatataaaggaggggaaagtcacatagtgttaggaaaacattcctgtgttttgaatacgatgaatccataggatagagaaaaatctgcttgttctattctgagagttctctgagatatcccttcactctgcttggcatttggccattgatattcaacaggtcactgaccaagcttttctaaatttttcagagagagttacttaccaataaggtctgttcttaaacctacctagttgattttcatatctttccataaagtgtcatgattctatcatagaccctgacttaacattgtaaggactatgagtcctccnnnnnnnnnnnnnnnnnnnnnnagcaaattaggacttcggcaggttttcctctcctaaactcattctttcctccacaggattgctttgtccatctcctgctttcatttcaagtgcataaacaaaacctcaaagggcctgggaaggtgaggcaggccagagtctgtgttctgtgttgagtgtcaagctatttgttaagaaggtctgcaacaggcctttggtgtgggctctgccagagactgttctgaacactttgcttgagatccgtgccctgtaaaatggatatgatgttttactgatgtctgtaatacatttgtaaacttccaataaaatttgaatnnnnnnnnnnnnnnnnnnnnnnnnnnctcgacttttgtgaacaatagatcttttctcccctttattttgttcncttgacacttttgtgaaaattacctagcctgataaaaacattttgtnnnnanttgtataatactgttatnaaatatttataatcccagaaaatgttgtgttaaatcttgtgcaaaaacagtatattcagaataaaagtttatcatttaaagtc

SEQ ID NO: 352928 - DNA, 881 bp, Homo Sapiens
cagtgttcctgccatttgtaagttttcctataatattccttttattaactttaaaactggacttatcgggttcaaataggcagtatcccttttaagtgacctttgcaacccaagtgttacttgcttatttgatgctctcttgtattttaaatctcatttaaatctttgtctgtgaccaacaaagcttaagattttgtcttcatttaaaactctgaatctattccattgatcatgttagacgttcaaatgtttaatggtatagtctgacctagtgaaacaaaatggatgttgttactttttttaaagaatagaatgaaataactatttcacttgcccaaaattttaaatattttttcatctaaacttgtattgtttcccatagcagaatgtcaatattcacagtacatttctgtaaagagcaaaccaatataatgttttgagtgttgaaaaaaattccagatttttgaagaattagacaactcttcatcctaccttatttccagttcacacagttatcctcaaattccactgaaactaatgggatactgtcttgtgtagatgccagttgagtttataatgtgacctagtaaagctgtcctttttgttgtgttgtatgagtgtcggatcatgcttttaggaatacttttattaaaatggtgtgcattcatgcaaaaggccaactggcttttgtgaacaatagatcttttctcccctttattttgttctcttgacacttttgtgaaaattacctagcctgataaaaacattttgtaaaaatttgtataatactgttataaaatatttataatcccagaaaatgttgtgttaaatcttgtgcaaaaacagtatattcagaataaaagtttatcatttaaagtcaa

SEQ ID NO: 352929 - DNA, 551 bp, Homo Sapiens
  misc_feature (1)..(1): n is a, c, g, or t
  misc_feature (3)..(3): n is a, c, g, or t
  misc_feature (474)..(474): n is a, c, g, or t
ngngccatgcctttctgtatagtacacatgatatttcggaattggttttactgttcttcagcaactattgtacaaaatgttcacatttaatttttctttcttcttttaagaacatattataaaaagaatactttcttggttgggcttttaatcctgtgtgtgattactagtaggaacatgagatgtgacattctaaatcttgggagaaaaaataatgttaggaaaaaatatttatgcaggaagagtagcactcactgaatagttttaaatgactgagtggtatgcttacaattgtcatgtctagatttaaattttaagtctgagattttaaatgtttttgagcttagaaaacccagttagatgcaatttggtcattaataccatgacatcttgcttataaatattccattgctctgtagttcaaatctgttagctttgtgaaaattcatcactgtgatgtttgtattctttttntttttctgtttaacagaatatgagctgtctgtcatttacctacttctttcccactaaataaaagaattcttcagttt

SEQ ID NO: 352930 - DNA, 912 bp, Homo Sapiens
ggatacttctttcagaaaggggccactgtggaaagtgctggtggggtttgcccttgatcaagtgcctccattgtgctgcaagggctgtagacagcagggtgggacagtcagtcctccgagcagcaggaatcatcccgtcacctgcagccttcccatgcttccgcctttattcagaactttctgtgccactgtagatagctcaggcaaaactattacctgggtatttatccactaatgagtcacaagaaaaggagtggatttggtaagaatagagatttgttttatttaaaccacttcccattactgaccattaaaagctcaccactagagttcctgaaacaggtgaaacctgtatgacagcccttccactttggggagccacgcttttgatgtgacagtaccgcagagtgattcccccactgaggatgtcatcatcaaactcttctttggtgtgtgaattattagtggaaaagacccagctgtaattagacctccactgtgtacttagctggaagaacatgttaattctgcaatatgtttcttggttaaacattgcacagttcttacctcatttctgtaaataaagttttgtgaatctgttttgtattgtgacaaattcataagataacattgatattttgatttgtaatatttctaattggtagatttaattgaaaagtaaaattaatttatttttatatgttcaggggaattttaaagtcaaatcttttgtagataatttaaaaaatcagtgtggtttattttacttatttaacccactggttgttattctgtaacagtttgtataaatggtaaattttgaatgtgttgttattttacctagatgtaaaattccacatgtattaaaatgtacaaaatgttttgttaataaaatttaataatgtttataaa

SEQ ID NO: 352931 - DNA, 365 bp, Homo Sapiens
gcacgaggaaatttgtatcgcaaagctatatgtgcatatgttatttaattcatctaacgctacacaaaagcataaaataatgatttttcactctctttaaaaatactaaatcatttatgtccatttctcaattttttcattgatctatgctttgagtttgctttctcaacattattgtattttccacttattattactgtataacatatgctagtgtttagttggattaatcttacctaaaagtactgaaaaatgctttttagtactttttcatattttatacatttattttccgaatgtatcattgaataattttattgagttataaaagtatcttattgctatttaataaaaaattaacacat

SEQ ID NO: 352932 - DNA, 209 bp, Homo Sapiens
  misc_feature (4)..(4): n is a, c, g, or t
  misc_feature (17)..(17): n is a, c, g, or t
cacncactagcgcgcanatatatatatacagtgtcaacattttcagagcacttacattaggaaacattgtttctcttcaactgtatgacaatactgtatatgccacaataaaatttacaaaaacaatcgcatcagcagtcataacaaacatcatgattttacatttcaatacacaaggaaaaaaaatagacatcttcccggcacttggc

SEQ ID NO: 352933 - DNA, 285 bp, Homo Sapiens
  misc_feature (262)..(262): n is a, c, g, or t
atttctcaaaagctgtctgcaattgcagctctgacatttaattctctcaccattgagtatttattagtatgatagcatgcagctctttcccttctgcgggatccctctctattcagtcttgactgcagatatatgcagaatttcccttgaggtaagaaaaaggcagacatgtctaagttttctccttttcattatgccagggggaaaccagtttctgttaattctggtaaccatgttatctaactctcaaaacaggaaaaanaaaaacctcgtgccgaattcctg

SEQ ID NO: 352934 - DNA, 129 bp, Homo Sapiens
  misc_feature (1)..(2): n is a, c, g, or t
nntttggctatagaatcgtcttaagtgcatgagatatacaaacaatacaaacacacccatgaatatatacacataatgtcaccatatcggtaacttgaggttgttcaaaatgcttatattttccctagt

SEQ ID NO: 352935 - DNA, 421 bp, Homo Sapiens
  misc_feature (13)..(13): n is a, c, g, or t
  misc_feature (17)..(17): n is a, c, g, or t
  misc_feature (20)..(20): n is a, c, g, or t
  misc_feature (33)..(33): n is a, c, g, or t
ccgcggtgggggncgcnctnagaactagtgggncccccgggctgcaggaattcggcacgagcttgagctaggctgctgcctgaggttgattcaacatcccagctccagtcaacaacaaaaattctaagtctcccgcctaatgctgctgtggtgtgtcatgccaaaaaagtgggctactcaggttagaccaatgacttcagaaccacagggctcagaacaggaaggagcttctttctgcagagctgattcctggaaagccaccagcactccaccttctgcccagaaatgtgattcagtcaatagctgatgaggaaaagcaacctgcaaacattaggaagaaggagaaaaataattcagaggtgatgataccacctccaatgaacagggaagcaagttcatcagtaacaaaagtcagtgaggc

SEQ ID NO: 352936 - DNA, 428 bp, Homo Sapiens
  misc_feature (112)..(112): n is a, c, g, or t
tggcctaattgttgggtcttttttctgagcttataatgtacctggaaaataaacctcttgagaaaaagaaaagttcatactgattattggaaaaggactatatatgtgagcnaagattgtgttttagagaggaaacttgaaactccaagaaagcacttgatgtttttatatgcttgtagcaaattgatgttctaactgtagttttatagaaagtattaatgcttttatgtatttcaaaactttcatatgttaaatggaaattgttttaaatgtgtttgagtttatgtaagcatgtatacactgtgctaaaagtcacatgtttcagtttgtgtataatattaatatgcaatttttggtttaaatttttgtcttaaaatattagtggcttacattttaaaaaagaaaaatcaccagcatgaacttgcaaa

SEQ ID NO: 352937 - DNA, 446 bp, Homo Sapiens
  misc_feature (49)..(49): n is a, c, g, or t
acccttacaaactggagtttatgttgtcttgcccctttttttagccacnaaaaaaattgtacttttttattgtcgaattgtttaaaagacttcattctttacttgttcttacgaaaaggatataagggagaagaatgcagtaattgctgtacgtgtatcatcattccagtttctaaaaacagccagccagcttttttccttttaagattctccagaaggctgcaaggccagaaccacaaatatcgggtgccttcctttggaaatatttgacctctcttctgtgaagagaatggtacttaacagactactactagtgctttgtcagtaccgaagtctgaatgcccagtccaatggcatacattatccttaaggtttttaatcccacctggaaaaattgtgatagaattctcacaaaataaacccagggcattacatgttgacaaact

SEQ ID NO: 352938 - DNA, 1433 bp, Homo Sapiens
gggggctccctgctgcagttcgccgtacttccatctgctgggtgcctccatcgttggttgggtggggatggggcattttctgagctaagctttgtcattagtttgtgaagcacctggtcagcaacctgccccagacctggagggtctttgtggactgaaggtagacaccagccagcatggtggccctgttctgggggagcaggataaggcaggaggaagtgggtgagctccgagatgatgagcacatgaagcctgtggccccttcgtacctgcaatatgtcaggagcctcacgctcacccaagatcctgcaggggccaggctccatctcactggctctgagggcaggacagggtatcacacatttctcaccaggcctcctttcctatgggcattggtgcctcccagaggtttcttgggctgctggctggtgagagaggacccttaaagaagatcaagccaagctgaccttggaccctgtccagcacagcttctggcacaggatgcttggtgaatgtaccctttctttccctccctgcagctctgagggagcccctgaccttgtagtgggtggaggaggtaaggggcctccctccctaaatctgcctcttctgcaagctacttggagacttgcctagttgtacccacccctccaggtccctggtgctagagcttctgagaagggcctttccctttcctctttgcctgctatataaggcaggctcctgtggctctgctggctcagtgtgggctgcaggaggactgcagactcagctgcaattctgaggggggtttgggaggcttgtgcgaggtctcaggcctgtgtggggagctggtgcctcttcctgcccgtatctttctcttccaagggcagtgctccaaggcagggactggagaagccaaggggagagtctaaaagggctagagcatttttaaaaatagacacagggtcttgggactggggtttcggattgagttgcaagcagggagaaaacctgaaggtcggtgcccctatggggctgaccagtagagaatttcctttactgtatttttgtgtctggtcttccctttctggcttctaggacatccatgccaggtgaggtgcctgggtccctgttacaagtcaggagccctgtagggagacccctccttttgtacaagtacctgaatgctgcgacaagcagatttttgtaaaattttatattagtttttaatgtcagtggcgactcggttcctggggctgcagccagcctgggacttttgtaagaatttttgggtgactcacttagatgtcgtttccttcttgccccctcttcctctctgtaatctaagtgcattaaacatctttgcagaagtgcctgggttgtgtgctcatttctggctgcctgaagtagtggagccggaagcccggggccctggcagagggagtgggttg

SEQ ID NO: 352939 - DNA, 377 bp, Homo Sapiens
  misc_feature (3)..(3): n is a, c, g, or t
  misc_feature (5)..(5): n is a, c, g, or t
  misc_feature (7)..(7): n is a, c, g, or t
  misc_feature (58)..(58): n is a, c, g, or t
  misc_feature (74)..(77): n is a, c, g, or t
  misc_feature (82)..(82): n is a, c, g, or t
  misc_feature (117)..(117): n is a, c, g, or t
  misc_feature (231)..(231): n is a, c, g, or t
  misc_feature (259)..(259): n is a, c, g, or t
  misc_feature (308)..(308): n is a, c, g, or t
  misc_feature (344)..(350): n is a, c, g, or t
canantncagtgcaagtctatgatataagtggtgtagagtggttttgttgctaagagnaaagtgctaaaaaggnnnnggggngaaaggagggcctatatctcttgtgtagctcagancctttgggtatttaatgtacagtttcagcaaaagacacccagaattatacctctggttggttcaaaattgcttaaatggtgaaacatatggtctcatgttccatttgttagcanacaaccagctgttctcagcctgccaaantccaagtaaacatccactgtgtggaagagtgaatctgaaatggttcagnaaaaacataaaagctggttttgctgaagaagaagannnnnnnaaggccaccccgaaacaacagctagtg

SEQ ID NO: 352940 - DNA, 647 bp, Homo Sapiens; identical to SEQ ID NO: 4629

SEQ ID NO: 352941 - DNA, 833 bp, Homo Sapiens
  misc_feature (742)..(742): n is a, c, g, or t
gggggcccgctgggtcctagcgccggccctcggctgcgcagcctgcctgacctcccggaagccggcagggggcagatgcctagcgggacttggagctcagggtggctcagcaaaggctctcttttcaggaccacactgagtgcacccagagtcaagagcctgcgtgtggaagcgatcctgtgcagcatgtaaaagaatggcattcagtgagctgtgccatcacatcaaataaagaaaatgtaaccgtggccgcagagatctccgtgggatcacactaagcagttactaaaagatgtaactgaactgcagatccttggtgaaatatctttcaacaaatctctatatgagggactgaatgcagagaaccacagaacgaagatcactgtcatcttcctgaaagaggagaagtacacactctttgcctatcatcattaaaagcagcatcggaggactcctggtcttgatcgtgattatagccatcctgttcaagtgtggctttttcaaaagaaaatatcaacaactgaacttggagagcacaaggaaggcccagctgaaatcagagaatctgctcgaagaagagaattaggacctgctatccactgggagaggctatcagccagtcctgggacttggagacccagcatcctttgcattacttttttccttcaggatgatctaagaccagcatgggacctgttgggtagaaatatttagttttttaaccaatacatttgttcccaanaagtggtcctgtgccattggtggccacaaaggttaaacctttaggaaaaactttttgggtaattaaaataacattttttacccctttttta

SEQ ID NO: 352942 - DNA, 1433 bp, Homo Sapiens
  misc_feature (844)..(980): n is a, c, g, or t
  misc_feature (989)..(1127): n is a, c, g, or t
  misc_feature (1231)..(1239): n is a, c, g, or t
  misc_feature (1305)..(1313): n is a, c, g, or t
ccatcactgatttactgatttaagctagccaaactgtaagaaacaagccatctattttaaagctatccagggcttaacctatatgaactctatttatcatgtctaatgcatgtgatttaatgtatgtttaatttgatatcatgttttaaaatatcctacttctggtagccatttaattcctccccctacccccaaataaatcaggcatgcaggaggcctgatatttagtaatgtcattgtgtttgaccttgaaggaaaatgctattagtccgtcgtgcttgatttgtttttgtccttgaataagcatgttatgtatattgtctcgtgtttttatttttacaccatattgtattacacttttagtattcaccagcataatcactgtctgcctaaaatatgcaactctttgcattacaatatgaagtaaagttctatgaagtatgcattttgtgtaactaatgtaaaaacacaaattttataaaattgtacagttttttaaaaactactcacaactagcagatggcttaaatgtagcaatctctgcgttaattaaatgcctttaagagatataattaacgtgcagttttaatatctactaaattaagaatgacttcattatgatcatgatttgccacaatgtccttaactctaatgcctggactggccatgttctagtctgttgcgctgttacaatctgtattggtgctagtcagaaaattcctagctcacatagcccaaaagggtgcgagggagaggtggattaccagtattgttcaataatccatggttcaaagactgtataaatgcattttattttaaataaaagcaaaacttttatttaatnnnnnnnnnnnnnnnnnnnnnnnnnnnnnnnnnnnnnnnnnnnnnnnnnnnnnnnnnnnnnnnnnnnnnnnnnnnnnnnnnnnnnnnnnnnnnnnnnnnnnnnnnnnnnnnnnnnnnnnnnnnnnnnnnnnnnnnnnggttggggnnnnnnnnnnnnnnnnnnnnnnnnnnnnnnnnnnnnnnnnnnnnnnnnnnnnnnnnnnnnnnnnnnnnnnnnnnnnnnnnnnnnnnnnnnnnnnnnnnnnnnnnnnnnnnnnnnnnnnnnnnnnnnnnnnnnnnnnnnnggggggaacccggggtttttaaaaaaacccaaagggggttttggggggtcttttcgggatttctcaccaggggggccccagggggctcttatatataaatcttnnnnnnnnngtggcgaatttttggggagagtggtggataattatttaaaaaactttccgcgccccgcgggagaannnnnnnnnaaacgggggtgttggacaaccctttgataccccccccgggggattcaccaccccccttggcggccccttgtggagaaaataaattttctcccccccggtggagaaaaacgccgggggccc

SEQ ID NO: 352943 - DNA, 442 bp, Homo Sapiens
  misc_feature (21)..(21): n is a, c, g, or t
  misc_feature (26)..(26): n is a, c, g, or t
  misc_feature (41)..(41): n is a, c, g, or t
  misc_feature (47)..(47): n is a, c, g, or t
  misc_feature (263)..(263): n is a, c, g, or t
  misc_feature (271)..(271): n is a, c, g, or t
gaggtaaggccttttggggcnacccnaaggtaaaaaaaccnccaagntttaatacaaatggtaccagttttttaaaaaaacctaccccacaacctagccagatggcctaaaatggtagcaaatcctccgccgttaaattaaatgccctttaagagatataattaaacgtgccagttttaatatcctacctaaattaagaatgaccctcattatgatccatgatttgcccacaatgtcccttaactcctaatccccggactggnccatgttnctagtactgttgcgctgttacaatctgtattggtgctagtcagaaaattcctagctcacatagcccaaaagggtgcgagggagaggtggattaccagtattgttcaataatccatggttcaaagacatgtataaatgcattttattttaaataaaagcaaaacttttattt

SEQ ID NO: 352944 - DNA, 505 bp, Homo Sapiens
  misc_feature (408)..(408): n is a, c, g, or t
  misc_feature (457)..(457): n is a, c, g, or t
  misc_feature (465)..(465): n is a, c, g, or t
ggggatgtctgtgtgccatcatctcattccatctggtcattcctttgcccattcatccatccattcattcaagtcaccccatgcacattttccaagactgcctgtgacctggccctgtgccgggcagagctgaggatgccaaggtgaattcctcctgtgcctggccccggccccagtctgctggaagaaccagacacagacaatcacactgcggggaaacacgtgctccatcggaaaagtccagagcagggggtgggcagagaggccagcgtgcaccagagcctcgctcaggtcagcgccaggcctgcctggagcagccaactgtgggagaagaaggagttggtgaaaggtgggtccacctgggccgtcacagaagggctgaggggtagggggtgaggggttgaagancaggcctgcgccatgcacacggtgtcctctgtcctgctcctgggggggntgaactgnatggaggccccaggggtgcccgtctataactcgtgagggg

SEQ ID NO: 352945 - DNA, 950 bp, Homo Sapiens
  misc_feature (230)..(244): n is a, c, g, or t
cagaaagaaagaaagtcaaagaaataaagtcaaagacaagaaggtgatacagagaagacagaaaaggaggaggagagagactgacaggtacacaaatcagagaagtcccagagataacaaaaacacaaccacagagatagggagacgtaagccggagaaagacccagagattcgcatagaaagcaacgtggagactcagaagcaagcacagcatcaaggaatgatcaatnnnnnnnnnnnnnnntatttcctgaggacttccaagtacaaggccctgcaatctcaggccacttctgtcccatctctgccttcagagggggggacaggtagtccagacaattagaatacagagggggctgtgttctgacggggccacgcaggcattgaggaaacgcagcaggcccctcccctagctggggcggggatgtctgtgtgccatcatctcattccatctggtcattcctttgcccattcatccatccattcattcaagtcaccccatgcacattttccaagactgcctgtgacctggccctgtgccgggcagagctgaggatgccaaggtgaattcctcctgtgcctggccccggccccagtctgctggaagaaccagacacagacaatcacactgcggggaaacacgtgctccatcggaaaagtccagagcagggggtgggcagagaggcccagcgtgcaccagagcctcgctcaggtcagcgccaggcctgcctggagcagccaactgtgggagaagaaggagttggtgaaaggtgggtcccacctgggccgtccacagaagggctgaggggtagggggtgaggggttgaagatcaggccctgccgccatgccacacggctgtcctctgtccctgctcctgggggagctgaaactgcatggaaggtcccccaggggtgccccgtctaataaactcgatgaagaggaaaaaaaa

SEQ ID NO: 352946 - DNA, 403 bp, Homo Sapiens
aaatgtatacatgtgataaaatgtcatgtaaatgtgcacatttcacccaatgacaatgtgctggttgtgatattgtacaatgttaatggaaaatatcaccactggggaaaattgagtggtatgtgtaaacggtactatatttgcagcattttgtgagtctttattttaacataatatgtaaatatgtaaagcaactagaagaatggttttaatacaggagagtaacagcttataagcaagagaaacaaaaatgataaataatgtgaacacttaccaaaggaagggtggaacagagaaataaaggacagggaaaattatctgggatgattcctaaattccaatatttggatggaactatacagaattttaatatatctggaaaataaactgaaaatattaacgg

SEQ ID NO: 352947 - DNA, 476 bp, Homo Sapiens
  misc_feature (32)..(32): n is a, c, g, or t
  misc_feature (54)..(56): n is a, c, g, or t
  misc_feature (234)..(236): n is a, c, g, or t
cccaaaccagaggcatatgctgctagtagaanttttatttgatcctgcgaactnnncttataggaaaagtaaggcaaaggatgtgtagtgcaaccatctgataaactagtgtgattgtatttatcctctgttctgtgtatttctgtaatggaatctttacaattcccaaaacggtattttagacctactggaaatctgtatcgaaacagctatgtgattctgccactgagaaannnaaattttttaattcgtttttcttatgctggtttgtttttctttaatgaagaaattgatctcatatggcatcatagatgctaaataaataaaagcatcatacttctctagtttgcctgcattcagtggctaacattatgagcattgtgtaagataaacacatggtcagtatcaatgtaaatgttagagccatgattaattcctatgaaaattgaaattaaatgtcaaagacaactagacat

SEQ ID NO: 352948 - DNA, 1228 bp, Homo Sapiens
  misc_feature (46)..(61): n is a, c, g, or t
  misc_feature (157)..(171): n is a, c, g, or t
  misc_feature (951)..(959): n is a, c, g, or t
ggggttttatgaaaccaaagactagtgcagcatttcagcatatgtnnnnnnnnnnnnnnnngggaattgacatgtcacatatcaaatgaatggaaactttgttgaaactttaaaaagcaaatttactccaaagacttgtattggaaattacataccnnnnnnnnnnnnnnnaaaggactacagattatttttaatgactaaattggagtgatacttcttacactaaaaattatttcttaggcattctgaatctgggatgagaaacaggattgtttcacaatagtaagcacataatttttaaggccaaggcacatttgactcctgagatgaattttttgtggtcataatcaaatacttagttgtttttgatgccccaaaataaagtgagaatggtaatttgccaggaattcttcataacagtatcttacaaaaaacgtgttgctctcttcacagtattatgtgtaaagtcattgtttaaagcacgaatgttccctctggggtacttgttaaagctaaatttattttgcttccctccacttagaagtgctgcacactttacagcagcttcctttctttccatggcactgcctagttaacagaagtcttataaaaatttaaaaagacacatttcttacaaaaaagagttgaatgaggtaaaatggcattagatggctctatattttttaaagctatgtaattgttcagcgtcacttttctaagtacttatacatatctaaacatgtcttcatggtttatattttcacttatatatgctgggctggattaagctttgttgtgattgtgaccaacattcaggccacgtgagcactgtcttatcacatcgccaattagttgtaataaacgttcaacgtacaaacactggagtgtgtttttatctctttccaaaagtttgtcaaactatgcagagctgctgaaggaagaatttctcannnnnnnnncagtaaaatgttgaaaattcccctccatttgaatatggtggttgttataagcacacacaagatacatggtggaagatctaaggagtcttcatgtacttcattaaaaaataacatggattccatactgagagcctatctacacatttattttcaatcaataaatgctgcttttaaaaccttgaaacaaagagggacggaaccgaaacgacggggcacacagcacacccccaagagagcagcacacgcgcacaacacccagcggggggctt

SEQ ID NO: 352949 - DNA, 442 bp, Homo Sapiens
  misc_feature (424)..(424): n is a, c, g, or t
tcagttcggaccactgcaccaacactgtcgtatccttgttaaaatggtgtgtaccttacaaattataatttatgtgcccaggttcgttttgtacttaatttgctattattgtgatgtgtataaaatctttaatcttggttcttagtactttgaattggtctacaggtatattcctgggatgaaaggattgccaaacccaaatatagactagattatccaatgggtttgtgtctttgttccattctcaacatttcttctttcaactataagtaatccccaggtgtggggtagcaagtgtgcttccgtcaagataccatattctcctgctccagtataacagcttgcaggcaataaaaatctatttgctcataactacttctgtatttattagacttatatagagcaaatgcagtaaaagaggtantcattgtttcaaacatcc

SEQ ID NO: 352950 - DNA, 573 bp, Homo Sapiens
gggaagttaagtaacttgctccaggccagcctgctggtcattgatcaccctggtttcaaaccctgtttttagctccgagcttcctagttgggacttacttaatgtcacctgcattagaatgagttgtttacagtacagtctaggagcatcttatagtgatggagaacactgcctttggaatcatgcaaagctaggttcagtcttcgttctactacttatttctaccactttgagcaagttactgtatctgttataacggaggtgttgatagtagctcctacatttgtgaggacaaatgacaaatgaggtgttgatagtagctcctacatttgtaaggacaaatgagaaatgtaggtgtaataatacagagaaataatttcctggtagctagaaatagagttattttgggtgagaagttgggtaacctggcgatgggaacaccatcttctacagtcatttctttagtaaatttcctggtatttttgttgaacggggtgtgtaagctgagggggagatttatgaaagaagacgatgaatacagatgataaaattctaataaagtttctgctgtat

SEQ ID NO: 352951 - DNA, 684 bp, Homo Sapiens
  misc_feature (34)..(34): n is a, c, g, or t
  misc_feature (41)..(41): n is a, c, g, or t
  misc_feature (47)..(47): n is a, c, g, or t
  misc_feature (63)..(63): n is a, c, g, or t
  misc_feature (68)..(68): n is a, c, g, or t
  misc_feature (90)..(90): n is a, c, g, or t
  misc_feature (102)..(102): n is a, c, g, or t
  misc_feature (164)..(164): n is a, c, g, or t
  misc_feature (280)..(280): n is a, c, g, or t
ttttgacccagtcccattggcatgttaaatgaanaattccnatgtancattgagaatttccantagantgccattaaacagcccaaattncctcatgtgaanttggcttgtggacaatttgtgtcagatgagaaatgtgtccagataaatttaatcttggttantagactttaccaaattaatgtctacataaggaggaaacatgttgaccagatccaaaggttaaaatgtacatagattcccttggattaatttttaagtcactgtttaatcccatgcntagtattcttatgaatgtttgtggtttcatagatttatgcactttgaatatcttgtcacgtgcagtgttaatgttacctgttcttgtctctcagcattttgaatgagcatcataatcagagtagaaggcaagttaaactataaaagtgtcaagtggcttgttaacttcttaatttaatggacctttacttagaatataatatgttggagcctcttgggaccaaccgatgagcgacagtttcatgtttagatttgtattgtttctctgtccaagtccttattctctatcttgtggggaggggtgacaggggagggttttactttttttgcaaaaatgtttgaaaatatctgtcagattttatattcgttagttataataaacttatttttaaagtaaaaaaattt

SEQ ID NO: 352952 - DNA, 1066 bp, Homo Sapiens
ctcgtgccggggtaaatgacaaacgggaccaatgggtttgccaagccctttgctgttcgcagcctcacattcccccggtgcctctcccatggctttgtgctgctgagtcgctctcatgaagcccttagggagagcacctgttgtgtgcctgacaccacgctggagctgtgtaccaatcgtctcagccttcattaggaggccgaggtaggagtcttatatcccaggtgaggaatttgaagctcagaaaggttgaggggctccccagaggtcacacagcctgtgtgcagtggagctggcaccattcagactttcagccgactcagcaactttcccttgccctgggctgcctcctcctgagagctgttccccaccgccctgcctcttccggttggaggctctcatgtctctttggggagagctggcagtgtgcggagctgataacattttcccaatattgagcagttcccaaggacagtcagcatttctagacttccacaaaattatgctgcatttggctggagcccggtgttcagtggtttccctgcccgaggtcgctgcagccccatctaccacatcttcatgtggacattgagattcacatgctggctcctgaagggtgctcagtctccttggtgattaaggtcctgcttgaactgctgccaactccatgtcagggaagtcgcttttggtgcctggctggtttgcccagagccaagctggggcaaggggcagccagccctggcttccaaggctcccgtactgtctgtgtccttgtataaggagctttgctcttggaattactgaaagtctgtggcccaagagagagacacaagtggccttaagtctttttgaagtgttatttcatccagggaaatgcctcgagccatagagcctgaaatcatctttgttggctcagaaaataccttagcttcactcagctggactgcattgaaggcgaggctgccccttggatcaagcagaaaacaagagaaagaaagaacgttccctttggggatagtctggaaagttgggatttgcaaataaaggctctggaagcattaaaaaa

SEQ ID NO: 352953 - DNA, 2260 bp, Homo Sapiens
gccgccacctccacgccctaggccgggccgacttacggagtcgccggaagcggaagtcgctgaggggtggtgaagcggttgggaaagtgtcggtttatcttcgcgccccttgcgttcttgccgcggcttgcctgggcagacccccatcatgggcaataccagcagtgagcgcgccgcgctggagcggcatggtggccataagacgccccggagggacagctcggggggcaccaaggacggggacaggcccaagatcctgatggacagccccgaagacgccgacctcttccactccgaggaaatcaaggcaccagagaaggaggaattcctggcctggcagcatgatctggaagtgaatgataaagctcccgcccaggctcggccaacggtgtttcgatggacggggggcggaaaggaagtttacttatctgggtccttcaacaactggagtaaacttcccctcaccagaagccacaataactttgtagccatcctggatctgccggaaggagagcatcagtacaagttctttgtggatggtcagtggacgcacgacccttccgagcccatagtaaccagccagcttggcacagttaacaacatcattcaagtgaagaaaactgactttgaagtatttgatgctttaatggtggattcccaaaagtgctccgatgtgtctgagctgtccagttctcccccaggaccctaccatcaggagccctacgtctgcaaacccgaagagcgctttcgggcaccccctattctccccccacatctcctccaggtcatcctgaacaaggacacggggatttcctgtgatccagctttgcttcctgagcccaatcacgtcatgctgaaccacctatacgcgctgtctatcaaggatggagtgatggtgctcagcgcaacccaccggtacaagaagaagtacgtcaccaccttgttatacaagcccatatgaagagctgggggcggatggtggcccaggagacagcacaccaccaggctccacacgtgcatgctttccccaagagggaatggactgtacattgctcatttcacactcttcagaagacatttcatacctgccctggtcctgcttgaaggtttgtccaggcagagcagctcctgcagcgcctcggtctgtgacagtcctcctagcacccccatggctttgagcctcggggactcatcaagtccaagaaaagagggaggggtggcagaggatctgcagccctggccccgcggtgcatgaggctgggtgcagttctaaacctacattctcgatttttcttaagccaaaaatgaatgctaactcctttgccagtaaaattctgggaaacagggactgaggccacacatcatttccagtcatctgtgtgtttttaaggccagccacttgtccctgttgaggcctggctatggaactaaatacagtgttggtcttgcctgtccttcaaaatcaacaacagattgtctctcggctccagggaggtgtcatttctatagaaattagaagctttctgatttctagatgaggttttacaattgtttcttacagtcatgtgcactaagtactctttttgtaagcagaggtggctggctctgcagccttaaggccattttttaagtcaccacgtctagaagtcacatgaactctgctcagcaataatctgttctcagaacagacttttcaacctgctgccggatttctccattcagctggatgatcctcaggactgaccagttagctggcaggttgtccagctttttattccagtcataataggtgacagtgttaaccgtgaaaacttgagaggcactctgccctcttccctataaaatcacacagcgtgattttacaaggtcccgtggcaccttgctcaggacctctgcccctagttagcaagactgcagcagttgctgttgcttattctgaaaggaatgtagaacttgacagcagccttctgagtctgggtcaggaagatgtcctttggaccaaagcagacttctttatacgcagctcagtttcccgggagtcgccacagatgtacccactagcccaggttgctgtgagtcagcggaagctcccgttatgccctttgctcctggtgggagagggaggagtgagctccctgggttccagtatttacttggtatacctgagtttgggggtacccttttttgtgacttttcaaaacagtgaattactgtcaccttgatggacaagtttcaataaaactttgtaaaaataattgga

SEQ ID NO: 352954 - DNA, 1084 bp, Homo Sapiens
gttaccccgggtgggttttccgtttaaaaccccaatacacttgcaattcccttaaaaaacacagccggttataagggggtccacccagaaccggattttgggttcaggaaggcaaaagctggattcccgggaaaattcccccggttgtcccttggttcaggaagacccgggaggaagaatgtgggggggaagaataggggggtggccccgaaaagcccttcttcgggttggccagacgtagggctccctgatggtagggtcctggggggagaactgggacagctcagacacatcggagcacttttgggaatccaccattaaagcatcaaatacttcaaagtcagttttcttcacttgaatgatgttgttaactgtgccaagctggtctggttactatgggctcggaagggtcgtgcgtccactgaccatccacaaagaacttgtactgatgctctccttccggcagatccaggatggctacaaagttattgtggcttctggtgaggggaagtttactccagttgttgaaggacccagataagtaaacttcctttccgccccccgtccatcgaaacaccgttggccgagcctgggcgggagctttatcattcacttccagatcatgctgccaggccaggaattcctccttctctggtgccttgatttcctcggagtggaagaggtcggcgtcttcggggctgtccatcaggatcttgggcctgtccccgtccttggtgccccccgagctgtccctccggggcgtcttatggccaccatgccgctccagcgcggcgcgctcactgctggtattgcccatgatgggggtctgcggggacacagggaaggcggacggcgcctcactgcaggaaagggaccctgagcaagggactcccggaaccgcgggtcccaaggagcctgcggaaggagtcggagcaccaggacaccacgcccctcgggccgggagccggttccggctgagtcggcagggttgccgagctctcgcaatcgcgctttacctgcccaggcaagccgcggcaagaacgcaaggggcgcgaagataaaccgacactttcccaaccgcttc

SEQ ID NO: 352955 - DNA, 1279 bp, Homo Sapiens
  misc_feature (1263)..(1263): n is a, c, g, or t
tggggaaagcatgcacgtgtgggacctggttggtggcagttctcctgggccaccatccgcccccagctcgttcaaaggggcctggtataacaagggtggtgaacgtactttcttctggtaaccgtgggttgcctggagcacccatcactgccatccgtgatagacaggcgcgttattaggtggttcagcatgacgtgattgggctcaaggaagcaaagctggatcacaggaaaatccgccgggtccttgttcaggatgacctggagaagatgtggcgggaaaataaggggtgcccgaaagcgctcttcgggtttgcagacgtagggctcctgatggtagggtcctgggggagaacttggacagcctcagacacatcggagcacttttgggaatccaccattaaagcatcaaatacttcaaagtcagttttcttcacttgaatgatgttgttaactgtgccaagctggctggttactatgggctcggaagggtcgtgcgtccactgaccatccacaaagaacttgtactgatgctctccttccggcagatccaggatggctacaaagttattgtggcttctggtgaggggaagtttactccagttgttgaaggacccagataagtaaacttcctttccgccccccgtccatcgaaacaccgttggccgagcctgggcgggagctttatcattcacttccagatcatgctgccaggccaggaattcctccttctctggtgccttgatttcctcggagtggaagaggtcggcgtcttcggggctgtccatcaggatcttgggcctgtccccgtccttggtgccccccgagctgtccctccggggcgtcttatggccaccatgccgctccagcgcggcgcgctcactgctggtattgcccatgatgggggtctgcggggacacagggaaggcggacggcgcctcactgcaggaaagggaccctgagcaagggactcccggaaccgcgggtcccaaggagcctgcggaaggagtcggagcaccaggacaccacgcccctcgggccgggagccggttccggctgagtcggcagggttgccgagctctcgcaatcgcgctttacctgcccaggcaagccgcggcaagaacgcaaggggcgcgaagataaaccgacactttcccaaccgcttcaccacccctcagcgacttccgcttccggcgactccgtaagtcggcccggcctagggcgtggaggtggcggcggccagctaaacgcgcgcaccacccangcctcgcacctagccc

SEQ ID NO: 352956 - DNA, 1049 bp, Homo Sapiens
  misc_feature (141)..(141): n is a, c, g, or t
  misc_feature (143)..(143): n is a, c, g, or t
  misc_feature (229)..(243): n is a, c, g, or t
aagaaaaatcgtgctcatactgtacatctatttctgtgcttggaactacttgttaatagtttttatcgaagctgtcagcaataagggacataaaactgctgtattatacattgtggaattgaataaacagcctaattttcntntttctagtatagggtacttaagcatttccacttttggaagaaaagtgtattagtattttatattgcatttcatttaaaaggacagnnnnnnnnnnnnnnngtaaatccattcattgaaatggtttctaaactgtataatgtaatttggagcctatttagtaatagaattaaatgtcctatgtagtgctacaatttttgaattagaaagtgatcaaatgtaagaaaaaaatttaaaaattcagcccagaaaacaaaatagtgtattaaattagtttaatgtaaaaggaatttataagatttttttcctcaatatagatacctcacttgaaaagaaagcacagcatacttaaagtagttctagtaaacatgtcctagaaaacagttgctaaatgtaggacatcttttgaggaattagtttatgagaaataaaattttacttgtttttactatcctgttagaagtatttgtttatcctgataattttaagccaacatagtagtcttaaattacttttgaatttctaatctgtgaaggcagtaaatgaaatatctgttctgcaactgttgaaacaaataattggctacattgaccataattaaagttaaaattttgccaatgatgtacagttttatggttaaagttgctgtggttggttgcattacatgacacagaaaactgtcctctacctcacgtgaaataaatattttatatggttttactaaaaataagactcatgtatctggtcacctagtttacaaattttgaattatatttattgaaacatgacatactgtgctctgagcttatacctcaattgtattttgtgctgttttccattttcatgccttgtaaataacttgtataaattgtggatcaaatactaaataaaaacttttaatgccaatt

SEQ ID NO: 352957 - DNA, 531 bp, Homo Sapiens
gggaaggaatgtacttttattgaaaatgaaaaaatataaaagtaccatcttcaaagagcatctcacaaacactgtacagcaggtgaagcattgcagtaacatacattgaaacatacagagtcgagttatacaggactagccatctaacaggtcatctggtctccgacggttgtttaacgacacacagtagaaatagagaatagaacccatatctgtttccagagtccaaagtagtatatcaggctgacagcactcaatcagtgagggctcctgaggttgcaatgattctgcaacggagtagattctctaggaaaaaagaccttgctgctaaggaaagagaattaaaaacaaaacaaaacgaaaagctccccaaagaggtactctgctcaaaatggctggtgctactggtgcactaagttgtgaggaattacctctgctcgggacagaataaaaaatcctaggcctcaaggaaaaactggtggcatccttctgtcgtcttctcgcagccgtatagtagtagtaggcggccgc

SEQ ID NO: 352958 - DNA, 535 bp, Homo Sapiens
  misc_feature (430)..(469): n is a, c, g, or t
gaaaagaagccaatcttcttgctagtaaaccagcaacccggctgtatacagtggtgacccaagcaatggatataaacctaaaaatctgagggaggggagaggtggaatacagtagttcttggaatctgaagtctcctatttgatcaggttatttcctgggacttggcaaaaatctgattggtggggatctcctaggacctagtggacatctggtattaatttaatctcaggaaaaacaagaaattaacccagagagagtctgggttctggaattcagcgtagtacctccagaccgtggtgtctggcctccatttttgtctgtcattcagctctgacttacagctgcagtcacctttgctataaggcacctgggtagaagggtggatgggcttcacatcaatttttttcttcctttagggtgggggattgnnnnnnnnnnnnnnnnnnnnnnnnnnnnnnnnnnnnnnnnccaagattgtttttagatgaaggcttgaaagcccagaggtgccacagttttccttggcctaggttt

SEQ ID NO: 352959 - DNA, 641 bp, Homo Sapiens
  misc_feature (2)..(2): n is a, c, g, or t
  misc_feature (140)..(140): n is a, c, g, or t
  misc_feature (212)..(212): n is a, c, g, or t
  misc_feature (434)..(434): n is a, c, g, or t
  misc_feature (588)..(588): n is a, c, g, or t
  misc_feature (590)..(590): n is a, c, g, or t
gnttgggccatttgtcgccatgaagcctgactcttgaaaaaaagaaattcttagccaagtctctaaatgacgctgtaaattaaggcaaaatcaaaaccagaactcaagcctacactacagtaaaaaccatcacatcatanctctatttcttctggattatttcttatgcttctctaattttcatttagctcttacaattaagataatttagnaaacaatcatgagtactttggaaaccttaacttttatttacagaggagagaattaaagagttcatcttaggaactaaaacagctagtagaacctagagtgtctatgtagttttgacttctacttcattattataaccattcatgagtgaaatctacatatattacaactgtcattttatgctttcctgttaaaagaactttaattcctctatgagacttgcnaaaattaaactatctttctttcatggcatcaatttgcaatgtacttttatattgaatatctagaagagtaacaagtaatagctgataataataagagtataacaataattgacaagttaaagcttttactttgtactaggctctgtgctaagcngnttatatgcattgtcacattgcaagatacagacaataaaatgaaagaccaga

SEQ ID NO: 352960 - DNA, 589 bp, Homo Sapiens
  misc_feature (546)..(546): n is a, c, g, or t
  misc_feature (548)..(548): n is a, c, g, or t
  misc_feature (558)..(558): n is a, c, g, or t
  misc_feature (576)..(576): n is a, c, g, or t
  misc_feature (582)..(582): n is a, c, g, or t
ttagtgctgccttgtttatagaaagtggccattgagggactgggggacaggccacagccaccccgatgagaggagcgggcctgccctcaccgacaccagcctcctgggacccgggccaacaaaagggctgagatggaagaaaggttggaaatgaaagcctcgccaaagacgcagcggcaatgagtagttgggctgaagggcagcgccacgggccgcccagactacagacaaggccctggctatgcagccctcactggcaccgcggccgtgaagtcggcttctcctcagagccctggaggcaggcctgcagagcagaggtggtgtccccgccttgggggcctgtgcccctgggaaggtgctggcccaaatgtctcaggctttctgcagcccatccccagcagttcaggccagaggctcttcctgcaggtggcggtggcctgatgggctcagcaggcatgcctggagctgctgacctgagctctgctcagggagtctgtttcttcttccccaaatttccacggcctccctgagctctcagattttgananaaaaatatanacatatatatgtatatanttcttnacttgcg

SEQ ID NO: 352961 - DNA, 406 bp, Homo Sapiens
  misc_feature (141)..(141): n is a, c, g, or t
aagggtgaatggatgttagcactgtatcagacacataatattaaggagatacctgctgtttaacattaacattctgtgtagtttttgtttgcatcaaacagacatcaaaaagtgaataaaaacatgtcgtgaaattaccanaataataaattaacttcctggatacaaggaagttattttagcaagttctttttaataaaagcaaagaatggggatgtaacaattagagaaatgtggaggaaaacataagaaagttgggagagggaggtcaaatctcacttccagttatcagtaaagtgcacattcttttctgtattctgtgaggctggaggtgctgctgatagaatgtcctcacatattctgtcaatgccaggatgcaaacatcactaaataaaccctcgtgtca

SEQ ID NO: 352962 - DNA, 438 bp, Homo Sapiens
  misc_feature (2)..(3): n is a, c, g, or t
  misc_feature (56)..(56): n is a, c, g, or t
annaggtatccccttaatattatgtgtctgatacagtgctaacatccattcacccnctttaatagggaaatttgtgtatttttagaattctgtcaatcatctttgctgtgtgtggagaatagactttccaattagtagatagagatgagagaaggaaaacgagtagctttagaaaatcattacattttatattttaattggctatttgaataccaagatgtttctagagtcacatcacctatgtggtaataataaataggtagatgctccctatgaatgaattgaatacaatttttattttcaggttagttttaaataataattgctaattactcaaatggaaatttgagttacaagcacacaccttgtagggtggaggaaagaccatgtaacaaggaagtagagaattttaatacattcccactctaccaataaaat

SEQ ID NO: 352963 - DNA, 1575 bp, Homo Sapiens
  misc_feature (32)..(33): n is a, c, g, or t
  misc_feature (118)..(121): n is a, c, g, or t
  misc_feature (127)..(127): n is a, c, g, or t
  misc_feature (138)..(138): n is a, c, g, or t
  misc_feature (151)..(153): n is a, c, g, or t
  misc_feature (157)..(158): n is a, c, g, or t
  misc_feature (163)..(163): n is a, c, g, or t
  misc_feature (166)..(166): n is a, c, g, or t
  misc_feature (168)..(168): n is a, c, g, or t
  misc_feature (170)..(170): n is a, c, g, or t
  misc_feature (277)..(277): n is a, c, g, or t
  misc_feature (319)..(319): n is a, c, g, or t
  misc_feature (323)..(323): n is a, c, g, or t
  misc_feature (399)..(399): n is a, c, g, or t
  misc_feature (474)..(474): n is a, c, g, or t
  misc_feature (496)..(496): n is a, c, g, or t
  misc_feature (584)..(584): n is a, c, g, or t
  misc_feature (586)..(587): n is a, c, g, or t
cgggcccgggggggacggcgcccgccaggagnncccccactcccaggccagcccaccccggcggaccgggccccgcgcgcccaggcgaggtgaggcccgcgccgtcagggctgcgtgnnnncccgcncccctgcccancccgcgaggactnnncccnnccccngcncnancccccacccccgcgccccaggtgagccccggagtccaggtaaggctccgcgatgcaggtaagagcccctgagcgtagaggaggccttggcgcccgcaggtgagagcncctcccctcctaggtaaccctcaaccttcacggcgaggcctnctanctcctccaggtgggggaccctctccccgatgaaccccctaaaccaccagtgaaccccactgctctccagatgagtncacaaggaccaaccagtgcttacccgcccatgctcccccgaaactgggaactgacagcccagcccctccaaagcnccttcctccagcttcagctgcnaggtcaacaagggtgaggccggaagcaggcgggtgactcaccctgggcacctccgagcctcagtttccccatggatgcaacctgaggncnnctcactgagtcaaaaccgagacgcctctggtccccggagaggctgctggctctggggaaaggagagagcagcccagtgtgacagagcgagtccccacggctctgggagtgcctcgcatgtgtgtggcccaggtcctgacagcccacctactccctccccggcaggcactgggctccctctgctccccgtgggccgctccccgcgtggggccactgcccccggcccccgccatggtgcggatttcaaagcccaagacgtttcaggcctacttggatgattgtcaccggaggtatagctgtgcccactgccgcgctcacctggccaaccacgacgacctcatctccaagtccttccagggcagtcaggggcgtgcctacctcttcaactcagtggtgaacgtgggctgcgggccagccgaggagcgggtgctgctgaccggcctccatgctgtcgccgacatccactgcgagaactgcaagaccactttgggctggaaatatgaacaggcctttgagagcagccagaagtacaaagaggggaagtacatcattgaactcaaccacatgatcaaagacaacggctgggactgacccccgctcccccgacgcatgtggctccagcccggcctggccgccagggagcgccactggcttcccgccacccgaagggagctctggaccctcagagcccctgcagaggacggatctagctcctgtatatatattttattgcatgcactgtgaccttggggggagaacagaagggggacgacgcccccgcacctcctgcgatctggctggcttggatctcgtttttaacccgttcctgccccacctgccctatagttatggcctgtgttctgctctcctggtcccagtgcaccgtctgctctgtgaactcctcccaccaggcccttcttaccccacgcgtgtctgtccccctcgttctgtagcgtttgtacataataaaacaatggagtggaaaaaaa

SEQ ID NO: 352964 - DNA, 770 bp, Homo Sapiens
cccttctgttctccccccaaggtcacagtgcatgcaattaatatatatacaggagctagatccgtcctctgcaggggctctgagggtccagagctcccttcgggtggcgggaagccagtggcgctccctggcggccaggccgggctggagccacatgcgtcgggggagcgggggtcagtcccagccgtcgtctttgatcatgtggttgagttcaatgatgtacttcccctctttgtacttctggctgctctcaaaggcctgttcatatttccagcccaaagtggtcttgcagttctcgcagtggatgtcggcgacagcatggaggccggtcagcagcacccgctcctcggctggcccgcagcccacgttcaccactgagttgaagaggtaggcacgcccctgactgccctggaaggacttggagatgaggtcgtcgtggttggccaggtgagcgcggcagtgggcacagctatacctccggtgacaatcatccaagtaggcctgaaacgtcttgggctttgaaatccgcaccatggcgggggccgggggcagtggccccacgcggggagcggcccacggggagcagagggagcccagtgcctcgcctgggcgcgcggggcccggtccgccggggtgggctggcctgggagtggggggcgctcctggcgggcgccgtcccccccgggcccgggttcgcaggcgcctggacttgtttacaccgagcccagctccgctctcgacgaattcgagctcggccgatttggcctgat

SEQ ID NO: 352965 - DNA, 1390 bp, Homo Sapiens
  misc_feature (1249)..(1249): n is a, c, g, or t
gggctgccgggcgctgcgcgtgcccgctttccgctttattggcagagtccaggcgcgcccggaggccgtggcgctcgcgcgggacctttcgagcctcgggcccggcctggcatgcacgcccctggccctcccgggctcttctctggcccggggctcacagtagctccgaggccccgaggcccggcggggcggcgggggcgaggtcggggtacaccaggaagccggagaaggtgatgtacttgccgtggttgctgtaggcgccgtagccgtcgtggtcgtggctgagcagccagacggcgtcgccgcgccgcagggccagcatcacgctctggctctgcatctcgcggcgccgcgacgcgccgtcgtcgtaaatcatggcctgcacctcgtcgcggttcttcatcagcttaaccgacagcgtcttacgcggcagcttgcccagcgtgaaggagaagaagtaggcgcccggcagacggcagcggaacacgccggccgccgcgtcgaagtcgccgccaatgttgacgaactcggtgtcgaaggcgagtggttggtgccgcggcccggggccagcgtccgagcccaccaagctgcgcgtgcgcgccgccgagaaggccgagcgcggctcggggggcgcgggcggccccgcgcgcaggcgcgtcagcgtcggcgtcggcgtagactaggtagccgctgaaggtggcgccgggcgcgcctagcgcgtactgcggggcgccatgcagccgcagccacactgtgtcgccgtagtcgagctgcagcatggcgctctggctggctgcgcgccgcgcgcctggccgccgctgctcgtcgaaggccagcgcctgcacctcgtcgcggtttcgcaccagcatcaccgacaggctcttgtgcggggccttgccagccgtgaaggagaagaagtaggcgccgggcacgcggcagcgaaactggccggtggccacatcgaagtcgcccccgatgttcacgtacaccttgtcgaaggtcaccgccatctccgacgtgccctccaggggggtggtgcgtgccgccgagaaggccgagcgcagctcagaggatcccgggccgggggtcgggcccagggcccagcaggccgctgggcccagcaggcccagcagaagcggcagcatggcgcctggctgggggcggcggtcgagtcggattcggtctgagcccgcgatctggctccgggctgcgggctgcgggctgcaggctgcaggctgcgggtgccggntgcgcgctgaccgccgcgctgcggcaggggcggcgggggctccggctgcttttcccggctctgaggcggcagcggacagggtgctggggccaggggccgggcgtggggaggcgtgagggaaagggaaggtcagctagagag

SEQ ID NO: 352966 - DNA, 836 bp, Homo Sapiens
gcctcccgccgccggagttgcggggaaccggcccggaattcatgggatcgctcggctccctctctagctgaccttccctttccctcacgcctccccacgcccggcccctggccccagcaccctgtccgctgccgcctcagagccgggaaaagcagccggagcccccgccgcccctgccgcagcgcgggcggtcagcgcgcagcccggcacccgcagcctgcagcctgcagcccgcagcccgcagcccggagccagatcgcgggctcagaccgaacccgactcgaccgccgcccccagccaggcgccatgctgccgcttctgctgggcctgctgggcccagcggcctgctgggccctgggcccgacccccggcccgggatcctctgagctgcgctcggccttctcggcggcacgcaccacccccctggagggcacgtcggagatggcggtgaccttcgacaaggtgtacgtgaacatcgggggcgacttcgatgtggccaccggccagtttcgctgccgcgtgcccggcgcctacttcttctccttcacggctggcaaggccccgcacaagagcctgtcggtgatgctggtgcgaaaccgcgacgaggtgcaggcgctggccttcgacgagcagcggcggccaggcgcgcggcgcgcagccagccagaagcgccatgctgcaagctcgactacggcgacacagtgtgtgctgcgggcttgcatggcgcccccgcagtacggcgctagggcgcgccccggcggccaccttcagcggctacctaagtctacgccgacgccgacgctgaccgcgcctgcgcgcgggccgcccggcccccc

SEQ ID NO: 352967 - DNA, 324 bp, Homo Sapiens
aaaattgtctataattctactactcatataaaaccactattcacatatgtgtactttcctctattaacctctcaaagcatgcctcaattttaattgtattcacacaaatacaattttatgccatacattttacttattaatatgctattagcatcaccaatgtcaatataaactccttgtaaacatcaatttaatggttgcaaagtattacatcaactggatatgccatggcttatttaatcactgtatttattgttaaatatttgcattgtttacactgtttagtattgaaaaccacgctgcaataaatatctttggatagat

SEQ ID NO: 352968 - DNA, 364 bp, Homo Sapiens
  misc_feature (3)..(3): n is a, c, g, or t
tanagacaagtttttctttcttcctgcattttcaaatgtaatttaatgaatagctattactttcaaaaatgtaagacaaattataccaagaaaagaaagcattgcttctagtttaaatgcaaatatcctaagaaatacaaccaattatgagctgtcagtacttttcctaagagcaaggaaacagaacaaattatgaatccacctgagttcctggagctgggaacagccagtgaatgctggtttctttaaataacagagtgttcaactagatgctttgactaagtcactgagacagaaaagaggtggaatgctacagtgagagctagaaacatccacagtatgataacaagaaactggtttagac

SEQ ID NO: 352969 - DNA, 667 bp, Homo Sapiens
  misc_feature (452)..(529): n is a, c, g, or t
ccattggggaagttgcaataccccaccaatctgaccatgtccctaaaatgtaagggggattatcctctaagggggttgatgggaggaaatatttagatgtacccctgttaacagccagtcattttgatttacttatggaaatcaagtgaataaaaggcaacataatttgggaaattttattctaatatctaataaaaacagtttgagtggttgaagacatctgcatgaaattgcacctaggtgcattacttgatataactctcccctaaaactgttgtaattgcattttttcccttttcttggcacccctttagaaatgtactgaagtctcatttttcacccatttcagccatgggacatttttcataatattaatgtaaagatgtttgtgttactgtttataaattacaattgtaaataaattactagtttgcccaaaactttgttcttannnnnnnnnnnnnnnnnnnnnnnnnnnnnnnnnnnnnnnnnnnnnnnnnnnnnnnnnnnnnnnnnnnnnnnnnnnnnncccttgcttggccgcctcgcccctcgaaaaagttttctaaaccattcgctttggcgcgccggccccagaaggtaagggaacatgggcatacctgtttccaaggaaatcctggccatgactagggcttggattctcccc

SEQ ID NO: 352970 - DNA, 858 bp, Homo Sapiens
ggggaagtagtgtgaggctcgtgggcggagccaagcgccgccatgtccgccgccctgctgcggcggggcctggagctgctggcggcgtccgaggccccccgggaccctccaggtcaggccaagccgagaggggctccggtgaaacggccccggaagacgaaggcaattcaggcccagaaactgcggaactcggccaagggaaaggtgcccaagtcggcactggacgagtaccggaagcgagagtgtcgagaccacctcagagtaaacctgaagtttctgaccaggacgagaagcaccgtggctgagtctgtgagccagcagattttgcgccagaaccggggccgcaaggcctgtgaccggcctgtggccaagaccaagaagaagaaggctgagggcaccgtgttcaccgaggaagacttccagaagttccagcaggaatacttcggcagctaggctccctggagggcacggtgaagaggccttcaagccctgcagcctccgactcctgctggctccaggaaccggccgtgccgcgcggccagcagatggcgatgcaggaccagcctggctcgaggaagccgcggagctgagccgagtggaggctggaatggagctggtgggccggaagtcctggggaggatttacacacagaccggagctggcttccgcaggcctgggcagagcatctgcacctgccggaaaggaacgtatctgttttgtttgcttttgcccaggtggggcctctgggctgtttgctgtggagcaaggctaattcctgagcccttggggacgacagctccaggagtaggaagaagggtgggcttccaagttacaataaatgtgaacccaagagctgtg

SEQ ID NO: 352971 - DNA, 2030 bp, Homo Sapiens
  misc_feature (1505)..(1631): n is a, c, g, or t
  misc_feature (1639)..(1654): n is a, c, g, or t
  misc_feature (1694)..(1748): n is a, c, g, or t
  misc_feature (1764)..(1859): n is a, c, g, or t
  misc_feature (1874)..(1884): n is a, c, g, or t
ttaagtttcctttaatgatccacaataatccctttgatcacgttaatctaaatctagatgtctttgtctaattttttttgaatagcagttataaatgtaaaggactcaaagtttaagtaaaaagtgatactccaccttgtgtttcaaagaatttagttccacctcttcataccagtttaacacttaatatatttcattggattttagacagggcaaaaggaagaacaggggcctctggaggcccttggttatttaaatcttggattatttgtgatagtaatcacaaatttttggctaatttttaacctgaggttttgtttttcttttaaaggaaatgcagcctagtcttgagaacataattttatataatcaattactaaatgttaaactattaccacacagcccataaaacagcatttgcgtttattgagagagaggatgtgccatcatgattaatgaaaactatcttttgagtttgaaaagaaattaatttgcagtgtttggattgtatatatggtgctaaaaataaattaatttactttataaaccttatctgtacattatacgatgtgatgaaatttgctttttatccaaatattttgtatcttgtaaatatggctaattataggaatgcctataatacatcttagattccttatatctaataagagttcaaagagttatgacgttgaagtcttgaatgcaggaaactatctgatagtgttctaaaatttggttacttgggtttggatacccttagtgggatgatgtaaatagaggctagctacctaggcttgtctatagcaaccataatgttgatgtaagtaatgcggttactgaatcataagaaaatgccatctctttttagttgaaggaaaactctggaagtaggtgccattggtcattctgcagtgcactgcaaccattgtttcccctagtgccctcttttccctagggcattgctctcctattcccacgccttaacacagctctatacctagaagcagccagcccaggcatgcagtcacatttaatcacatcccccttctagagtgcttcaaaatgatgtagtccctcaacttggctaaagaatctcaatctcttgaaatttatttttttaatgtcatattcatctggtaaatatctactgtttgccaggcatttaagaatatggcaaagaacataaaagatggtgtcaccagattttggtcaccaatgagtacccgacccgttgccatgattaagagagaatgctttctattggagtttcaggaaatataatttgagaatactttaaagggaagtggaagtataagtgaatgatatttttcttttacatgtaaacaatgaagttatttcaaagttaagttttaaacaaaatacatgaagtagtgtctgccatacatgttaatattctacattcttgcttccttaaattaatatgtttgtgtgtatatatgtgcctcacacctgaattgaaaattaaagactggtttaaaagtggnnnnnnnnnnnnnnnnnnnnnnnnnnnnnnnnnnnnnnnnnnnnnnnnnnnnnnnnnnnnnnnnnnnnnnnnnnnnnnnnnnnnnnnnnnnnnnnnnnnnnnnnnnnnnnnnnnnnnnnnnnnnnnncctttggnnnnnnnnnnnnnnnnaaaaaattttttaaaacctttttttgggccccgggccccnnnnnnnnnnnnnnnnnnnnnnnnnnnnnnnnnnnnnnnnnnnnnnnnnnnnnnngggtttgatttccccnnnnnnnnnnnnnnnnnnnnnnnnnnnnnnnnnnnnnnnnnnnnnnnnnnnnnnnnnnnnnnnnnnnnnnnnnnnnnnnnnnnnnnnnnnnnnnnnctcaaaataaatttnnnnnnnnnnntgccctttttggaaaaaggtgtgaaattttaaaaactttcgcccgagagggaaccccctccaaggggttttaaaaactttattcccccggggaaaaccacctttgggccctttggaaaaaaatttcccccggggaaaaacgggggg

SEQ ID NO: 352972 - DNA, 778 bp, Homo Sapiens
  misc_feature (71)..(92): n is a, c, g, or t
  misc_feature (665)..(670): n is a, c, g, or t
agggaattttgaagactccccccccggaacctgctttgcctcaattgggggaaaaaaaaccccttcctttnnnnnnnnnnnnnnnnnnnnnngtaaaggggatctctaatactgcctaaaagtatgctttcactgtcagcagttttaaaggtgaaatcagagcagcactacccctcccacctccaaagcatctgtaaaatcattctatcattgagtatcgtttaatgcaaaaggacaaaaacaactcccgtgatatgattgccaggagattctgtttccccatttctatatttgtggattttatatgtaatcacctatgtcagagaaagaaaacctttcaaccaaatgattggttcaaaaggaaagaatgattcaaagcagaggaatttattatgcacagcaaaatgtgtcttgtattaaatatttttattaaaagaatgtttcattaatgcattgataagaaaactaggttagttgcgagggatgtttctggtttcatttcaaataattaaatttctactgctactaccaagaggactggctcagtggtggcaaaatactggtgatgctccctagagcaggaggcccggaagtgctgacgcagccatcagcctgccaagattgttttttaatcttcacagtgttttaaagaacatgttaaaaannnnnnaaaatctagtgctcctgctgtcaagatttctgtcatggaaaccttgtttgagaaaggtgttaataaaattctattgcaaaaatttctttttctagaaaaaataaatac

SEQ ID NO: 352973 - DNA, 350 bp, Homo Sapiens
  misc_feature (49)..(49): n is a, c, g, or t
  misc_feature (70)..(70): n is a, c, g, or t
  misc_feature (75)..(101): n is a, c, g, or t
ggaagattaaccagatgtgggccaaactgttctggatcaggaaagtcanactgttcactttcaagttggntgttnnnnnnnnnnnnnnnnnnnnnnnnnnnatatgtacagatgataatagggtgtggaatgtcgtcagtggcaaacatttcacagatttttattttgtttctgtcttcaacatttttgacactgtgctaatagttatattcagtacatgaaaagatactactgtgttgaaagctttttaggaaattttgacagtatttttgtacaaaacatttttttgaaaaaatacttgttaatttattctattttaatttgccaatgtcaataaaaagttaagaaat

SEQ ID NO: 352974 - DNA, 747 bp, Homo Sapiens
  misc_feature (55)..(81): n is a, c, g, or t
  misc_feature (481)..(505): n is a, c, g, or t
tttcgagcggccgcccgggcaggtacaaattggttttaaaaaaattgctgccacnnnnnnnnnnnnnnnnnnnnnnnnnnngtagccttgacattcacccacctcccttatgtagttgaaatatctagctaacttggtctttttcgttgtttgtttttactcctttccctcactttctccagatgctcaactgttagatattaatcttggcaaactgcttaatcttgtggattttgtagatggtttcaaatgactgaactgcattcagatttacgagtgaaaggaaaaattgcattagttggttgcatgaacttcgaagggcagatattactgcacaaactgccatctcgcttcatttttttaactatgcatttgagtacagactaatttttaaaatatgctaaactggaagattaaacagatgtgggccaaactgttctggatcaggaaagtcatactgttcactttcaagttggctgtnnnnnnnnnnnnnnnnnnnnnnnnnatatgtacagatgataatagggtgtggaatgtcgtcagtggcaaacatttcacagatttttattttgtttctgtcttcaacatttttgacactgtgctaatagttatattcagtacatgaaaagatactactgtgttgaaagctttttaggaaattttgacagtatttttgtacaaaacatttttttgaaaaaatacttgttaatttattctattttaatttgccaatgtcaataaaaagtt

SEQ ID NO: 352975 - DNA, 1030 bp, Homo Sapiens
  misc_feature (280)..(280): n is a, c, g, or t
cagcctgccagccttgattctagtccagtgagacccatagtcagacttccagcctacagaattgcaataaatttgtgttaagtcactaagtttgtggtaaattttacagcggcagtataaaactaatacagtggtgtgccttcctggttgacatttgaaatgcgtttagaaaggcatgaatgcgctaatgtatacatacagtttaaaatgcttaaggccatttcactaagtttggaattggaggagaggcaagccaagaatcaagaggccaggaaggcanggggtagaatccatgagggcatagaaatctctaagactgagccaggagtggagtgggagagaggcagggagccaggagctgacatcctcagaggcccagggagcagctgccccagggaggaggtgcgggaggtaacatggaggggctgtgagtctgaggagcagggaggatgtggggtccctgacgcctccaggccagggaatgcatgagagaaaaagcccattggaggggctgcagtggccagaggagattctccagagggcctgcaagttctggtctcagggtgggtaaagggtcaaagaggtggctctagggcagagctgtgtgggaccagggggctttgctgacaacagcctcaactccagacctctctgtggtctgtttctcctgccaggtccctgttgtgcccagtgccatgcctgacacctgcaggtgtgtcaccgctggcttgctgtgcaggctcctcgtgtgggtctatggtgccagcaggggatggctgctctcccagaccccatggagcagttccctgggcagaggtctgtccagggctgaccctcacccccaagccccagagctggggttccctacagggcagcctcctgcatgctgaggaggcagtggccccggccaggcagcctgggtaggaactcagggcggagaatggaggatatgggaaggggttctggggcaacctgatcctaaggacctgggaggcctaacgctcccatcacacgacgccgaccgacagcc

SEQ ID NO: 352976 - DNA, 1447 bp, Homo Sapiens
  misc_feature (22)..(22): n is a, c, g, or t
  misc_feature (32)..(32): n is a, c, g, or t
  misc_feature (41)..(41): n is a, c, g, or t
  misc_feature (44)..(44): n is a, c, g, or t
  misc_feature (59)..(59): n is a, c, g, or t
  misc_feature (70)..(70): n is a, c, g, or t
  misc_feature (76)..(76): n is a, c, g, or t
  misc_feature (115)..(115): n is a, c, g, or t
  misc_feature (442)..(955): n is a, c, g, or t
  misc_feature (1389)..(1398): n is a, c, g, or t
ccttttgacctttcccaccctngaccagattncagcccttncanatctcttttgccacngcaccccctcnatgggnttttttctcatgcattccctggcctggaggcgtcagggnccccacatcctccctgctcctcagactcacagcccctccatgttacctcccgcacctcctccctggggcagctgctccctgggcctctgaggatgtcagctcctggctccctgcctctctcccactccactcctggctcagtcttagagatttctatgccctcatggattctacccctgccttcctggcctcttgattcttggcttgcctctcctccaattccaaacttagtgaaatggccttaagcattttaaactgtatgtatacattagcgcattcatgcctttctaaacgcatttcaaatgtcaaccaggaaggcacaccacnnnnnnnnnnnnnnnnnnnnnnnnnnnnnnnnnnnnnnnnnnnnnnnnnnnnnnnnnnnnnnnnnnnnnnnnnnnnnnnnnnnnnnnnnnnnnnnnnnnnnnnnnnnnnnnnnnnnnnnnnnnnnnnnnnnnnnnnnnnnnnnnnnnnnnnnnnnnnnnnnnnnnnnnnnnnnnnnnnnnnnnnnnnnnnnnnnnnnnnnnnnnnnnnnnnnnnnnnnnnnnnnnnnnnnnnnnnnnnnnnnnnnnnnnnnnnnnnnnnnnnnnnnnnnnnnnnnnnnnnnnnnnnnnnnnnnnnnnnnnnnnnnnnnnnnnnnnnnnnnnnnnnnnnnnnnnnnnnnnnnnnnnnnnnnnnnnnnnnnnnnnnnnnnnnnnnnnnnnnnnnnnnnnnnnnnnnnnnnnnnnnnnnnnnnnnnnnnnnnnnnnnnnnnnnnnnnnnnnnnnnnnnnnnnnnnnnnnnnnnnnnnnnnnnnnnnnnnnnnnnnnnnnnnnnnnnnnnnnnnnnnnnnnnnnnnnntaaggaatgaacctcttttgttggggaagggtggcattctgctgaccacagcactccaaccaaaagccaaaaaccaaagcaagacttactaacgcatatcaaataaattaaaggtacaaaatcgtgaatctcagttatcttaaatattccaatactatttacaaaattattcaaattctcacgccttccaactcaaaattagcaatctaaagtaatttccatatcctagatggaaaccctcatgctaaactgtctgattatgcatggttctaaatggtttcagtggcaaatacataacattgtactactgattaaactgaacttaaaagcatcaataccaccattgctgcacttaatcatgtctctgttgaatttttccttttaaattttatcttttcagaattatatatgtattgtttttaaagtagaatagnnnnnnnnnngaggccaataataaataataaatgcaggctcctactctgatcctctcca

SEQ ID NO: 352977 - DNA, 986 bp, Homo Sapiens
cggtccggaattcctgcgatcgcagggctgccccacgcccggttactgtgcgcgcggccccgcccccgaggcgcacgccggcccagcgcccacagctgcggcggcctaggtgccgcgtggggcaagcaggtgcctcgcgtccaggcggctccgcggctggctgcctcccgagccggccgcgctcctcccagcgaggcgtggcggggaggcgtagtgaggctgggcccgtggcggttccctgaggagggccgagaaggggccgggggtgctaggggaacgggcgctgggggcagcggccccggtggatgctaagggcttcgggatcgggagagtccaccacgcctgcctgctcggctgagaatcgccatgccagctaaagggaaaaaaggaaaaggccagggcaagtctcatgggaagaaacagaagaaaccagaagtggacattctcagccccgcggccatgctgaacctctactacatcgcccacaacgtcgctgactgcctgcatctgcgaggcttccattggccgggtgctcccaaaagaaagaaagggagaagcaagtgacagcatttcacaacacatctctgttacacgacaacaggacctggggaagagaagtcaggataacacaactgttgccagcaacatagactttactccagacgacttgagatgcaaattaagtgtgcttttctgtgatggtggaagatcaggaaatgcaccttacttcctctgttatgccagatatggttagccactttggttttttaggagctataggatgggaaaagcctgagtaattcctacacagtgtgctgaaattaatagaactttcagaaattattataattctgggtcaggattaaactttgctctcagaaggcagttctagttgcattaatgttttcttttgccaaagagcgttgtcatttagagaagaccggcagaaacatgggttccttaggaacatcctctctgggcaccat

SEQ ID NO: 352978 - DNA, 1129 bp, Homo Sapiens
atgcgaatccgccagcagcagtattagtttttacccaccgagctgagggaagatgagggctaaaggtgcgagcccagattgcgagccccaggggatggccctggctgaactggacagacagtgttcctgagaggctgggcacttagctggaaaccgcccacctccctcccgggtgagcctggagccctgcgtgcttgttctcacatctctgtcccgtcggcactggctgcatgatcgtgatgtcacacggtacaatgtcctacccacaactcctctgccgcctcccctcatgcctcaccatgtctcaggagagaggggtgcacgtttcatggactgttaccaacaaagaaaagtcagtattatgttgttctcagacactttggcttttgttggtccttctcttaggcctgctcctggacctctttatgatattgtgatagggaaaaaaatcattgccgtcatagaatattcttcttcctctcaggagaagacggaagctggagttggacatggttcataaaagccagaaacacaaacccgtgtggactccgggagggtgactcaggtcctccttccatgtcttgagcactggctcacccagggggtgaaaaattcccgcccctgtttgcacgctttcttgcctccgtgtgtaagctccttgtacaacccagacccatcttgtattttgtggcccagaaaactgaacgattattttgttcctccgtagtccaaagggcagagttgcggaaggccgtcggggcttggtgagcaggggctgtaatacagtctgtgggctccttaccctgcagaggctgtttcagctcacacagagtcatccacacaaacccacggctcccagttgacagtcagtggaatgctcgtctccttagcgtccagggtggggattctgctggaataaagagcttcctcagtgactcatctttaggtcccacgctggtttctgtgccttcagaatggtcacaagcccggattggaaaggatctgcttacaaacctgtcccctgtcctccaacccaaaacgcctttttttctgtcttaatatccagaaaatctaaatgcatcctaaaatcaatgtgaacctttaacaagatagttttacttattatcac

SEQ ID NO: 352979 - DNA, 1218 bp, Homo Sapiens
  misc_feature (40)..(40): n is a, c, g, or t
  misc_feature (46)..(46): n is a, c, g, or t
  misc_feature (934)..(1011): n is a, c, g, or t
  misc_feature (1014)..(1045): n is a, c, g, or t
  misc_feature (1047)..(1047): n is a, c, g, or t
  misc_feature (1052)..(1052): n is a, c, g, or t
  misc_feature (1122)..(1123): n is a, c, g, or t
gggatttagaaacactttggaagctcataacctcatcagnaaactngcctttagccacactcctgaccttctagatgagtaacaaaaaaatgaaataagttcttggaaattaagccatttattttaatttgctatttttttcaatgttctaggtatctttaaatttgttattgtggaatcattttcctgccagatacctttatcaaaattattggcctcatgagagctgaagtaagtcagctttttggtgaactttagtggacttctgtgagattgtagttgtactttgtatctctaaatctaaagatagttttttaaaactcccaaagaaaatctgctctcctttctgatctaaaaactcatctttggggtaaagagttaagtgtccaaaggttgtcacagttcatgaggtcagagggagctagcctggcacctggactctgcccatccacagctgacagattccaacagaagtgtatttaaattctccagtagacaatgctgggtaagggagggggtagggctgggttattaagatacaggctgctgtattttacattggttgtgggggaaggggagcctggagaaaacaaagtcactattcccttttttgaaacaggaaaaaaaattattttttgttcagtaaaaatggtagagaattccaatgtccctagccacaagggaccagttccactgagaagtgaacagtgggaactcaaaatttcagaaacattgggggaagggaaaattggctttctcttaattggcagatgttccagtggggcgggggggctctgtttttgttgggatgtgttatgttgtatgtacgcatatatggaccggagtctgctgagtttataaggttccaaaaatatggtaaaatcttggtttttgttaatttatctcaataaaagcccactggaactccaaaaannnnnnnnnnnnnnnnnnnnnnnnnnnnnnnnnnnnnnnnnnnnnnnnnnnnnnnnnnnnnnnnnnnnnnnnnnnnnnccnnnnnnnnnnnnnnnnnnnnnnnnnnnnnnnncntgggngggcccggctcgcgcccttccaaaaaatttttctaaaaaccttttcgttgtggcgcccgcggcccccccnnaagggaaagggggaacccgggggcccaaaactcttggtttctcccaaagagaaaaccccggggcccaaaaaaacaaagggggggtttgggaattt

SEQ ID NO: 352980 - DNA, 549 bp, Homo Sapiens
  misc_feature (110)..(110): n is a, c, g, or t
  misc_feature (430)..(430): n is a, c, g, or t
gggtctttgactttcccagcgttgagtcatcaacactttgccaattagctcatggtcctggcaacctcacaaacccctgaagttttaaaaactttctcgctccccacganccccagaatgaaacagctttaaaaatagccttaaccaaaaggatgttatttcattaaatttggtttaatggaaagaataaaagtaaatgaaaaacacaccctacacactagactccgaacactggtaatcagtactgcatagcaaactctttgggaaagaaaacgaaaatgttattgcacatgtaaaatatgaaaacttaactctgctgtgtgttaggcaatcctgtaatcttttttgactcttaaaagaaattcatttctgaaatgcttggttggaagactgtgacaatagctcatgaaattgagtgttatttttcctnccttttttaaaaaaatatgtaaagtgcagtcttctgtattcctgcatattgtatatacctgtatatgttttcctgagcagttaaataacaataaatatgacgttaatggtgactgtggt

SEQ ID NO: 352981 - DNA, 638 bp, Homo Sapiens
  misc_feature (2)..(2): n is a, c, g, or t
tntttcttctctaagggtttatggcagactttgctttttttaacatgtgagaaatgaatttcttattttgtgatttatgtgatttcttttgctgagtgaaggaaaggagaaattgttgctattgtcagcatcttaaaggtatttccagtcaaggcaaggctaagtgctttgtgatagtattaagcaagtcatgttttgaatggattacctgtagtgactcattggaatgatataattatacaagtaatgccaaaaaccaagtcaaagcctaattaaccaaagcactcatttaaaaatcatcatgtttggacctatctggacctctcagcactgtaaaatagttttggttttgtggcatatgaatagctgtttaacaaatcaaagttagctttttgcttctcagcttttttgggcaatacaagttaagttcttaatggggagacattatcatggcatgacttaagggaacattggtttgtgaaggaaaaacagattatctaaagccatctctatgtttctgttcagataaagattaatgagttctgtgtttatatcagctttgtatatttcatcttagccattctatcctagaaagattttaatgtgagcttaagatgtaaataaataattttgcaaac

SEQ ID NO: 352982 - DNA, 2105 bp, Homo Sapiens
  misc_feature (1850)..(1883): n is a, c, g, or t
cagtaatgagccactgtgccatgctgacacgaaaatttcttttgtgtgaattttatgttctagttttgggacaagggtaagcagttcttgactagtgaacaaatgagagaacatttaccccttactcattttacacatgcaggtcagcagaagccctagagttggttggcacagtcgcagttgactgagcatagaggaaacaggtctttttacattctctctcatcactggagctcagttgaactctaagaccttagcactcaaagagtctgaaaagaaatgagggagaggctaaatttaagctctccactcccacagaaaggacagggcaccctacaatctaaaagccagtgaggcagcctatcatctgtttcacatctgttctgaaagggatagtttaatgcaagaagtaagaggcctgtagtgactgtaaactcatgaaatgtgcacattggttatctgtgcacatttccacttgcaccataacataagaaagcgtacatggagtgtaattacttccagaagccccgtctaaccaacctattcagatgtggcacactttctgtcataaatgagagaccacacgtagagctcggtcaccaaggaatgcccaacatccctttacctctcacaatgagcagccacgctcaccgggaagcagtgtggggacttcagtggggtgtcccttagtggagaacacctttcatcatttttatagagacaattcccttgagaatgtaggcttttcatcttaggaacaattaggaagaatctccagctgggagtgttcttatgtatacagaaacaatgggtcgcattggttcatacttaggtgatattaggtttggctatattgatgtttggtgccacttaccttctagattttcccaaaagttgggtcattgctatgggaaattggggcctgcagatgggggagaaatgatcattattggtgcagggaaggggttcaggcagagctggagtctgaggctcagtgtgagaaagcactggcagttttctagtagagtcaggtcctgggctcctctcctcacccactgtgtcccgaactgaggccagctgtgatcggcaaattgcttatctctaggtagtttaaagaaaacgtaagagtttggggggtggtgggagaataactgtagaaagaccctaaactcttctctcccccagcaaattatcttgtataatgtttaaaaacccaaaggccagatctccccttttaacgtgaatcagaaggaggatggcaattggaccaagggcagagtggccacacttgaaacacattataaaatgggaatatatttcagggaaccccacccccacacttccactccacctcacacctgttggtcctgctttgtgggtgattgattgatacccaaggactgccccacctttaaattcctgcaatttatgctgcaaccaacatcttagtgtttgctctctccgggaagaggccaggtgggggagaacatacggtccagagcctgagatcgcctggctggggtgcaggcaagcaggaacccagtctagatagaatgcagtgttctctaaagctatggatggtttcagtgaaatgtctgtgtctgacaatcgtcacgcaagagtacttactgtcttcccttgtacatacattgtctgtatttagcttttcctagtattgtgaggtttcaaataggggttccatgtaaatactctttctgctactgaaatgccggcccccttgagtatgcatcacccccacagatggttttgcctttctctatgctaacactttttgagccactgacgtgcagatcggtggttagtttcttgggcttttattttgcaatttnnnnnnnnnnnnnnnnnnnnnnnnnnnnnnnnnnttatgggttggttttgtatagttttctgtttgaatctctgagcaccaaagctgccctttgattttcacgagaactttccaaagccacttcctgagccctcctgctgctttggtgtctgacggtgatgctgcggtggcatctctgcccgtgaatttctgtatgtgtgtgctgttacctcacctgcagacatgaccctagtaaatctaacgtgcttggcttccc

SEQ ID NO: 352983 - DNA, 470 bp, Homo Sapiens
aattctgctgcacatattctgatgccatgtgtctgtgcttaattaactaagaccctataaaacgtgtttagtggggactgtttgatatagttgccctctccattcctctatttgcctgatttttttcagtttccctttctgtattttactactaaattagaaagcactggttatgtaataagttactacattgctttggttgagtaaaaacaagagtttatatttttcttgtttcttattttcttaacccttaactcctgctgaggtcataacaacctcagtctaagctctgtgtccatcatactgttaacttaaacaaatgggtggtggggggtgggaagggtaatacagtcctgccattgcctaccagtaggagagtccaaacagaacactcttttgagtagcaattatttaatttgcccagtcaaggcaccgtgtttatatactatttcacattgaatttgattatg

SEQ ID NO: 352984 - DNA, 271 bp, Homo Sapiens
  misc_feature (23)..(23): n is a, c, g, or t
  misc_feature (43)..(43): n is a, c, g, or t
ttttagcatcctatgatgtcagnaaaagtttaatttgaaaagnactgcttcaaatttccaaccatgagctgaacgcagccgaaacaccaaacatgtattttcagtgctagtaagttacagttaattcttgatcaacatttaaatctaattaaacactgaatcagctttctgattatattaagagaatgcaaatgatccttaatatgaaaatgaggacttcaaaattggtaattctatttgaaaagttgaaaataaaaacaagaaataaaac

SEQ ID NO: 352985 - DNA, 586 bp, Homo Sapiens
gtggatcccccgggctgcaggaattcggcaccaggtgattttgagcttaaattatatataaaaaattgtcatttttgtatgtgttaaaaagactactatatcacaattaaaagtactttttagttgaactacatattgatgtaaataaaactgaatgaagacatatttactactttattaacatagatcgtgaatgtacttactggtttttttgcagtatgagaccataacaaccttgaaagctgcttcattttatgtgcaaagaagtcctatgaatctatattttaaatttactgaaccagtgaaattaattactgtcagttaatttgcaaatgcaagctgtattctccagttttattttatgtactgacactaattggtaaaggtgtacaatgtgattagaatgcattttgaagatgctttctgtacagatacaaaatacagggactaaaataatgctgtgcagtgtatagcagagccatttttcggctttggtgtactcaactttttcagtatttaaaaaagtgttttgaataacataaaagtctccttattgtataaataataaaatgtcaccttattgtaa

SEQ ID NO: 352986 - DNA, 1237 bp, Homo Sapiens
tttattcacagtatatctaaaacagaattaaggacaattaaaatatcttatgtgacagcctttatgtctagcacatttgatgaaataaaaaacttctgaatctgaatagaagttctactgtttcaggcttgaaccttttacatgctcaagagattcaaatggtctctgtgtgtagatcatgccaccgcctccaaagcctaatccacatcacttctgagaggcaaggctgagcatatggtgacatcagctctgtgttgagatggtgatgaggatgatggctcgctggccaggcagggcagccgaagtcagggacctgtcctaactaactgcagccttgcctttagtgtttgtcattctcagatacaacacagtatgtccagtgtccgtttttattactttaaagcatttgagggcttaattgtgtatagtagaaatactattttaggacaaataattatctgtgtacagatatttgatatactctaagtaaattttctaatttcactaagtacgtttttaggctcctctcaaatactgcgtattgaagaaaaaaatctgacaccaccgagccaaagatgcttttttgtctgttttcgttgtttaacagaatggaaagagtaatgcatagtgcttcctggtgtctcctgattgattgtgcacaaagtaggacgataaataaataaaatggagtctgatgggacattgattaaaggtgaaggatgattgatatatagatcatgaaaagaaaaatgaatggcaggaaaaaaagtttggtccttaatatactttggcctagttaaaatatgtgcctttttggtgtgttttgttcatcactacaagataaaaaggaaacattacaactcaagtctttaaaaagttcatttattgaaaatcatatgtataacctagcatacgaatgagcagatttaaacacataacttcaagccatttctgaaaacatacaccaggagctctgctcagctagagtcagactccagctccagcccgactgcgtgcggggacagcgcccgcgttgatgaggaccagccccactgcaggctgaggcggtgtcaccctgggaaggtcgtggtgcgttgtggcatattaagtctaaaccagatgaatgtaaatatctctttgtaaatcatttatttcactctgttccatccaggtcagcaatcagattgtggcatgctgggtaactggaaaaaataataaaaagtaagtttcaatagct

SEQ ID NO: 352987 - DNA, 1035 bp, Homo Sapiens
  misc_feature (1)..(1): n is a, c, g, or t
  misc_feature (16)..(17): n is a, c, g, or t
  misc_feature (33)..(33): n is a, c, g, or t
  misc_feature (36)..(36): n is a, c, g, or t
  misc_feature (40)..(40): n is a, c, g, or t
  misc_feature (58)..(58): n is a, c, g, or t
  misc_feature (64)..(64): n is a, c, g, or t
  misc_feature (84)..(84): n is a, c, g, or t
  misc_feature (86)..(87): n is a, c, g, or t
  misc_feature (113)..(114): n is a, c, g, or t
  misc_feature (142)..(142): n is a, c, g, or t
  misc_feature (147)..(150): n is a, c, g, or t
  misc_feature (159)..(159): n is a, c, g, or t
  misc_feature (165)..(165): n is a, c, g, or t
  misc_feature (169)..(169): n is a, c, g, or t
natcatctccaggaannaaacagagagcaaaangcnacanaacagaagctatcatcanacaaancccccggggtaggggagganannactatcaacactgcaagtcaacaagnngacattactttaaggaataacatgaganggaannnnttttatttncccctntttntctgggatttttcttctttttcttgattacagttcttgttcaatggtggcaagtgctggttatggccaatctccgtcaatcctaggaggtttatagaactacattttgagtgtcctatatttcagtgtattttaattcattttgcaattcctgtgtatgcaaacctgataaattctgtaaattgcttatagtatgtgtgctataacttcaaagtagatgtactgcgaccctcatgcaagctgatttttatcattatatatataaatatatacttaagaatatctgtgtgttgggccaatgaccaactttttttgacgaagcatttgtttttcgttgataattcatacactgcgtgaattttgtaattcattgtttcacttccacaggtttgacagctgcagatggtctctattgtcctctgcttcattctggaaagtgcatattcaaaattgtatcagtctctgatcgatgaattaattttgttatgtctgtgctaagttggaatttactatgttcctttatacatggtgtttattgaggtttgagagtctcttgactgtgaagaatgtacactgtctggttttgacagctatttctgtattattatcattataatcttgtcaaatagaaatgttgcttctagaaaatttgcctaggaggcgaatgtggggaaggtgaagcactcaccataattccctaaattcatgttagaacatttcttgctatggttaaaaatgctgcttcctttgacctttatgaatttctgtacctttgtcattctgttacctttgtcattctgttatttgcgctaattatattttaatgtctcctaattaaaaattaaaatttggttgttggctaaatac

SEQ ID NO: 352988 - DNA, 328 bp, Homo Sapiens
  misc_feature (13)..(13): n is a, c, g, or t
  misc_feature (40)..(40): n is a, c, g, or t
  misc_feature (71)..(71): n is a, c, g, or t
acatatatatgtntgaattagatgcctgtttgaattaganccttggggaatttcttcaaactagttctggnccttatatttgttgttttccctttaaggaactttctgaaggaagttagactgcgatggtaaagggggaaatgggttaatgagattgcaggcattttctatattctttttggcataagcacttatgtccctgatatgtacaaattcaaaggaggtggttaataactttagtaaataatatattgtcgcatttaatgatgtggagggctaaggtcattacggactttaaataaactattatatggctggttaaaaaaaa

SEQ ID NO: 352989 - DNA, 389 bp, Homo Sapiens
cagaccccaattatttttgcaaagaaaggtaggaagatagaaccagaaaattctttagtcttttaaagcatgtcatggtctcctttcagcttaaagaccttcttgattaaacatgaaattttctgtgcagataagccagttctgtggatgtgaagtctgaggagtatattttatgtttataatgtggatattactattcatggttgggaaatgagaaatgaacagtattttacatgccattatcctttgccaatttctctgaagggcatccagcttcacatagtagtaaaatgtgtaattcaggactgggaagccgtataatatgaaattagtgtttttaagaaattttaagggaatctgaattttaaaatgctcaaaaaataaaacat

SEQ ID NO: 352990 - DNA, 333 bp, Homo Sapiens
  misc_feature (306)..(306): n is a, c, g, or t
ggggagcgctggagttggtgctgggaaacccggggctaatgttgacaacaggctcgagattgtcctgggtcacataatgccagctgagcgtaaaaagccagcaagtatggaagaaaaagactctttaccaaacaacaaggaaaaagactgcagtgaaaggcggacagtgagcagcaaggagaggccaaaagacgatatcaagctcactgccaagaaggaggtcagcaaggcccctgaagacaagaagaagagactggaagatgataagagaaaaaaggaagacaaggaacgcaagaaaaaagacgnagaaaaggtgaaggcagaggaagaatc

SEQ ID NO: 352991 - DNA, 436 bp, Homo Sapiens
  misc_feature (410)..(410): n is a, c, g, or t
  misc_feature (417)..(417): n is a, c, g, or t
tctgtatcaaaagtagaggctgtgaattggttatggtactcttgcctgagtgtggcctcagaatccaacccatataccacactctagcagcagcaaaatccatcagagatgcctgcaagcgaaactaccggccatgtgtgggccctggagaaacccctatccacatcctatttagagctggcagagtggagctataaccaagcctggaggcaggataggaaaagaaaagtgaattcagggaaaatcacttatttacaaatccatctgcttaatcaacagtattgactctatgacatgccaggctcaagcctgatgcagatgtacatggtgatcataaaaagacctctgcccatgcctggctacaggttaccaacatacaattacaataccaccagctccctcttctatgncactagnaggctctggggggcacaaa

SEQ ID NO: 352992 - DNA, 650 bp, Homo Sapiens
  misc_feature (152)..(152): n is a, c, g, or t
  misc_feature (612)..(612): n is a, c, g, or t
  misc_feature (631)..(632): n is a, c, g, or t
tttaatgtaacttggcagtaaagactttggcctttggaggtctgattctaatcccagttctaccacttactggttatttatcaggtacacgttacctacctctctgtaactcagattgctcatcagtaacatggggagagtggtatcaaccnctaagaggattaaatgagtgaatatttgtaaaacacgtagccctagaatagatatttataaagcacaagatctatgtaaagtgtttataacataatacattggaatatgagacttgaacattttgaagattctaataaatgaataatttaatttagtgctcatttgaaaaatattttatcctcatgtttacatttaacacatataatttatatcttagtttttatcccatttatatatatatttaccagaaaaatgttttgtaataccttaattttatgtggagttgaatttaaataattaggccgaatttgtatgtattgttggatgggtatgtgtattgacctgatttataaaataaagtatttattaaactgagttttgcacttccaggtagagtcacatttaagataatcctttgaaatattttagcttttgaaagtagattaagcaagataaatnaaatgtatatacgtcattnnaaatacttaaaatgcttt

SEQ ID NO: 352993 - DNA, 492 bp, Homo Sapiens
  misc_feature (14)..(15): n is a, c, g, or t
  misc_feature (26)..(26): n is a, c, g, or t
  misc_feature (131)..(131): n is a, c, g, or t
  misc_feature (418)..(418): n is a, c, g, or t
  misc_feature (452)..(452): n is a, c, g, or t
  misc_feature (470)..(470): n is a, c, g, or t
ataatcatatttgnnaaaagtggatntcttgagtctgttgtagtttagtacttacagcagtgcctaaaacagcaactaatatgaactgcctgagtcctacaagcataaatgcataaagcctttttatgtanaaagccacaggaggggttcaaaattgaacttttccaaagtttatttctcttgcgttagatgaaaaactatttaaaaggactgaaaaccctgagctttttgctcgtcttggtagcagatatctgtaaaaacctacccagaattgtgattttacttcattgttcttgcatccttgaggctacagtataaatcatctccaaacttgactactattggggaagatgtggtataaaagcatccgttttggggaatttttttaaaaaattatgccaaaaataaatatttggantaaaaatcttacatttacccttaaaaaccacccnaaaaatggcagttctaanaataaaatttgggtcaccattt

SEQ ID NO: 352994 - DNA, 512 bp, Homo Sapiens
agctcggtaacaggctcatttcagtttacatgcatgtaaacaaatggggacactctgttcaggagaataatccgactggcatttgtggcagtttttgaaatgtaaatgtattcatgtgtgttcttgtaaatacgtgtcgctcagatgtcctttgaagtgggagggaatcaatccggggataatttcaaatggaatagagtattttgatattgttcattcagagggtgatgtgtacatatctatattgtatatatgtgatgaaaatgcattggctttttgtgcagatacaacctgctctctgtactgctgttggacagtcagtgttttaatgtttctacagttttgctattgcacgatttcatattttgcctctatgatgaacggcaaccattatttgtaactgtttagtgctgtaaagaaatattccaagtgtcattaggattgttgctgccagaactgatatgcatgaatggcacttaaaataaatatattatgttaactctatttccccc

SEQ ID NO: 352995 - DNA, 2016 bp, Homo Sapiens
  misc_feature (517)..(527): n is a, c, g, or t
tgtttgaggtttctaatcacaaggaagatggagaaaatgcagaacaagtggtcaagaacagggagataataaatagaatatttatgggctgaggaaaacaattaccaggggaaagcccaagaagcaaagatgaacagagaacgtgctgactgcgctcgtttggaaaggcctcatggccaaaggaggagaggcattatgaggagcagtgaccgagtgggcaggacccccggggatcaggaaaggtgcacgggggagatgagaggcctgagcggcttcccagcgaaggtttttgaagcacggtttgattttctctctccccctcaccatccccagattttagttgtgactatctccaggtacatggcttgcgacaggcagtgtataaaaactaatgtgagtttaattttaaaaccttagccattttctggaacttaaatatcaaagagaaaatgtccacatatgatgttaattgaggtttgtctcactggtgatttgtgctgattcaattcctgtttcnnnnnnnnnnncttaaggggtcagttttagaattgggagataggtgtataacatatgactatacagcgcaggttggttttttaacatagaaatatctgcccttaaatgagaactgaaaacggagcttcttggaggccacctgctggtggcagtgatctgaccgctgtttaagctttctttgaactcctttttttaaaacagcctccataatcaatggtgtacgatctactctcgtggtaaaacttactcagtgaagagtgtgttttattttctgaggagctgaactgttccaacctgagtattctgaataaggacagtggtcgagcatgagtgatgccatctggggcttaggaaataagtgggcctaaaatctgattgttttcatacattgttcagatattgacgcaaatagcaatttattttgtaaaaaatgattggtatccggaacttgcaacagctgtgtgtggcttgaagggagatgaagtggtgaaggcctggtttccaccgaagctctcacagcccagcctttcactgtgtggccgggggaagggtgctccgggtgggggacgggaatggtgggactggggatgccacgggacaaggctgctggcctggaaggtagtcacgtggagaaccgcaggagatgagattggaaagtagtaataagccatgtggataagaacagaggagcgggttttaagggggacgtcctgaaatgctgctcatgtcgtttcagttccatagaccacaggaaatgcaggtgagagggcagcccggtgggaaggaaggaagagggtggtggtgagccaggtgagtgtggagccgcccagggcaccgtgctgtgcgatagctcaggcatcgggtgcttctgccaaacccttcagcagctggtttggggccaaacgtccttcctgtgtgagagaaggcagagcctaggcagcattccaaaccccatccagatgggaggctgagtgcagagcaaacggagcccagcactccagagccgtgtcccttcactgccatgatcacatcacaaacagcgaggcttggagaggacttaagagctccttcaatgccatcttccatccactgcgtgagccagaatagaaaaaaaggaataagaagaggtcggttaagctctctattaagttgagaaaatgggaacttcaggtgatcatgtgagatattcaagttaaaaaaattatttaaaaagcacattcttattattaaaattttagaaagtacagagaaggaaattttaataacctacacctagaacactaagatactggtaacgtagaaaaatgtgtagttaatgccttgatggattcttttctatttttttctctagcaatatttatgtctatccacagaaagcgtacactcatgtatttgcatggctaatatattttatgtaaagttctatatatttctcaacatttcacttaatatttctttataaacatttttccagtgaataaaaatttttccaacagtaaa

SEQ ID NO: 352996 - DNA, 617 bp, Homo Sapiens
  misc_feature (37)..(37): n is a, c, g, or t
  misc_feature (225)..(228): n is a, c, g, or t
  misc_feature (230)..(230): n is a, c, g, or t
  misc_feature (458)..(458): n is a, c, g, or t
gccatttgaagcaagttgacagttccatcagtttgtntttgtttttgtttttggttcaataatttgagttcaaccatcgtcattttaaacataattaatcccaacaaagttgcctatagtttaatttaaacctcacagcatttttaatttattttgcatgggtgtttaaatagttctgttacgaatattgtccctgcacagttctaaattgtccttttataaaannnnanagtgatattctagtttcttcacaatgtagtgattatcagccttactaattaccttgtagcctttcttaatatgcacataatgcacattttccgatggccagaaaaatgcaaaacacagtggatatcattgcatctattttccatgtctttctaaaaacaggactattaaaatctctgggatacatgagatagtaaaaaatgaggattataaatgaatagcacataagnaattattttcctgaatttaaacttattgcagccagtttcagacatctacatctatactaatgtacactaacgcgtaaaccttgaacatcacaactacaaaatcaaccataacactcacgccgaaaccgctatacactactcgataacgtcaaaacacaa

SEQ ID NO: 352997 - DNA, 406 bp, Homo Sapiens
ttttttcttcctctcttctcaatgccaaagtatatatatttcaatcctcaatcaatttcgatatgtggcatttttgtaagtcatatctattagcattggtgtcttttacttacagacacggtcctaaaccaagtgaaatgttcatttcagaaaatattttaaagtattagaaagctaattctacctttaaaattgtatgatggtgtaactatccccatcaaatttggagtttttcaaataagatgtaattttttaaaataagtgttctgataaagtattttataagcagtgaaataaaatttttgaaactttggtaccaaatcttgccctcaaattaatttttaaacatttaaatctgtatttcaaagctagctcatcatgtatactaaattgcctttaaaaatta

SEQ ID NO: 352998 - DNA, 938 bp, Homo Sapiens
  misc_feature (554)..(782): n is a, c, g, or t
ctggaccggtccggaattcttgcgatgtttttctgaatagtataaaaatctccttccctgtgcttatcggcttcaactgtgcttacacaacgtttgtttctaattcgtactcttgcctcttggtttctgtagtttttcaacccatttctgtcagtgttctataaatgcatacattcgttatttaaggaaccctgcagcagacctcgaataaaatgtgacttgatgtttgttgccacttcctcaacttggttagcaaattcaagttttgaaagacgattcgtctcagagaagttgatcctgaacctccacgtcacattttagtcggttgctattaggtgggtaatgcctaataacatgggttcctcaaatcacaaaggagaatgctctcaagtcctcatgttaactttagtaagtcagttaactttacagcaactaaagagatcaattaaaaagaacccttaagtctgactgtcccaggtaactttacttgctgtacagatagtgcacagatatggatgaggcctgcacatggctgatttgaaaacccatgtgcnnnnnnnnnnnnnnnnnnnnnnnnnnnnnnnnnnnnnnnnnnnnnnnnnnnnnnnnnnnnnnnnnnnnnnnnnnnnnnnnnnnnnnnnnnnnnnnnnnnnnnnnnnnnnnnnnnnnnnnnnnnnnnnnnnnnnnnnnnnnnnnnnnnnnnnnnnnnnnnnnnnnnnnnnnnnnnnnnnnnnnnnnnnnnnnnnnnnnnnnnnnnnnnnnnnnnnnnnnnnnnnnnnnnncattgaaacccaaaattgtcgccaactggaactctcaacccggggcccaacaaagtgaagaattttcccccaaaccgatcgaaacaaagaccgaaaacccccttgctggggccctcaccgcggtaataaccctgggcggttgctctttccacaggg

SEQ ID NO: 352999 - DNA, 209 bp, Homo Sapiens
gttgactttttgatgctggcacgaggtttttgtccacttttttcatatatctgtgtataaaaaaattgttgtttactatggaattagtattacattttgaggtaaacaaaagaatttgtattgcttgataaatattagcttgtaaatttaaagtttctttacttcaattaacttaaaggaccaataaacccataaaagatgctttctta

SEQ ID NO: 353000 - DNA, 332 bp, Homo Sapiens
  misc_feature (2)..(2): n is a, c, g, or t
  misc_feature (9)..(10): n is a, c, g, or t
  misc_feature (32)..(32): n is a, c, g, or t
  misc_feature (51)..(51): n is a, c, g, or t
  misc_feature (66)..(66): n is a, c, g, or t
  misc_feature (72)..(72): n is a, c, g, or t
  misc_feature (101)..(101): n is a, c, g, or t
  misc_feature (104)..(104): n is a, c, g, or t
  misc_feature (131)..(131): n is a, c, g, or t
  misc_feature (224)..(224): n is a, c, g, or t
  misc_feature (235)..(235): n is a, c, g, or t
  misc_feature (265)..(265): n is a, c, g, or t
  misc_feature (267)..(267): n is a, c, g, or t
  misc_feature (301)..(301): n is a, c, g, or t
cnccccctnncaacacaacagggctgtgctanaagatgattagtttatccnccaactctgagagtnaatcantcatattttatcaaaggccaccgaggagnaangcattccttttttcttcataacagcanttttataactacatcatgtatcagttttatctgacattttcaatttaattcagcaatacttcacagtgaacatgcagcatctctttatatganacagatactcngggaatataagcaggtaataattttttganantcatataaaagttaatgtgaagagactcagaaantaaatcatttgagcagattctttaagtcttc

SEQ ID NO: 353001 - DNA, 623 bp, Homo Sapiens
gcgtgtgagaaataacatttttaaagcacttgccttctaccaaccccagcttgcaatcactgggccttcccctcctatccaaggggttggaggggccccttggctctccttttggcaggaggagcctgcttcattacaccaatgactctgccatccccctccctggccctagaccccaaacacatctccctctacccaatttactcttctcgccccacctagggacagattccccctgctctttttgtcctagaaaccccgctagtttgggatggtagcgtctggggtggggagggcttccccttccccactcgagggtgcgggtggggaagggggggtgggtggagacagccctggggcagggaggatggtctctccactgtagaaagtagagtaggattgtggtcagacttaatttgaggcatctagtgaagacacgtacaaatccaccaaggaaaaagatttcaaaagcaaaataaaagcgggaaataaaacagacccaagaataatcaagtcaaagtgatgttgcacaaaatgcagagaaaccaagaagggggagggttaatgtattaaatgtgctattaagaacttaattttattaaaagtactattaaataaggctc

SEQ ID NO: 353002 - DNA, 795 bp, Homo Sapiens
  misc_feature (116)..(341): n is a, c, g, or t
  misc_feature (345)..(345): n is a, c, g, or t
  misc_feature (441)..(449): n is a, c, g, or t
  misc_feature (524)..(571): n is a, c, g, or t
  misc_feature (794)..(794): n is a, c, g, or t
ggcgggctctttgtcttgtttgtgtcagaaggaggggacaggtgtggctcgcctctctctaggagtgacccccgcggccgccgcaacaaccggcgggatgatgataagtttttttnnnnnnnnnnnnnnnnnnnnnnnnnnnnnnnnnnnnnnnnnnnnnnnnnnnnnnnnnnnnnnnnnnnnnnnnnnnnnnnnnnnnnnnnnnnnnnnnnnnnnnnnnnnnnnnnnnnnnnnnnnnnnnnnnnnnnnnnnnnnnnnnnnnnnnnnnnnnnnnnnnnnnnnnnnnnnnnnnnnnnnnnnnnnnnnnnnnnnnnnnnnnnnnnnnnnnnnnnnnnnnnnnnggtntttccttttcacaatagtgcacatttttaccataatttagttatggctacaaaacatcagaagattttttttaatgtatcttctctatggtaattnnnnnnnnngttgtgcccttctagtctttaattggcagaaatatgtcccaaaaaagaaactattgcatttaagccacatcaccnnnnnnnnnnnnnnnnnnnnnnnnnnnnnnnnnnnnnnnnnnnnnnnnccaacagagcataatacccttttactgatgtgtcttacagattgacatgaccaaagtcataggttttcatttaatttccaattcccccttccacaacatgcaccaactgaatatatgctctgggagccataaaatgtaccaaacatctacctcttcaaaagaatgcattaaaatattttaaagaattttttgtttaaaaggtgaaaaaaatataaacaagaanc

SEQ ID NO: 353003 - DNA, 1634 bp, Homo Sapiens
  misc_feature (762)..(774): n is a, c, g, or t
  misc_feature (1134)..(1175): n is a, c, g, or t
  misc_feature (1279)..(1280): n is a, c, g, or t
  misc_feature (1360)..(1410): n is a, c, g, or t
  misc_feature (1615)..(1615): n is a, c, g, or t
tttttttaaacaataacagaggtcaaccacagatgtggacctccagcaataaaagcaggaattcaagtgccagatactcagcatattaggtttcctacgtaagtcacagggtaatatgttctaaatatctctaatgtgatccaaaaccctaaaaagagctggcacaaaaccatcgtgaatgactgcctctcttgatgtaaatttttaaaaatattattacagtatcatagtccccactaacaacaactggggtacatataacaatgtattgtgaaattaagtgtatttattctctttaccaatagcaaatgctaccctaccttagtaaaaccaagacttgcttcaatcaatgctgttttgtaaaatagcaaagcaacgaatgctgaaatcattcaaagctgcattacttgggttaaatcagtttctacttagaacacaggttaaaattttagtactaaaaggcctcaaaataattagtgacagaaatagtgttattaatttgctaagctcaacaataagcaattccttaattaaaatcttcgagatataaatttgatgactattctcttcagaaatgacatacctggattatgttaatcatgacaagccttattagtcacacatataaacatggcctcatgcaatcatttgtctgtatatgttactctaagttgcatgagcacaaggtttaatatctatatctttaagaaaatacttgatattataaacagagtaaaagacatgatatagtagtgattactnnnnnnnnnnnnnttagcagcttaaatctatctatatttgaaaaaacgtagtcacaagtaccacaaatgcagaatcagagcagcaggaagaaggttagtgcaattatactttcattaaaaaaaattctgaatcactgctatttaaaaacaccttgaagcaagtcttttgtttgagattgttttttaaactaaggtagcaaacattttgccatgtaatggcagtgttatatgccgttatcttgctttgtataaagaaaacaacatgagagatttttaatactggagtttggttacattacatatttaagcttctacacagaatgatggacacttcgagaagctaatccttatccagaaacattttaatctcttnnnnnnnnnnnnnnnnnnnnnnnnnnnnnnnnnnnnnnnnnntacgttgctccttttcacaatagtgcacatttttaccataatttagttatggctacaaaacatcagaagattttttttaatgtatcctctctatggtaattaannaaaaagttgtgcccttctagtctttaattggcagaaatatgtcccaaaaaagaaactattgcatttaagccacatcaccnnnnnnnnnnnnnnnnnnnnnnnnnnnnnnnnnnnnnnnnnnnnnnnnnnnccaacagagcataatacccttttactgatgtgtcttacagattgacatgaccaaagtcataggttttcatttaatttccaattcccccttccacaacatgcaccaactgaatatatgctctgggagccataaaatgtaccaaacatctacctcttcaaaagaatgcattaaaatattttaaagaattttttgtttaaaaggtganaaaaatataaacaagaaac

SEQ ID NO: 353004 - DNA, 749 bp, Homo Sapiens
cccaaagtgctgggattagaggcgtgagccactgcacctggcctgtagcaaataatttttaagcattctcaagatgtatgatgttgggtttaacatcatatgttcacagtgttttaaataagaaataatctgtctttagtatacaggatggttctttgtttgcctgaaaagtataagaatacaatttacttttcccaaactctttttccttatttttttctttcaaataactttaattatttaatcccatactgattaaaatatgtctgtctaaagggatctactactatttgcttttaaaaaagtgttccctatttatttaggaaaaagtgaagcaagcaactgaatttatatgtaaaaataacatttagacctgtggatcaaagattattttcaaaaatgagatatcaatttggtatcagtaaaaagtgtcttttctcttagtatataaataaataaaatgcaaattaagagtgtaagcagttgtgaatcattacaagcagtctgggataactaactcctagggataaccatttctatcctgttccaaagtcttattttatagtttgaaaagcactttgcacacagttcttgtatataaaagtaaagatgtaattataggatatagtgttcctgctttgtttaataagaacctcatttaaacttgacagctatggtatttttttaatgataacttcttttctgtttattgtaaaactaagttaaaaataaaaggttaatgagaaatg

SEQ ID NO: 353005 - DNA, 371 bp, Homo Sapiens
  misc_feature (182)..(182): n is a, c, g, or t
  misc_feature (184)..(185): n is a, c, g, or t
  misc_feature (191)..(191): n is a, c, g, or t
ccccccgggctgcaggaattcggcacgagggagcctaagaggcgcttgccccggcctctggttctagaaagacttccaggaggtggtgatccttaagccaagtacgaataggagccaactagaatgggaatgggtctggcagaatgaactgcaagcgccaaggcccagaggccaaaaaaaananngggggnaatagaagcgcatgttttgattgaggaagcaagagcagcttagtatgcctagaacctaactggagacgggaaatggttctatagacgatgttagagttcaactatggctacattccagtcttcctgtaagtgactttgtcacattctggcttaaaactcccccaaagggatcccattagg

SEQ ID NO: 353006 - DNA, 1105 bp, Homo Sapiens
  misc_feature (968)..(968): n is a, c, g, or t
atttatggattgggaaagtcccaaaagctaagagaaataagttttaaatataaagagtttgagcttagtggctatatcagctctgaagcacattacaacaagaatatgcagtttttgtttgtgaacaaacagactagttttacaggacacagctacataaactcattgacttttttattaaggaaagaaagtattatatgcaagccaaagaatggtcccaccagtaggcaaatgaattcaagtcttcggcaccggtctaccccagaactctatggcatatatgtaattaatgtgcagtgccaattctgtgagtatgatgtgtgcatggagccagccaaaactctgattgaatttcagaactgggacactctcttgttttgcattcaggaaggagtgaaaacgtttttaaagcaagaaaaattatttgtggaattatcaggggaggatattaaggaatttagtgaagataatggctttagtttatttgatgctactcttcagaagcgtgtgacttccgatgagaggagcaatttccaggaagcatgtaataatattttagattcctatgagatgtttaatttgcagtcaaaagctgtgaaaagaaaaactactgcagaaaacgtaaacacacagagttctagggattcagaagctaccagaaaaaatacaaatgatgcatttttgtacatttatgaatcaggtggtccaggccatagcaaaatgacagagccatctttacaaaacaaagacagctcttgctcagaatcaaagatgttagaacaagagacaattgtagcatcagaagctggagaaaatgagaaacataaaaaatctttcctggaacatagctctttagaaaatccgtgtggaaccagtttagaaatgtttttaagcccttttcagacaccatgtcactttgaggagagtgggcaggatctagaaatatggaaagaaagtactactgttanatggcatggctgccaacatcttgaaaaataatagaattcagaatcaaccaaagagatttaaagatgctactgaagtgggatgccagcctctgccttttgcaacaacattatggggagtacatagtgctcagacagaa

SEQ ID NO: 353007 - DNA, 558 bp, Homo Sapiens
  misc_feature (141)..(153): n is a, c, g, or t
  misc_feature (208)..(293): n is a, c, g, or t
  misc_feature (446)..(446): n is a, c, g, or t
  misc_feature (448)..(449): n is a, c, g, or t
ggggggggaaaatcccacgaccccttgttcctttgccccggggttcttttttggggaaaaaaattattggccccgttgctccctttacctttgtggggccgccccgcccccaaaagaggtggtttgtaagaaaattttctnnnnnnnnnnnnncggcccgcacaaggggttttttttgtgttttgtggggttgttgcccgcggggtannnnnnnnnnnnnnnnnnnnnnnnnnnnnnnnnnnnnnnnnnnnnnnnnnnnnnnnnnnnnnnnnnnnnnnnnnnnnnnnnnnnnngtagatttcacagcatctttatttatagcacttaaaaccaggaaaacagtgcaaatatatctcataggtgaatggataaactactacatcaaatatgtatactactctcaaatataaacaactttcatctggttagatacatggtggtaaaanannataataaaacaactattcatcaactcatataaaccttaggagtaatttgctgagtgacaaaaatgccaaaagcttacatactctctatcaataaaaattcatataaccc

SEQ ID NO: 353008 - DNA, 624 bp, Homo Sapiens
  misc_feature (98)..(98): n is a, c, g, or t
  misc_feature (531)..(531): n is a, c, g, or t
  misc_feature (553)..(554): n is a, c, g, or t
  misc_feature (606)..(607): n is a, c, g, or t
cggcacgagcagaaataccacttctcaggggaacaaaatttctgttggcataaacatatgaaagaaagtcttcactgggagctttataggagtactgngacgatagaaaaggaaaaaaagcagtcatagatttcatgtggctgtttcttatactgacctcagtcaaaattaaaagcagaaccttatcaatcccagccctatagaggcggttctgcaaggaaataaacaaatgctgtccaaatatagacttctcatggtaaaacatgatctaaggagagaatttagaggttttagactggcatctgcttctaaattctgtttttatttatgagtgtttctcccctttggggacattgtctttgtaaaaccaaacttagaacacccccacacaactaattgtgctggatttaataacctctacttgctttatcataagtctgtgtggttcaatgtagtgttttattatactggcatatataatttctacttacattgtttcttgttagaggtaatgcatgaatttatccctcncgaggagagaacatgaattaannaaaatagtgcctgtaatataatgtgatgattatgatatcacaagcaataaanntttttttacaaaacttg

SEQ ID NO: 353009 - DNA, 995 bp, Homo Sapiens
gcctcccaaagtgcatgagccaccatgcctggcctgtttagttttgtttcaagttgaaatacctttcttgtgttttctaattagaaaagtaatatctactcattgtaaaaactcaaacagtgcagaaatgtagaaagtagaaagtgtaagtccctggtttgtcccttctgcctgagcacaaccactgctcacagtttgatgtatatccttccagagactctcaaatttaagcaaataatttttattaccatgtctttttatttgaagacgtacatttgcctcccaaagttcaacacaagttcaactgaccatatccttccatgacctgaatagatgctatcctttatcacgatgttcaattgcctttgaaagagagtagtccaggtatattcctgatcaaaatttggcatttttgatgatactactctacacagatcagactcatgtgcagaatcgtgcctggagagagaggtttggttaagacagagatttctggaaacattcaaattgcaaatggaaacttgaaacccacaatctaatgaggaatgtactggaaaaataatctgaagagttgacaaattgtgtactagattgaacacatggaatgcaatgcaatgagactttctgcactaaaacttatcctcatatgtacaacaatgatgtgtctattatataacagtgatgtgtacatttctgacaccccatacataatatacacagtttgtataaatgcatacatttaaaaatatatatgtacaatacagctaacataaaactgtagtacgcctgaaggatattactagtgcctaatattgagtatgaggtcctgcgtgttcgcatcaacttggaagtgcagtaattgttataaaattaatcagtgcagccaacattatttatgaatcacatctttgaaactgtgcagtagcatatacatatatatttttaaataacatttttcacagttttccagagttactgttgaaatctgcatcacc

SEQ ID NO: 353010 - DNA, 298 bp, Homo Sapiens
  misc_feature (283)..(283): n is a, c, g, or t
gtgctaaaaaaagggcaagacaacataaaccccagttgtaaggactccatttgcatacttgatttaacactttttggtgtggaaggaaatgggactactgggctgttcgcagagcagcaacataatattagtgctttaagtaccagaaaccacccacagctttgtgggcaagttggggatggaaagattcaagagacttcatttttagcttgttacttgtcctaatgatagtagaccaggaagatccccatttaatagtacattccccatttttaaaaaaaantgatgcctttttttt

SEQ ID NO: 353011 - DNA, 973 bp, Homo Sapiens
aataaaacctaaagtgtgaaaggaaacggcggagtaaaagcccagactcaatgcaaccttcaaatgtctgccaaagatcccagaagttgtacattttaccctaacaacatcacttttgttgaacattcccaactcccagaatgatccccaatcaccctaatctcagaatgctggaatgatgtctgttggaaaaccccaggactccacacacaaaactcctgggattttgtttcccatctctttctaggtgtttgcaatgtacaaataatacagctgtgctaatctcacatttagccatgatagatgatggttctagagtgtacttccatttgtaagtcctcctgataagtgctttcttgtttatcactatgtaaatctgaaatattttgtacttcatttgtttttatccattctgaattttcaaagcataaaaatgtcaaagaaaaattgagataaacattttgttcaccattaaatgtttgcatctgcagtctatgatgagaaacaatgaaattatgactaaaatttaacaaatagtattttcttatagaagcaatgtattaaatgattagatacacaggacagttcacagcaaattgtttacttacatggcataattgaaatactgttatttgtaaagagttcctatactgccctaccttagctaacccagaattgttcatagacttgtgataatatggtgttatgggaaaacacattttgtgcgcatgatgaagagagcaccgtgaatctagtcttgactgcccctggtggaacatttgaaagcccttgggaccccaggagagatgtttttgcagcatgtatgctaaatttgtgagttagcaagaccctgctgtgattactatgttgtacagatcttcaaagtatattgcctaatatgagtcatgttatttctagattgaatttaaagtaagtatggattatggaagtctagtaaatatacttttccctt

SEQ ID NO: 353012 - DNA, 511 bp, Homo Sapiens
cccctacaccaggtcgggaacctggaccatgaagaggtgcctgttaaaagcaaatatagtagatatgttaaatgtgttggataaaataggttgtatgtcccagctggcatttagttacccagaaaacctttccaaatttgcctagtttaatacgctgtaggtagaaagtatttttatcttatggtttctgtagcacttggtactcaacaaggatacttgtttcccaaatatcagatcactttgagaatatattgtgacaggcagatgtccttgaggctttactactcctattcaggcctaaaagtttatagtggaattctttaaccactgatttcctcacttgacaaaggctacagagaatatgaagatttcttgtcaagtcttttgaaaagacctaagcataaatatgccactcatgagtgtagtaaagggtaccgcatttatgtcaaatgtgggtatttaatatgatttcagacaccactgattcaattaaaaggggttctcagttcaa

SEQ ID NO: 353013 - DNA, 740 bp, Homo Sapiens
  misc_feature (115)..(232): n is a, c, g, or t
caaaggatcatagctgaaataccagtgaccatcacaataggaaaggtggtcagcttgtggaattttccttttggtagcccttaagaagtcattttagcagtactaaccatacagnnnnnnnnnnnnnnnnnnnnnnnnnnnnnnnnnnnnnnnnnnnnnnnnnnnnnnnnnnnnnnnnnnnnnnnnnnnnnnnnnnnnnnnnnnnnnnnnnnnnnnnnnnnnnnnnnnnnnnccacagaaggtacctgaggtttgggaagtgtagaaccaggatttaaatctggaactcctaggcaaaaaaaagtgtttgaacaatcacaatatacagctttacattagtaaaattttgaatttgtttttgttcattgttcactatgcatgttttaaaatgtgagggttatagcttatctgttaggacaaactctctaacttctaattgatggctagccaaacatatcttcaaaaaataactattataattataccttagttttcaacaaccaaaacaacatatccaaaaaaaactaaattccttaacagatcatttattagtaaatcttcaataactagcactaatctttgcccaaatgaggtaaggcctccatttctgattggaataattaattccttggcccacaagaaatcttaggctattaaaggtaaaaatcatgtttgtcttgagtttcttaatagtaatgggctttttatgtagtagatactcaaaagtcaactgagtcaac

SEQ ID NO: 353014 - DNA, 384 bp, Homo Sapiens
gcctaggagttccagatttaaatcctggttctacacttcccaaacctcaggtaccttctgtggcctctctaacctcaatttttttacttgtaaaatggggacatttaacagtatacctcagtgtcgtgaagactaaatgaagtaccacttgtaaagagtttattacagtgcctgacatatactgtatggttagtactgctaaaatgacttcttaaggttaccaaaaggaaaattccacaagctgaccacctttcctattgtgatggtcactggtatttcagctatgatcctttgttgtgtatttatccagactgaaagatgtttttctagtaaccatcttgcatcgtcttagtctccccattaaataaacttttcctacaaact

SEQ ID NO: 353015 - DNA, 448 bp, Homo Sapiens
  misc_feature (387)..(387): n is a, c, g, or t
  misc_feature (426)..(426): n is a, c, g, or t
gttcgccgagccgcaggagagacacgctgggccgaccccagagcggcgctggacagagccaacacagatctatagatttctttgaactcggaatctcatagcaccaatatttttgcacagaactcttacttacatgtctcatcgaaactccagaacaaacatcaaaagcttgtcagctcatttgcagcttacatttttggtttcttccacaaaaatgataagccatcaccaaactcagaaaatgaacaaaattctgttaccctggaagtcctgcttgtgaaagtttgccacaaaaaaagaaaggatgtatgttgtccaataaggcaagttcccacaggtaaaaagcaggtgcctttgaatcctgacctcaatcaaacaaaacctggnaatttcccgtcccttgcagtttccagtaatgaatttgancctagtaacagccacatggtga

SEQ ID NO: 353016 - DNA, 962 bp, Homo Sapiens
  misc_feature (65)..(143): n is a, c, g, or t
  misc_feature (261)..(316): n is a, c, g, or t
  misc_feature (325)..(376): n is a, c, g, or t
agcggggtgcgaggccaggtagggtgagcggcctccgaagcggagcggggctctgaggagacacnnnnnnnnnnnnnnnnnnnnnnnnnnnnnnnnnnnnnnnnnnnnnnnnnnnnnnnnnnnnnnnnnnnnnnnnnnnnnnnggtccgccggagcctgctggggcgagcggttggtattgcaggcgcttgctctccggggccgcccggcgggtagctggcggggggaggaggcaggaaccgcgatggcgcctcagaagcnnnnnnnnnnnnnnnnnnnnnnnnnnnnnnnnnnnnnnnnnnnnnnnnnnnnnnnnttcgggggnnnnnnnnnnnnnnnnnnnnnnnnnnnnnnnnnnnnnnnnnnnnnnnnnnnngagctgtggagggggtggcagttactcggcctcctcctcctcctccgcggcggcagcggcgggggctgcggcgttaccggtgaagaagccgaaaatggagcacgtccaggctgaccacgagcttttcctccaggccttgtgagaagccaacacagatctatagatttctttcgaactcggaatctcatagcaccaatatttttgcacagaactcttacttacatgtctcatcgaaaactccagaacaaacatcaaaaggaaaacatttaaagttgatgatatgttatcaaaagtagagaaaatgaaaggagagcaagaatctcatagcttgtcagctcatttgcagcttacatttttggtttcttccacaaaaatgataagccatcaccaaactcagaaaatgaacaaaattctgttaccctggaagtcctgccttgtgaaagtttgccacaaaaaaagaaaggatgtatgttgtccaataaggccagttcccacagggtaaaaagcaggtgcctttgaatccctgaacttcaatcaaaccaaaacctggaaaatttcccggtcccttgcagtttcccagttaatg

SEQ ID NO: 353017 - DNA, 883 bp, Homo Sapiens
  misc_feature (833)..(833): n is a, c, g, or t
ccccagtaattcggcacgaggctgaccctgagctgatggcatctaccttggagacatgcaagggcctcctgaggtccatcttgacttactggagaccagtgatccctggtcctgaccccactcaggagcctgtggactcagccagccccgagagcgatgcgccaggccccgtatatgctgccgcttccctgggcagtcagttgggtgctgcggtcggtggccgagcacccgctcagcagggcagaggctgcaggactcattggctggcttaagagccatattttgccacaccctgtggtcgtggctgacctccttaaggacagtgccgtgaggagcagcatattcaggctgtatagccggcttctgtggggctgaggggctggcagggcctgtgcaggaggtggcctgcctgtttcaatacggtcatgctgcagctggtggctgcccagggcccggcaaggagccccttccacccggccatggaagccctctccctgtcttctctgagtgagaaggatgaagccacacaagcctccgcagcattcctagtgtctctctacataaaggacatctggctgggggctcagcggccggacaccctcttaacccacgtccggatggtgtgtgaggccgcagatgatgccccgagcagtgaagaggaggccatcgtggtgctctgcaaggacgccgccagcgcagccctcagatgcttgactcctgccggccagcaccttgcaccctgatgaccagagcctcgagcacagcaccagcttctagaagtttggttgagtcaagggtttccagagaaggcatgggaaacaacaggttcagtnacattggtctcagttctttgcacaagaaaagttgagaggatctttattga

SEQ ID NO: 353018 - DNA, 368 bp, Homo Sapiens
caaatatttaacctgatttaacatttaatcaatacaagatttttaaattatagcaaattgtaaaatcatacaatttttaattttatcttagtattctcaacaatcttagaacttaatattcttataggcattttgatttaaaagctaagactaaaataagtgattttaaacagctattttgttctgacaccataaaataaacagaactttatttttacaagatttattaacaaccacatagttaatagaagcattttattacatcagcactaatatatgcaacaacagacttcatggcaaaggtgtgcgtttcaaaataggtggccatcttgaaattcataatgttgaataactacaaacgtacattt

SEQ ID NO: 353019 - DNA, 967 bp, Homo Sapiens
  misc_feature (3)..(3): n is a, c, g, or t
  misc_feature (5)..(5): n is a, c, g, or t
  misc_feature (7)..(7): n is a, c, g, or t
  misc_feature (11)..(11): n is a, c, g, or t
  misc_feature (13)..(13): n is a, c, g, or t
  misc_feature (16)..(16): n is a, c, g, or t
  misc_feature (28)..(28): n is a, c, g, or t
  misc_feature (34)..(34): n is a, c, g, or t
  misc_feature (42)..(42): n is a, c, g, or t
  misc_feature (45)..(45): n is a, c, g, or t
  misc_feature (52)..(52): n is a, c, g, or t
  misc_feature (54)..(56): n is a, c, g, or t
  misc_feature (60)..(60): n is a, c, g, or t
  misc_feature (62)..(62): n is a, c, g, or t
  misc_feature (68)..(68): n is a, c, g, or t
  misc_feature (73)..(73): n is a, c, g, or t
  misc_feature (77)..(77): n is a, c, g, or t
  misc_feature (91)..(91): n is a, c, g, or t
  misc_feature (95)..(95): n is a, c, g, or t
  misc_feature (103)..(103): n is a, c, g, or t
  misc_feature (113)..(113): n is a, c, g, or t
  misc_feature (116)..(116): n is a, c, g, or t
  misc_feature (120)..(120): n is a, c, g, or t
  misc_feature (138)..(138): n is a, c, g, or t
  misc_feature (178)..(178): n is a, c, g, or t
  misc_feature (243)..(243): n is a, c, g, or t
  misc_feature (253)..(253): n is a, c, g, or t
  misc_feature (255)..(255): n is a, c, g, or t
  misc_feature (273)..(273): n is a, c, g, or t
  misc_feature (319)..(319): n is a, c, g, or t
  misc_feature (328)..(328): n is a, c, g, or t
  misc_feature (331)..(331): n is a, c, g, or t
  misc_feature (343)..(343): n is a, c, g, or t
  misc_feature (347)..(347): n is a, c, g, or t
ccntnanaaantngancagtttaaaatnctttcnaaataganatnaaaaccntnnntgangnaggttnaaatnctgnttaaaaagggaaanactnaatttagnaattcggttnccnagangaaatcgagtggctattnatccgtgatgttctagatttttaagactatgtacttcctntttctttggaaaataatcatccagtttgatgcccattacaaattttcctgctatgaaagaaattntatgcgcgcncngttttgcaataaaaacanacccggcttcgcaatgggagaacttcggtgcgcgcgtgccgtgagngtcctttgncantctcaactttcntctnggtctgaaatttaaagcttctcggaataatttaggaacagcttgacccgttgagatactcaaggacaaccctccagggaaatagtatgtttccttcctgggaacaagatgctagcgcggtgcaccgggaggtatctggtgtcaacaatgccagagcgccctctgctgcctcaaagaggcaggacaccagttacaaaagccagatggcacagtggcaataagcggaggaaacattaagctcttagaaacgtttaatctgtgaaatttaaaagctctcatcatattctacttttgaaagggccacctgattttgattttgagcactccttggatgttatcttctattctggaggataatgaaaagtccgtgttttgaagttttcagattatttctgtagttatatttctccactctttctcgaattttatatggaaatacgaaattgcaaatctaagtgaaaaacctttgtgtaaaacaggtgagtggagaagacgtcctggtttctccaaataactaagatctaataaagaaacaaatcttaattaaaataaagataccgagcacatgtttttgtgttagtttaaaacgataataaaaagaaagaaattaagtctcgatgt

SEQ ID NO: 353020 - DNA, 439 bp, Homo Sapiens
gggaagtattcgtgagcaataaaaatcacttttttgagttgaataataatcagttaagaatatttaccgcatagcaacacaacatataaagatttgttacaagttgtttacggatgtttgactatttttgctgaagtattttagagtattgaatgtcttctctcttcaagtttctttcatgttcctaatttcagctcctgtagccagagatcacaggtcttccctgtgaaactttggtttctttctataaatgtgtgtggttttcagcgctcaactcctgtcttcaaatggtagtaagttctacttctacttctgtcattcagaacattttatgtcaaatgatgtaatgcagaaattcttgtgcatatttgtaactgaaggaagctttttagatttatttttgtttttaataaaattcagattcctattctaaactggt

SEQ ID NO: 353021 - DNA, 704 bp, Homo Sapiens
aaaagacatagactatcacccctccaaaaatgtgcatatggccccatacaagacacatgtactgccagagcttggggaactccctagaatctactcctagaccaccctagtgaagtaccatagaccatattgtctagatgggacaaaataataaattttgactaagaacttactgtttagagagaaaaaatagtaaataatgttcaaaatgagaagacaataactgacaagtctgtgatttttgggttagatgagaccacttttgatttttgaggaataaaaggagttagttttttggtcctgatgtgtaaaatgattcatggggtttcacatacagacaagtagttttcttttcagcaaatatttaacatatctctcaatatatttttcaccagtttttggtaaatatgcattgctataggtataccaagttttttttgttatgtttagtaactaatttcattttttctgtatatgtaaatatagctattggaccctgcattgaaaaccttcttagtactaacaacactccttttattattaccttcatagttactttaaatgacatatttatttcgagttttacttctggctgagttgcaaagtctatgagaatgttacctcctgtctcagaagcttgttagttattgtgccacctaaatattgtaataaaagtgtttaaataaaaatcttcttaaaattta

SEQ ID NO: 353022 - DNA, 2152 bp, Homo Sapiens
  misc_feature (1790)..(1894): n is a, c, g, or t
ggtttaaccacactacggtaccttttatgaagaaaaattagagcataaaatctactacaagctccataggaactcaaagatgagggcaaaactgtgagccaagaagcagagaaagaaaatagaaccagttattcttgatttaggggacctcaaccttgggttcagtctctgaggacaaagggaaaggtagttgttggcctgcctctcgcctgcacgtcactgctggactagctgtcgcatgtggctgggagctgcaaggccagtgcttgaggggccccagcagttccacaggtggtgaagcctgagttggcagaggaggagccagaagagaactgccctttctgcactggtggaaactagttatttatgccatgtggagagccagtgagatagatagatagtctgtttgttttgaggacttggaaagttgttcctatgaagcctggagcttggatggttttgagaggttaatggtgcctccacactcactcttccctagttccaggattactgtcctagcagctaacggttctactctcttccccagagtgtagacaggcagcaggtctccccacagctctgaaaggaccctggtgacagctacaccctcagcaccaggagctggccttcctgatgagggaggcttccaggaaacacagaatccacatgaccttaagattatttacaactcagtcatggtgctgctgtcctccaggcttactggcccctcctgactggcatcaggggcttcctcaggtggtggagagagtttactttcaacaactagtttattcaagaaaagaacttactgattcctctgttcctaaagcaagagtggcaggtgatcagggctggtgtagcatccggttcctttagtgcagctaactgcatttgtcactgatgaccaaggaggaaatcactaagacatttgagaagcagtggtatgaacgttcttggacaagccacagttctgagccttaaccctgtagtttgcacacaagaacgagctccacctccccttcttcaggaggaatctgtgcggatagattggctggacttttcaatggttctgggttgcaggtgggcactgtatggctgggtatggagcggacagcccccaggagtcagagcctcagcccggctgccctggtggaaggtacaggtgttcagcaccttcagaaaagggcataaagtggtgggggacaattctcagtccaggaaaatgcattgaccattgctggctatttgcttacctagtaagaattggattcatttttgaccagattattcttctatgcttttttgcaataaatcaaatcccacatatctacaagtggtatgaagtcctgcaccccccaggaggcctgtccaggcatgtcttcagaggcagggtgggttacactcatttacctcccctctccccaccaaattatgacacaaacgagtatgtttcctctctagaaccctgtaatgcctcctcccccatccccagagctccttactgtaggtcttaccctggacaaggattttttcaagttggaggcacagaacatgagcaatctgacattcccacagcccctcaaacatgcaaggctactaaggcaggaggagtataaatgatggatattgaccaagacctgcttggacggagaccgccatattatctgttctcttcgttcacaaaacagccttcacttgtctcagaatttgatggacacatactgtgatgagcaggagcttcagatgcactctttacacattttgttgaaataaacctctacattttgttnnnnnnnnnnnnnnnnnnnnnnnnnnnnnnnnnnnnnnnnnnnnnnnnnnnnnnnnnnnnnnnnnnnnnnnnnnnnnnnnnnnnnnnnnnnnnnnnnnnnnnnnngacggcggcccgccccccatataactattccaccccagcagggagccccccaaacaataaaccagaacccaaacaaccacgcactacccacggcatcgaacaacgagaggcgccgccaccaaagacaaggacggcgacaaccgaccccagaacaaagacataaagccaaagagaagacaacgtgaccaacgcaatgacactcacacaaaagacaccacctagcacacgcgggccgcggaaacaccgcctcgcacacac

SEQ ID NO: 353023 - DNA, 677 bp, Homo Sapiens
  misc_feature (189)..(202): n is a, c, g, or t
taacagccttttcacaacaaaatttattagaagaatagtggttttgaaaactctagcatccagtgagaactaccatacacaacattacagctgggaatgtttctccaaaatgtcatggtcaaataatacaatggaaccattaaatcttacacatgcacgaaagaacaagcgcttttgacatacaatgcnnnnnnnnnnnnnnggggggggaccacatggattaaaattttaagtactcatcacatacattaagacacagttttagtccagtcaaaaatcagaactgcattaaaaaatttaatgtagtgcaatcaaaccaaaaaacttaatttgtgatcataagtgctctactacataaacattgatcatagcaaggaacaaaaagttcaaatcacacagtacaaaaaaatctgtaaataaatataaactacagtacaagagaaatattaaattatacaattccatcaaactgtaaacagtatattgaaatgaggtccataagagtaaagggggttcctgttttgttgtatgacacttgaacttctagaaatctgaaagataccattttccatatctccaaaggctatgggttttatatgtggagagaatttattttagatgtaagatttaaaatattaaagcagagaaataatctatttttgttaaccacagatagg

SEQ ID NO: 353024 - DNA, 568 bp, Homo Sapiens
  misc_feature (82)..(98): n is a, c, g, or t
cgatactctttgccattgactgctaatcaataataagccttacctagaaaccagaaactgaaacttcaaacacagagctagnnnnnnnnnnnnnnnnncccaccaatgctacctctgtaaaatagaactagaagcaaaatgaatagtttcaagacagtcggctaaccaacaaaccaaatgcacaagagaatactaaacagggttttactgtcatcaagttcgaaggcaggaagacagactagaaaaggtcttaggagagatgggctaccatggacaaatgaagccacactctatctgttaaatctaaattctaacattaaaactcctgaatcctggagttagtttaatgtcactgacattaactagctttagttattgtcattttattcaaatggatgccatttgattaggtaagtattgagcattattttaggagaaaaaccaaacccaactcctatttgcttaggtaccatgtcccatgaacaaaaaagaagaagagagcaaagtatttttgagacagtctttaagtgaagccataagaacttatacgtcgtgccgaatcgcacga

SEQ ID NO: 353025 - DNA, 476 bp, Homo Sapiens
aaaatacaaaagaaagagaactctattatttacttacctgtattaatgaagaaaaatataaataattccacaaaattgattgttttcctaaagagcttaaagattagagttaaaaattggttttgaaacagaattatccttgttatttttgctggagagaagggaggaaattcagaaccaaacattctatttaatttgcaatgacttgcagtacttttttccctatccttatcctgtgaaacttactatcataaggttctaaaacagagaacttgtgtttaaataaagcccgtttaactttggtccacttttcttttggaaattaacttgttagaaaacaaagttagttcccaaacaaaacaaaatctaagttataatttgcaccattacaaagaaattgctgtcagggttttacacattttaaaaacatttcaatttcaaatgtgtatatcgtcaataaatctacctttactgat

SEQ ID NO: 353026 - DNA, 1086 bp, Homo Sapiens
  misc_feature (106)..(106): n is a, c, g, or t
  misc_feature (131)..(132): n is a, c, g, or t
  misc_feature (183)..(183): n is a, c, g, or t
  misc_feature (574)..(653): n is a, c, g, or t
  misc_feature (963)..(1022): n is a, c, g, or t
aagaggacagcaattcagcttccaggccaaagcagtttagacaaggtgtgcccatcaggactccctctcaggccctggctgtttaccatgtcactgcctactgtgnacttcatgcccttttggggataagnncaccacaaaacgcatgggcacaactatccatgggctcttagccaaaaatgntcttgcctctggtctctgaaaaactggggtgagtggttacctcaaagacaattgcctccagtttgggggctcctctcagggttcaccctgtcaccggggcgtgggaccgacctgggaaatttccactagagttttgccctcagctcctccctgccagcatcccagtcaccaccaggtggcgcttctgacacggtccacgtgcctggctctgaaggcccaactgtcagaccagacccctcactcatggtggggagacttgacttcctcgggctcttcaggagactgagacagagaagacaagtgaaagcgcagcctgtacatgactctctgtggtccacgtcctgcctctccctggggtttacacggccccaataaagcctgctctggcctnnnnnnnnnnnnnnnnnnnnnnnnnnnnnnnnnnnnnnnnnnnnnnnnnnnnnnnnnnnnnnnnnnnnnnnnnnnnnnnntaacttataataatgttcaaacaactaatttaatcaaatatttatataaatataatttaatctcatcctttccctctctccccaaaatcctcctaaatcatttgctttctaattaaatttcccttttttcacatcttgctctttgtaaaatcctttttgtaccataactcaatccttttgacctaatacccccttttcccatttctttatctgtaaaaaccctcgcaccttgttttttgttaaaaacttcttgacccaattccctaaatctactctttactcttaataattctatctaaatgtctgttannnnnnnnnnnnnnnnnnnnnnnnnnnnnnnnnnnnnnnnnnnnnnnnnnnnnnnnnnnnacattcaatattattccccctttgattctcctatatatcccctctgtcaccaaaaccctgtcgt

SEQ ID NO: 353027 - DNA, 2061 bp, Homo Sapiens
  misc_feature (46)..(46): n is a, c, g, or t
  misc_feature (79)..(79): n is a, c, g, or t
  misc_feature (89)..(89): n is a, c, g, or t
  misc_feature (94)..(94): n is a, c, g, or t
  misc_feature (96)..(96): n is a, c, g, or t
  misc_feature (99)..(99): n is a, c, g, or t
  misc_feature (103)..(104): n is a, c, g, or t
  misc_feature (106)..(106): n is a, c, g, or t
  misc_feature (117)..(117): n is a, c, g, or t
  misc_feature (119)..(119): n is a, c, g, or t
  misc_feature (124)..(124): n is a, c, g, or t
  misc_feature (127)..(127): n is a, c, g, or t
  misc_feature (150)..(150): n is a, c, g, or t
  misc_feature (165)..(165): n is a, c, g, or t
  misc_feature (173)..(173): n is a, c, g, or t
  misc_feature (179)..(179): n is a, c, g, or t
  misc_feature (182)..(182): n is a, c, g, or t
  misc_feature (210)..(210): n is a, c, g, or t
  misc_feature (213)..(213): n is a, c, g, or t
  misc_feature (215)..(215): n is a, c, g, or t
  misc_feature (217)..(217): n is a, c, g, or t
  misc_feature (225)..(225): n is a, c, g, or t
  misc_feature (229)..(229): n is a, c, g, or t
  misc_feature (981)..(993): n is a, c, g, or t
  misc_feature (1022)..(1022): n is a, c, g, or t
atcttacaggtgctcaggacggcagtgtacgaatgtttgaatggangcggcctcagcaacttgatctgctttcgtcaanctggcaatgnaaaantnacnaaannanatatttaattnanaaggnaanaagtgtggtgttgcggaatgganagggtttatctgagnatctgganaagatnaancaaactgcatcaaatcctaaacctatanatnantnggcagatnccanagtaaagccacaagtgactttgcatttattacctcttcaagtctagttgccacatctggacactccaatgacaatagaaatgtttgcctctgggacacattaatatcacccggaaacagcctcattcatggtttcacgtgccacgatcatggtgccacggtactgcagtatgcacccaaacagcaactcctaatctcggggggtaggaaaggacacgtctgcatttttgacatcaggcaaaggcagctcattcacacgttccaggcccatgactcagctattaaggctctggccttggatccctatgaggaatattttaccacaggttcagcagaaggtaacataaaggtttggagattgacaggccatggcctaattcattcatttaaaagtgaacatgctaagcagtccatatttcgaaacattggggctggagtcatgcagattgacatcatccagggcaatcggctcttctcctgtggtgcagatggcacgctgaaaaccagggttttgcccaatgcttttaacatccctaacagaattcttgacattctataaagattggggttttatttttatatacatttcagttaaaaggcacactacagtcatcactaggcaattctgctttctaagcagttgtattgaaaacagagaatctctgtgtagaatttgaatatgacccaagctgagtattatctaaacaggttggtggaatgaatgcgcatgtaccttattatgctgacatactnnnnnnnnnnnnncctagtattgtatgaaggatagctattcntttacagcatttagcaaacctgattcagaaaacattgagattagcaaattagtaacttgaaataatgaaaaggacgtttataccaaattaaggaagaaaatgttgctgatttgggtttttcttcctgttcttaccactgactgaagcatgcctgcagtctcctcctctgttgaatgaaggataatcataaggtgtttgttaggagcgctagaccacctggaaaactttcttagctgtggagcagtgcgcagtgaccagttctctgctgtgagaggccgtttccattctttcctgctgaatatttttcctgttagtgtttatactgagctagtactgtaacttgcaaatgagtgcaaatttaaatgcaatgttttactcacaatttgcacattcacattttttggactgctagtttttctatttaaatatttgccttcatgttcaggaatgtactatgtgaacatgacatatttgtagttaaccaaacacaccttcttagtccagtttagtactttttctttttcgtgtattcaaggttaaacacccaaacatttaaggatatgttgaaactacaccaatagagcatttcatatcataattaaaatgaatgttaggcttcttgtggccagttaatagttgatgagattggtgacattatttattgccacagcctattgtataaactatgcagagttaaatatttgcttgtaaaatattagccaatgttgtcattattttgatgtatttccttggttatgaccaaaaatatgttgagatactgaaactaatgtctgtgtgtttaaatgtttaccagcaaattgtcttatcatgttaatgagaatgttcaatgcctgtgtggtaaatagtaaatacaatggcataaaagtaactttctctgaagatgtgatgttcaggctgtgaaatatatatgtaaaagaaaaataaatgttatttgttagagtttttagtttgatactgtttttgaccattgagatttttaatttgataaaatgtttaactgttagagaatttgcaagct

SEQ ID NO: 353028 - DNA, 455 bp, Homo Sapiens
  misc_feature (19)..(19): n is a, c, g, or t
  misc_feature (50)..(50): n is a, c, g, or t
tgtaatccaaggttaaacncccccaaaccatttaaggatatggttggaanccctacccccaatagagccattcccatacccataattaaaatgaatggttagggcctccttgtggcccagttaatagttgatgagattggtgacattatttattgcccacagccctattgtataaactatgccagagttaaatatttgcttgtaaaatattagccaatgttgtcattattttgatgtatttccttggttatgaccaaaaatatgttgagatactgaaactaatgtctgtgtgtttaaatgtttaccagcaaattgtcttatcatgttaatgagaatgttcaatgcctgtgtggtaaatagtaaatacaatggcataaaagtaactttctctgaagatgtgatgttcaggctgtgaaatatatatgtaaaagaaaaataaatgttatttgttagaa

SEQ ID NO: 353029 - DNA, 884 bp, Homo Sapiens
agcggggatcgactgacgccggggccgggatggcgacgcctcggccctgcgcggacgggccctgctgctcgcatcccagcgcggtgctcggcgtacagcagacgctggaggagatggacttcgagaggggaatctggtcggcagccctgaatggagacctgggccgagtgaagcatttaatccagaaggccgaggacccaagtcagcccgactcggccggctacactgcgctgcactatgccagccgcaatgggcactacgctgtgtgccagttcctgctggaaagcggagctaagtgtgatgcccagacccacgggggtgccactgctctgcaccgagccagctactgcgggcacactgaaatcgcgcggctcctgctatcacatgggtccaaccccagggtggtggatgacgacggcatgaccagtctgcataaggctgctgagaggggtcacggggacatctgctccctcctcctgcaacacagcccagccctgaaggccatccgggaccgaaaggcacggctagcatgtgacctgctgccttgcaacagtgacctgcgggacctgctatccagctgagccgccaccctatctccagctgcctttaaagggtacacagaccagttctccaagcccctgccttggtcagcatccatgctgctgggcagggaactgaggccagaccacccaggaagagccccagtctggtcactgtggaagcgagggagtagatttggtgtggctaaaagtgtttaagactggacagatgatcatattctaaattagttcatatgagacatctatttatttggaaaaaaataaagttatatccttacctcatcccaacccaaggtaattgcaagttaaggctttatttaaagc

SEQ ID NO: 353030 - DNA, 401 bp, Homo Sapiens
ggccccggccacgccaagcctgatcagaagaggccttagtgatgctgtctgactgacggtttctgcttgcctagatatcgaagccagaccagatatgcagttagaatcggacctgaagctggacaggctggaaacctttctaagaaggctgaataacaaaggtacctactggaagccagaaggctttgctttcagaatctctaaatcctaattctgattgcttttcttcctcagccaaaaaaaagaagttttggtcaagactgattagagaaacaagccctgattcacttgataacgtactaaattggggattcccaataatacatttttttcttgaatctaagcccttgggatgccatccaattggaattgtgaactgagtgattttgcttataactctg

SEQ ID NO: 353031 - DNA, 520 bp, Homo Sapiens
aagctgggagcggggagacctgggtttgaagtgttgaagtatagtatactttttcatttgtttatttctctattccctccttctcataactgccacccctcaggacttaagttctccataacgggcagtaccttctcaataattgatacctacgtgatagcgtgagaaagtctatttgcattttcaacattttcttaggaagaaccgaaatgcaattcccatttttatttttaataagcaaaagcataaatcttagaaaacctatgaaaaagaaatacttttatgttatccctaatcgtcccactaaatggaatgcctatgattagcttcattaagagttttatactgtgaagattttattagaagcaatatatgaaaattacttggattaatgtgttaatcttcctctttaaaatgctaatatccattttatgcacattaaagctcagtatgcattttctttgatgcatgcagtttctatcaattaaatataaagaatgaaacttagcaccaaaaaaaa

SEQ ID NO: 353032 - DNA, 1246 bp, Homo Sapiens
  misc_feature (677)..(677): n is a, c, g, or t
  misc_feature (688)..(688): n is a, c, g, or t
  misc_feature (690)..(690): n is a, c, g, or t
  misc_feature (825)..(825): n is a, c, g, or t
  misc_feature (834)..(834): n is a, c, g, or t
  misc_feature (840)..(840): n is a, c, g, or t
  misc_feature (843)..(843): n is a, c, g, or t
  misc_feature (862)..(862): n is a, c, g, or t
  misc_feature (873)..(873): n is a, c, g, or t
  misc_feature (878)..(881): n is a, c, g, or t
  misc_feature (883)..(883): n is a, c, g, or t
  misc_feature (888)..(888): n is a, c, g, or t
  misc_feature (893)..(893): n is a, c, g, or t
  misc_feature (895)..(897): n is a, c, g, or t
  misc_feature (899)..(899): n is a, c, g, or t
  misc_feature (918)..(918): n is a, c, g, or t
  misc_feature (925)..(926): n is a, c, g, or t
  misc_feature (929)..(931): n is a, c, g, or t
  misc_feature (939)..(940): n is a, c, g, or t
  misc_feature (942)..(942): n is a, c, g, or t
  misc_feature (949)..(949): n is a, c, g, or t
  misc_feature (952)..(952): n is a, c, g, or t
  misc_feature (1004)..(1004): n is a, c, g, or t
  misc_feature (1023)..(1023): n is a, c, g, or t
  misc_feature (1029)..(1029): n is a, c, g, or t
  misc_feature (1060)..(1060): n is a, c, g, or t
  misc_feature (1067)..(1067): n is a, c, g, or t
  misc_feature (1071)..(1072): n is a, c, g, or t
  misc_feature (1093)..(1093): n is a, c, g, or t
  misc_feature (1096)..(1096): n is a, c, g, or t
  misc_feature (1122)..(1122): n is a, c, g, or t
  misc_feature (1146)..(1146): n is a, c, g, or t
  misc_feature (1212)..(1212): n is a, c, g, or t
  misc_feature (1220)..(1220): n is a, c, g, or t
  misc_feature (1237)..(1237): n is a, c, g, or t
tcccccgggctgcaggattcggcacgagagcaaatccaaatgctgcaagttaccatggtaatttggctgtgctttatcatcgttggggacatctagacttggccaagaaacactatgaaatctccttgcagcttgaccccacggcatcaggaactaaggagaattacggtctgctgagaagaaagctagaactaatgcaaaagaaagctgtctgatcctgtttccttcatgttttgagtttgagtgtgtgtgtgcatgaggcatatcattaatagtatgtggttacatttaaccatttaaaagtcttagacatgttattttactgatttttttctatgaaaacaaagacatgcaaaaagattatagcaccagcaatatactcttgaatgcgtgatatgatttttcattgaaattgtattttttcagacaactcaaatgtaattctaaaattccaaaaatgtcttttttaattaaacagaaaaagagaaaaaattatcttgagcaacttttagtagaattgagcttacatttgggatctgagccttgtcgtgtatggactagcactattaaacttcaattatgaccaagaaaggatacactggcccctacaatttgtataaatattgaacatgtctatatattagcatttttatttaatgacaaagcaaattaagttnctttatctctntnttttaaaaacaacatactgtgaactttgtaaggaaatatttatttgtatttttatgttttgaatagggcaaataatccgaatcgaggaatggaagttttaacatagtatatctatatgcttttccccataggaanaaattgacnctcgcnccntttggatgctctcacttgngcaatctcaanacacnnnngnttacntaatncnnncnctctcataagcggtcactntcaattnnaannncaacccanncnttaggcnagngcaggcaacctcacaactttattttccctacatccaaggcgaagagggcaanacatctgtgtaagctgctntatagngtgtttatctaaaggccgttttccattttgnttaatgnaacnncagacattatccagaaaatgnaanattttctatcaaatggagccacattncgggggaattcgtggtatttttangaattgagttgttgcctgctgttttttatttgatccaaacaatgttttgttctgttcttctctgtntgctgttncctatgatttatgcatntctgtaatt

SEQ ID NO: 353033 - DNA, 771 bp, Homo Sapiens
ccccggctgcaggaattcggcacgaggttttggatgctctgacttgtgcaatttcaatacacaggagattatgtaatgtaatatttttcataagcggttactatcaattgaaagttcaagccatgctttaggcaagagcaggcagcctcacatctttatttttgttacatccaaggtgaagagggcaacacatctgtgtaagctgctttttagtgtgtttatctgaaggccgttttccattttgcttaatgtaactacagacattatccagaaaatgcaaaattttctatcaaatggagccacattcggggaattcgtggtatttttaagaattgagttgttcctgctgttttttatttgatccaaacaatgttttgttttgttcttctctgtatgctgttgacctaatgatttatgcaatctctgtaatttcttatgcagtaaaattactacacaaactagcatgaaaatgtcatattgccttcttaatcaattattttcaagtagtgaactttgtatcctcctttaccttaaaatgaaatcaaactgaccaaatcatcatttatgtggcttctgtgtgacttggggaccatttcatagaatggcactacagtgttttccaagttcagagaacagagcgagtagatccacactgagaggaatgtgattctctggactcacgtgttgggggcaggtctgtgtagtgtttcagtcagtgattgtaacttctggtgtttgaaatgtatcaagaaataaagtgctgtgtttaaa

SEQ ID NO: 353034 - DNA, 283 bp, Homo Sapiens
  misc_feature (42)..(71): n is a, c, g, or t
ctctgaacccaacccgggcaacagaggcaagaccctgtctcnnnnnnnnnnnnnnnnnnnnnnnnnnnnnngtacagcagtgttgcacgaaggtcacacagatgagaatgggaaaaagtgttacatgctaaggagatgagggctaggagtgactggagacccaagaagtgggcaagggctccctgaaaggcaggatgagaaaggatccggaaaaaaccgaggttaaatttgaacaaaaaaagagtcaatagcagatctaaataaacaagaggctgggtgtggt

SEQ ID NO: 353035 - DNA, 771 bp, Homo Sapiens
  misc_feature (54)..(54): n is a, c, g, or t
  misc_feature (180)..(180): n is a, c, g, or t
ctctgaagaacagaacaagttgagctatgacttaacatagccaaaatgtgagtngttgaatatgattaaaaatatcaaattaattgtgtgaacttggaagcacaccaatcttactttgtaaattctgatttcttttcaccattcgtacataatactgaaccacttgtagatttgattttnttttttaatctactgcatttagggagtattctaataagctagttgaatacttgaaccataaaatgtccagtaagatcactgtttagatttgccatagagtacactgcctgccttaagtgaggaaatcaaagtgctattacgaagttcaagatcaaaaaggcttataaaacagagtaatcttgttggttcaccattgagaccgtgaagatactttgtattgtcctattagtgttatatgaacatacaaatgcatctttgatgtgttgttcttggcaataaattttgaaaagtaatatttattaaatttttttgtatgaaaacatggaacagtgtggcctcttctgagcttacgtagttctaccggctttgccgtgtgcttctgccaccctgctgagtctgttctggtaatcggggtataataggctctgcctgacagagggatggaggaagaactgaaaggcttttcaaccacaaaactcatctggagttctcaaagacctggggctgctgtgaagctggaactgcgggagccccatctaggggagccttgattcccttgttattcaacagcaagtgtgaatactgcttgaa

SEQ ID NO: 353036 - DNA, 364 bp, Homo Sapiens
  misc_feature (354)..(354): n is a, c, g, or t
atgaacaaaaaggtcatcataaggacagcctgtgagtttatgcactgcatactgcaaatgacccactccagcaatgggaagacacccctaacattgcttctctccttataacgaaaatattattcatcatcagctttaaaatggatcttctcactctgtgcagtctccgtggtaacgtcccataagcccagggttttaagacctttctcctgtgctctaagcctacatatctaactgcctaatggcctttccacttgaatgacacatcattcagtttcagtgtcctaaactgaagtttcaactccaagtctgttttttgctcttgtagtcttcatgtcagtcaatcagcttttntcctaaccag

SEQ ID NO: 353037 - DNA, 939 bp, Homo Sapiens
tcagtcggcctcatccatgtcacagggagtggcgtagaccggaatggacatatcattgtggtcgacaacaagtcttgctgcgtctttaccttccagcccaatggcaaactggttggccgttttgggggccgtggggccactgaccgccactttgcagggccccattttgtggctgtgaacaacaagaatgaaattgtagtaacggacttccataaccattcagtgaaggtgtacagtgccgatggagagttcctcttcaagtttggctcccatggcgagggcaatgggcagttcaatgcccccacaggagtagctgtggactccaatggaaacatcattgtggctgactggggcaacagccgcatccaggtattcgacagctctggctccttcctgtcctatatcaacacatctgcagaaccactgtatggtccacagggcctggcactgacctcggatggccatgtggtggtggctgatgctggcaaccactgctttaaagcctatcgctacctccagtagctgtacagaggccctgcctggcttgtggagggacagacattggggtgattggacaagagggtctggctgggaggtgggccagacctggcagcactgaatgtgggctgtgggcatgggtgcacccggtgccctccctctcctacccccacccccacggttgcactttatttattcggttcttgctttggtgactgggtgagcctggactgtggtcccaaggatgtgtgcagagcttcaccctacccttcttacacacctccccacccctgtcagtctgctccccatcccccagcctggggccagaacagcctaccccaggacaggagtccctctagttgtctccctaccaccctatacacactgacagagacagcaataccccaccccccatattaaataaatgtcttcaccaagaaa

SEQ ID NO: 353038 - DNA, 462 bp, Homo Sapiens
gcctcttccagaggccaagatcagcaagtttaagttgattaatgggctggtggtcattttctcataggatttttcttttagtagtggaaactgtttttcaaatcaaatttggatgccaactatgtggaacagaagtgtggctgctctggtggaagtggcaatggtagtcctagagtctccctgtcagccacaccctttgtctccccctacccaagggaccctgtggcctggaaccgcagtgtgaaatgctatatagtgcaatgaagtcaattcgaagacaagagttctttgcctttctcatctaatttttagttatggatatgagacgcttgttcagaagtatggaaaagtatatataatatgttatcttttagatgtgggtgtaaatatgcttatgtatgcaatatgcttatattttaacgcataaacaacatgaataaagcaaacactctagacttctca

SEQ ID NO: 353039 - DNA, 290 bp, Homo Sapiens
  misc_feature (7)..(7): n is a, c, g, or t
cttatanacgtacatacatgatgatggcttgagtcagctgcagggcagtgggcttaatgagagggatctttgtaaagacagctcttcacttcagctcagtagctttggtcataggcaagtttgttttccattatcataatttgatgattcttgtgatgaattcaatgctagttcttaaagaactcttttatttctgtatgtggagctaatgtttaccttggaaattttgcaaaatacatgtaagaaagaaataaaatatattttgaaaggaaaaccaaattaacctcttt

SEQ ID NO: 353040 - DNA, 382 bp, Homo Sapiens
  misc_feature (18)..(19): n is a, c, g, or t
ctatgcatccattgtccnntttttcaaagaaatagcttaacaatttaacacacttagacagctacaaaaaagcactgtgttaaaaggattattcacacaaatttagatttaagactattcattaaaaacctttttaaaacactcgttaatgtcaataaacaaactaaggccacacaacgcaaatagtccgccaggcaaatatacatttcatctatatgcaaagacctcttagataaataaaagccacaggaaggaaagtcttagctgccaatcaaaatggagtttactcacagaaaacactattacatgaaaatttacaacatgtgatagtagtacataagtatttctttagagagaattgaaaagtgctatattttaagag

SEQ ID NO: 353041 - DNA, 1469 bp, Homo Sapiens
  misc_feature (1118)..(1118): n is a, c, g, or t
  misc_feature (1235)..(1235): n is a, c, g, or t
attggtccgacctggccttggacgtcatccagcgcctctgtttgaatggaagcacagggcaacaggtgatcatcaattctggcctggagacagtagaagctttggcttttgaacccctcagccagctgctttactgggtagatgcaggcttcaaaaagattgaggtagctaatccagatggcgacttccgactcacaatcgtcaattcctctgtgcttgatcgtcccagggctctggtcctcgtgccccaagagggggtgatgttctggacagactggggagacctgaagcctgggatttatcggagcaatatggatggttctgctgcctatcacctggtgtctgaggatgtgaagtggcccaatggcatctctgtggacgaccagtggatttactggacggatgcctacctggagtgcatagagcggatcacgttcagtggccagcagcgctctgtcattctggacaacctcccgcacccctatgccattgctgtctttaagaatgaaatctactgggatgactggtcacagctcagcatattccgagcttccaaatacagtgggtcccagatggagattctggcaaaccagctcacggggctcatggacatgaagattttctacaaggggaagaacactggaagcaatgcctgtgtgcccaggccatgcagcctgctgtgcctgcccaaggccaacaacagtagaagctgcaggtgtccagaggatgtgtccagcagtgtgcttccatcaggggacctgatgtgtgactgccctcagggctatcagctcaagaacaatacctgtgtcaaagaagagaacacctgtcttcgcaaccagtatcgctgcagcaacgggaactgtatcaacagcatttggtggtgtgactttgacaacgactgtggagacatgagcgatgagagaaactgccctaccaccatctgtgacctggacacccagtttcgttgccaggagtctgggacttgtatcccactgtcctataaatgtgaccttgaggatgactgtggagacaacagtgatgaaagtcattgtgaaatgcaccagtgccggagtgacgagtacaactgcagttccggcatgtgcatccgctcctcctgngtatgtgacggggacaacgactgcagggactggtctgatgaagccaactgtaccgccatctatcacacctgtgaggcctccaacttccagtgccgaaacgggcactgcatcccccancggtgggcgtgtgacggggatacggactgccaggatggttccgatgaggatccagtcaactgtgaagaagaaagtgcatgggattccgctgcccaaacgggcacttgccatcccatccaaccaaacatttgtggatgggtctggcctgaattgcctctgtatgggctcccgaatgaaacagcaactggcggagccccccctctggtaacgccacttttccatgggaaccttttg

SEQ ID NO: 353042 - DNA, 461 bp, Homo Sapiens
  misc_feature (444)..(445): n is a, c, g, or t
gggctttttaacttagaagcaacacttgattaaacatctttagaaagctattgcttttctaatttccttccatatccctcaggcctcagtgttcagagaagccaaaaagaatgtatcacttctctgtctgtccaaaggtttttgagagtctcacttctaaatgaaacaatgcaacatttcactttgatttctccactgaaatttccttgattatatggttagaggtatgtagttaggaatgtctgttaactttctgagaaccctagtgccccatcatattaactgtcagtattttgggggcattaggttaatagacttaattgcctaggtacaagcaggactttgggacaaatctctttgtgctgtttggtaacacttaactctatttgttgcaatctttctccttaggtcctcacacaattccttacagagcacttattaaannaaaatcttaagagttg

SEQ ID NO: 353043 - DNA, 771 bp, Homo Sapiens
  misc_feature (32)..(32): n is a, c, g, or t
  misc_feature (79)..(79): n is a, c, g, or t
  misc_feature (128)..(128): n is a, c, g, or t
  misc_feature (173)..(173): n is a, c, g, or t
  misc_feature (763)..(763): n is a, c, g, or t
aaacacttggggaaactgttcaacaaagcccnaggggggttcccatctttgggccctgtccgtggggcaaggcaagcangttctgcaaaggaactccctccagggcccaatccctcactggaaatcangggtcaaaagcgcccaggtctgcctgtgtctgggtctccatcggnccaggctcagtgtaacaacgtgaattaaaactgtgcaatattcgccatgagaaaactggagctggggatggctccctgagctggggacctagaagacgctgctgacagaatggccccttcatggtggggccccattcctgaggtaacgtgcagccctgaggctggtccgaacgggaggagacttctccagcagcccaggtgccagtccacacagacaggactggaagcccctgggcagcaggtcaggtgacccggggagtgcagcctgagcccccaacggcagcaaacgtgaaggtctcaggtggttacagaatcactcagccctcaggcccccaccactctcctcccagcagccctgcagcacacatccctgcatctgtcccgagagccccagccctgcaggcatctgggcctgaatgccaggcagctggtccaccctgcagccatgctgcacgtctgactgagaactgagcaccagataaagaagcattggtccttgtcagcctctctgacttttgcagttagggctgcatccattttaaatactgtagaaaaataagccatctctcggacgctaggagaccccgccnagagtctg

SEQ ID NO: 353044 - DNA, 899 bp, Homo Sapiens
tcggtacccgtatctcaaacattaccttgtaaggcttcagtaactaaaatgtaaaaccagacaaaacaaaaccccaaaacgaaacataaaccccagcctattagtttacagtttattttaaaaattccgaaagacactgcaagttctaaacttttagtagtgctacccatacacaaccatctggttaagaacccagtaaaagagcccccttccaaggaagctttgcaacagtagagttgtgcaatatggatgtttcttactacaagaaaaaaattatacatggcacattctcattcatattctgtaatgtaaaaagttacaaacatacctaatcaaataaataataataaaaaaagaatttgaatgtatttgttaagtatcctaaaaccactacatagaataatggcaactttcactcacagattatttacatggtaatacccagcgtgggtacactgctacaaaactcaaaacagaaggagtaaacttgaaatgttttccataataaagatctagcagcatgactatctaatgctgttttatcccgattgcttctgcaacgttcctttttagtctgtgtcttcatccagttcataattgtctttatcataaatatcttttactagaagaacccgtacaagcatattttccaaggtgtttcggtccagtgaagtagacgtataccagacagggctatctgtagaactagagcattctggttgcaaataaaaaacatccatcctctgattaagattctgtggacttttagacaagtagcattcaaacattttcacaggacatctggaaggattggctgtgttttcaatttgttcaaatactggctcatcatcttcatgttttctttttccagtagtaattttatcttcattatctgttcc

SEQ ID NO: 353045 - DNA, 1083 bp, Homo Sapiens
  misc_feature (191)..(225): n is a, c, g, or t
  misc_feature (575)..(575): n is a, c, g, or t
ggaagatatgtatgaatgtatatacaaagactcagctacttcttttcttatatgtacagccttcattctgttgcaattaagttttagtacttgtatgaaaggtgtgaattagaaagtcacatatatacatatgtatcttataatcttttctccctgaaatactcacattcccacatacattcactattttnnnnnnnnnnnnnnnnnnnnnnnnnnnnnnnnnnngaatccacagcaatccatcagatatgctggaagatccaaacgtgcatacagtagcaaatatttattgacaaattgaaaagcaggaaggaagagggttgtgccaaggtattgatgacaaatggggtgatttgcttcattgagatcttgctcccaggtaaccttaagaagattttagtccctaaagaaatgaacctttccttatcaaatagaatatcactgatatactgctgcatgaataagaaccattatgtgggcaggttatggaagcaaaattggttaatctacaccttaactctggctgctgcaattgaaaactttctttctaataaaataatatatatatctctgantctgatgtgcatgatgaacatttctggaaagtaaacactttctctcgactaagaaagtatttttcagtaatttttgattctgtattactacccacttaaaaaatcattctctgttaattattgactatgttttaacttttctggttttacatatatatcattaaatatagttttagtttaacacattaagtagtggaaaagtatagattatacacttgttttgcatattattcaatgatgttcacagcaataaattactaatatgagaaggtagtgcaaaaaatgcattattacattgcaagttgatgtttcagtaaaaattggttgcattacttgaataccttctaaaagaacgataaaaaattttgtagaagagaagaatatctttccaattagctttaatcagcaaaggcaaaaaatgcaaaacatcttttgtgatactttagttgatgaaaaaaagccaggaggtggcctggatttcagcatacagaaccttagaatatgatat

SEQ ID NO: 353046 - DNA, 359 bp, Homo Sapiens
  misc_feature (22)..(22): n is a, c, g, or t
  misc_feature (53)..(53): n is a, c, g, or t
  misc_feature (82)..(82): n is a, c, g, or t
gggaccttatcacccataatanggtgattacttctcttctaaaaacatagtanctagtaaataagtaaaaagaattgtcttntcattcactttaagtaagatgtggtataattcttaccatgtgccatcctgtcagttttaacaaagcattttcacagaaatttgtgtactaagacaaactgacacattttgactcatacaaatggcaaattagcccttaaaaattctgtgagagaaataactctgtgtgtacatacatatgcatgtaaagtgttgtgtaagatcattggtaccttaattatactggataattgtaatgttatatacaaatgtcttatataaaagtatgctgcattatt

SEQ ID NO: 353047 - DNA, 512 bp, Homo Sapiens
gataaaataatattttaaattttcaaaaacccattcctgaggagaactacttctagcattccttttcatgatgtgcttttgtgcagtaagtagcattttcggctacttaactttacattcctcttatttttcagtttccagtcaagattataaaaagcaaatgattgatataatttgatattcatagagttgtgcctacctttaatggaaaaatacatgtcagatacttagatgtttattgatatgagactatgtggttaaaaaacccaagtatgtccatgtgtttcttataaggtacacttgaaactagtgagtgtttgtcacatttcactttcatggtatataaaatgcagtttgcatatataacttgaatatctggtactagttttttcacgcctgcaatcttggagtctaggttgccttgtctctcctatttttaaataagtgaaatttgggagattgtaaaatctgtaaagtttgttttgtgaaaataaaatgttcacagtagggga

SEQ ID NO: 353048 - DNA, 1381 bp, Homo Sapiens
ctgagccatcaggctttggacattgtcgataagcagtcctaccatgtcaaccaatgttcctgttcagacatgtttatagtctcctccagctgctccaccagctgcatctccagcgtcatgagcgcatcgaacaactcactgatgtcagcactgcattctaggatcatcttctcaatgttgggcggttccaactcctctcgaatggcacttaaactcgacaagtgcttctcctcgaatttggcaatcttgcgtttgccctgctcctggttttcctggatggcctcacggacacattcactgaaggtgtcaagctctgttttccgcttctcctgctgtttcaggccatactcaaaaatattcacgcagatgatgacaaacttgtccttgtaggtctcaaggagctcaccgacaccaggcaggtaggacagattgttgccctctgagtcctcagcgtacatgctgtcaaacaggaaggagccattcaggtgttccacaaacgcagtcttgtgcttctctagctcctcccgctgcgcctgctcgtcctccagctgggcctgcatcaggttctcctggtgcttcagctcgtcgatgctgtactggtgcttagcctccgcaagcttttttgtgtggtcatcaatgcgccagtagtccaggtacatgaggtcaggaaggtaggcacagatgaacatcttgtaatcctctgcctcagagatagggttccttagagagcctgagcgtccgcaggcacttgaaccgccgaaggtagatgatgttcatcatgttgtcaatccggttgttgcccagcgacaacacctgcagcttgacgagggcgtccagggagtcgatcttggagatccggttgttgaacaagctcaggtcctccaggttcaccagtgtgtccagcccctcgatggtctcaatgttgttgaaagacagatccagccagaccaggtgtgcgaggttctccaggccctcgatcttctcaatgatgttattgtccagctgcagcttcctcaagttctcaaactgccagaggttgtctatgcggaggatgttccgaaagtccagctgcagggacaggacatccttgaagaggatgccctcctgcttggccagctgcccggcctcctcctgggggccctggtccccgacggccagcttgagcatgtcatcgtccatcaccctcggctccatcgagttgcacggctggttcatcttcccccacgttttccctgatgatagtgttgttgaagaccagagaggttggagctggggaaagcagcagagttttacacaactgtcaacggagtggcctcctcacagataacagatccagaattttccttctcaagcgctgggaactcggcggttccacgcagca

SEQ ID NO: 353049 - DNA, 157 bp, Homo Sapiens
agctctaaataattaaaggttgcctaaactaatgtgtataagtagatttacctgtaaatatgtaagggaagtcccaattattgtacactttcataattcaatgtgaatttcatacaaagcaaagtttcaccattaagaaaataaacattttgttcct

SEQ ID NO: 353050 - DNA, 230 bp, Homo Sapiens
gctgtccatgagaattagacttcatattagcttcaattaaaaagctcattccattttattaaaatgtttgtaattgcaattttgtgtttaatgtttactttgtctttcctttctttagcatttaggtgactgttcagcagtttgatatatggccattgtcggcctaaaactgcactagtaacaagcatggtatttatcttgtattgaaaataaaacaaacttttgataag

SEQ ID NO: 353051 - DNA, 347 bp, Homo Sapiens
aaggctaaagttatcaatgttatagatgcatgccctaaaatacaattatgatttatacccaaaggagcctttcccattaaataccacctgagtactacaattttcaaagtaaaaaaataaacatgaattcaccatagttattttaaaataatttaacttacagaatgttgagaagtgttacgcagtaacagtgcgacaaaaagaacacactttcaaaacaaaatgttttcgctaaatgcagggtctgtccaattatgaaattaatgtaaaacatttacacccatggcagagttttaggatactcccacgtgaaaaaaactcttggtagtatttactatgcagttacc

SEQ ID NO: 353052 - DNA, 782 bp, Homo Sapiens
ccaacacctactcacttaagcacttgtataaagcctccagggttgggaatgggagtaaagggcaagagggcggacacatgaagtttagtttctaacccatcatcaccctaactcaaccttttctgagccaaatggcttgaattgaagccagttgtcatggaaatagtaagaggttagggtttaagagctggggatgcgggggtgggagagagaaccctcaacatccaggatctatataatgagagctactttaaaccctcaggtccaccctcatgatgctgagttatttagccagagggtgcagcctgcttatgcccaaattccctcagccaagagagagaccaaagagcctctggaatggccctgctcccagcctctatcttcaggtcaattagagagagtatagagaccccagagtcccctgggtctggaaagcgttaggagaggtcaagaaaggagcagtaaggaggctgaaggttacagggcatttgaatccaaatcactgctctgggctagggaatagagccagcagaccaaggtgggaaggattctggaagggggacattttagtctcctaaccccaaagctcagggtggaagaggggagaacaaggaagcaggggcatagtcagggtggggagtgtattgaagtttgcagatgagaaggtttgacaaaaagacagagagatgtagagacagtgatagtgacagaggaacaaaaagagcaccagtgagtaaggcaagagaaagaggcaagaagagacagacgaggcaaagaacgtg

SEQ ID NO: 353053 - DNA, 393 bp, Homo Sapiens
ggggagggaaaggaaacccagcgaagccctaccacaagacccctagccctgaccccatccccccaagccctagagctccctccactcttcccgcgaacatcacaccgttccccgaccaagccgtgtgcaatacaacagagggaggcaggtgggaattgagggtgaggggtttgggggaaaggggaagcaggggcatagtcagggtggggagtgtttgaagtttgcagatgagaaggtttgacaaaaagacagagagatgtagagacagtgatagagacagaggaacaaaaagagcagcagtgagaaggcaaagagagaggcagaagagacagacgaggcagagacaaaacactgagaaagagactgaaatggagtaataaatgaaagccccac

SEQ ID NO: 353054 - DNA, 1968 bp, Homo Sapiens
  misc_feature (175)..(189): n is a, c, g, or t
  misc_feature (746)..(754): n is a, c, g, or t
  misc_feature (1458)..(1466): n is a, c, g, or t
cacatttcttacttttatttcaacatttaaaatattcacagatggagtattatattcagacatctccatggaagatgtacgaaaacaaagcatacaagcattccacaattacagaattacatatttgtgattatgtgaatgttcaccctacagtttatctggaaaaacacttttnnnnnnnnnnnnnnncttttgagtgtttcactggattaactgccataaaaaatgaactgcaaagaatttcaggagagatacctaaatttaagtacttttactttttaaaaatttcaaacttttatagtattctgctaacatatctcctgtgaggaacacttaatactgaattttcccctcaatagccaagtcagaatatacttatttcatttttcacccaagtctttgtttctaaacgcattatgtagaatagatttgatcgtcacagcatcttgagtagctaatgaggtaggagtattcttaaagtcttaggcattaatgaagcaaagcaaaagacaatcaaattacaaagattttcttttgtagtggttgttctttaagtaaaatgctaagagcactggaaattggtcaaatgctactcacatttaaaaacgaagaggaaaaacccattagaaagccctgatacacatagagtctgttaaagggaaaaacctgagtactggaattaaattcattttggcattgtaaggtaaggtatctacgcctaaaaatgccaagttttctgcccaggnnnnnnnnntctttaccaaggagataaaatttaaacagaaaacaaaattaatctatactttcttttcagaacaagttaatttgcttttaacccagttctcttttcctatacacaaactgattaataatttcagtatactgcatatccagtaacacatttaaatgaagttagcagtcaacttaccaactgtgccagagaaacactccttatatggaggcttcattaacataatgctgaacaactagaaaacatgtaggtaatagatttcagcaccatctgttagtagattgtttcaaaatgcatacaccccctaaattcacataaacctaggaaatttacccatcattccctctgcatctacaccaaaaatcaaagttctgtactcgaactaccctttccgtgtgccaaaaataagaaatatttaaaaatctatccaattaagttaataggacacaaacatgttccccaaaaaaggagggaagttaccaatcaagcatgatgtgtctaaagtacaaactttgggagtttctctgaacctactctggttcaaggggctgcaaaaaatacacatttttaatacactggtacctattattcgatgaaggctaaattacaagagatttaccaatttgaacctcataaggttactgctaaatatactttaaaaagtcatctaaaaaatgttttagaaatacaacagaatagctgatagnnnnnnnnnttgataactatgtggcctggcaaatgattttcaaattaagtccttgacaagtaactacaaaatgttttagatgtatgaatcaaacttggtagcaaaatagtgcaaaactctaatatggcagaccttaatagcaggtaaccatttgagatttgctaccaaaaataatttgtcaacaagaatcttttatatgtctttaaaactttcctttttctactctacctagaattgtgttccactgctgttataaaaatctcaaaatatcatatgtatatcatttagatagaagagaattatttcctcttcactgccgcctcctttaatttcagttataattccctttataaacattcttttcctaaggcacaccatgccctatttattgccacaaagccactaaaatctgtgcctcaatctgtctgcttcatcagtatggttaaatacaaaccacttactagtgtctgctaaaacttagtatcatcaagtctagaatgccattggtctg

SEQ ID NO: 353055 - DNA, 949 bp, Homo Sapiens
ggacagggctggaagatctgggtagcccagaatgaggagggtgcctgtgctgtcactgaatgagagggagtggttcattccacccggctgccgagcctcagaggggggcattcctatcctgccccacctccctgtttatgctgccacctggaagccttgaggcccccaaattccagtacagacccagtggtgtgttcatggtggcgtggttgctgtcacctgggagctcctgagcgtttggttagaaccctgttcagcttggggtcagccctcccctagtcactgccctttagcctggatgtgtctgggcccctgcacttcccgtgcttgagtcacgtggctgcatggccgggcgctggccggatggaacacctcccccagcaagggaccagggaccagagccctggcctgccctgctgagccctgctgtgcagagggcctggcacagatgaatttgagattttgccgcaaggtgttagcacttcacacccattgagtctttgagattttaagtgaatgtaagcagaaaaagtcagatccaatttacagaaatcagagttagctacagctaggactcgtttggttggggttttttagtttgtctttctaaagtcatgtggaccttaatttaattacaaaagtctaccctggtggtcataaaataggcaggcctatgaagaaaggccttttactcttccatctcgtcccagccccgagttgacccacgttgctgctcctcacaccatggtgatgcaggtctcgtagtgtgggcacaggcctggctacctcatctttttagtgcctctctcctcttccacaggatggggtcccacagctgcagcagctggccccgtagttgagcatgtgtggttatcctgtagagcttttcccaagaagggtgtttgaacttagagtcttaataaaatcttaccaaataaattttgagaat

SEQ ID NO: 353056 - DNA, 411 bp, Homo Sapiens
  misc_feature (390)..(390): n is a, c, g, or t
tgtcaaattatattggtgagtctatatctattgttgtccccagatgttgcctttgcaagaattagtgtaaaattggaaaaaatactcaatgttgaaagctgtcattgttgagatctttatgaaattattgtgcccatgtccaagtttgaattagagatacacagcacacaatcatttctgttaccacttttggaatatctagcattagccttgatagttttgtgtggtgtgttttgagtatatctgaactgttagttatatttggttaatttattaaaagatgtgtgttaaaccttaatatttatgcagtgtttaagtatttggaatatatttgaaataaattatccagtgttttagataaatggttatttaattgcttaaagtgattcnctaaaaaataaaacattaatg

SEQ ID NO: 353057 - DNA, 2551 bp, Homo Sapiens
gaattcccgggatcgcggagagcgaggggcggcggcggcgcccgctggcgctcaagcatggcggcggcggcattgggcagctcctcaggctcggcgtccccggccgtggctgagctctgccagaacaccccggagacctttttggaggcctccaagctgctgctcacctatgctgacaacatcctcagaaaccctaatgatgaaaaatatagatccatccggattggaaacacagccttttctactagactcttgcctgtcagaggagctgttgaatgtttatttgaaatgggctttgaagagggagaaacacatctcatctttcctaaaaaagcttcagtggagcagctgcaaaaaattcgtgacctgattgccatagagagaagtagcagactggatggctcaaataagagccacaaagtaaagtcatctcagcaacctgcagccagtacccagcttcctacaacaccatcttcaaatcccagtgggttaaaccagcacacaaggaaccgtcaagggcagtcatcagatccaccatctgcttcaacggttgctgctgactcagccattctagaagttcttcagtccaacattcagcatgtgctggtctatgaaaatcctgctcttcaggagaaagcgttggcttgtattccggtccaagaactaaaaaggaaatcacaagaaaagttatcgagagctagaaaattggataaaggtatcaatataagtgatgaggatttccttttgctggagcttttgcactggtttaaggaagaattttttcactgggtgaataacgttttgtgcagcaaatgtggtggacagactaggtctagagatagatcattactgcccagtgatgatgagctgaagtggggtgcaaaggaagtggaagatcattactgtgatgcctgccagttcagcaatcgattcccaagatataataaccctgagaaacttttggaaacaagatgtggacggtgtggcgagtgggccaattgttttacactgtgctgccgagctgtagggtttgaagctcgccatgtttgggattacacagaccatgtctggacagaagtctattctccttctcagcagcggtggctgcactgtgatgcatgtgaagatgtctgtgacaagccactcctttatgaaataggatggggcaagaagctttcctatgtcatagcattttcaaaagatgaggtagttgatgtcacttggcgatattcctgcaaacatgaagaggtgattgccagaagaactaaggttaaagaagcattacttcgagacactattaatgggcttaataagcagaggcaactgtttttgtcagaaaacagaaggaaagaacttctccagaggataattgtggagcttgttgaatttatatctcccaaaacccctaaacctggagaacttgggggaagaatatctgggtcagtggcttggagagtagcccgaggtgaaatgggtctacagagaaaagaaaccttgtttattccctgtgaaaatgagaagatttctaaacagctccacctttgttacaatattgtgaaagatcgttatgttcgagtttcaaataacaatcaaaccatttctggatgggagaatggcgtgtggaaaatggaatctatattcagaaaagttgaaacagactggcacatggtatatttggcccgaaaggaaggatcatcttttgcttatatttcctggaagtttgagtgtgggtcagttggcctaaaagtagatagcatttctattagaacaagtagtcaaacttttcagactggaacagtagaatggaaattgcgatctgatacagcacaagtagaactgacaggcgataacaggcttcactcctatgctgatttttctggggccagctgaagttatttttggatagcagaattaaagcacaagagatggtagatgtcccttgggcaacacaccccagtctgtttagacaaagctttaaatgaccatgaagaaaattgtttggagataattataaaattcagtgacctttgagaacctgaacattatagaaaagctggcaataatcaaggacttactgaagtagtctgttggttcagtgcatgcttagttggcagttaccaccctgtgctagcatatttcttttgctagctatccatcatgtaaccctcatgaaaattatctttatacgtggactataataaaatattgaattaaaacctttcttccatatgtgactataatttggagtaaagtcttgttgactcaatatgggattttaatctaaaactgtaagtatggttttaaaagttaaataatgatattcatgattaaatgctattcatgattatgataaaatcttgggcttatgatagtaatttgacattttctgatcagccattcatttcttcagaagtggttaaattagagtctcctaatatttttaattaatgtgaaagtacagtagctcataaattatataatgcatgaaaatttatatgattataaatattcaggcatttaagaaataaaatgaagtattttgccttaaaaa

SEQ ID NO: 353058 - DNA, 1401 bp, Homo Sapiens
  misc_feature (238)..(247): n is a, c, g, or t
atcaggccaaatcggccgagctcgaattcgtcgagagcgggggaattatttctatatattagtgaaatttgaattgtaaacttgtcagtgaatttatcactctgagcgagtctctagagggtgagaatttgagagaaatagtaatttgattatttcattcatgaagcggagtggtagttatccttctattgagagggaagaaataaatgagtattactgaaacttaaagatcagtggnnnnnnnnnncatttaaaaatgttggtaggagactttcaattttgggaagcaaactgagctattcttaccagccaaagttatactaaataagagacttgggggagcaaatgtttttcagccttcagaaatgaaagttaaggattttagcactaggtaaaattcagtataataggctgaagtggagtaagtgaaaacctgccttttgccactcttaaaaattgtgcccaaaatataaaagtgtggaactttagaacttggaataattttattgcagtcttccattacatggaaatagcatatctaatatctaggttacttgagagaccagctaatcatctctgttgcacatgtttaattggcaaaaagcaattcatgataaataaaattactgctttccatctactgggtaaaatgactattgaaatagtatgaatgtggtcagaggattatagttgagagtgaagtactatgtgtgagttatagatctctcgaattatatttatagatgcagtgtcctgcccagttttgtttgcctcctacattttactgtaaaatatttattgtcttctagccttgagcctctgagggtcagtaagtgaagtacagatagcaaaattttactacctcgttaacccttttcttaaaatattctctatctttctatgtctctttctgacatagtaatcccaaaggattgtgttactccccgtgaaagttattacttttcctttaaaaatggttttataataagactgtttaaaacctttccagtattggtacatcttggcttctggcccaaaccccaagcagaaaagaaaatggaataatggagcattgtttttccacattagtattagggcatcagattcttggtgaacactatattaagtagttataattaaataactgttcttcatacttaggactcttaatacatttctttaagacttgtaagtataattggtaaagcttgttaactgtttatatactaaagaaaaagctttacaagataagactgaaaatcaggataaccacatgaaaagttttatctgtcccgccggtgacaacttctaactaaaaaggattaccagccctttaaaaattttaagctttaaggaacatttttaaaattggcctggagaattagcccaaaattatttaat

SEQ ID NO: 353059 - DNA, 440 bp, Homo Sapiens
  misc_feature (31)..(31): n is a, c, g, or t
  misc_feature (34)..(34): n is a, c, g, or t
cctggatgatagctttaataaaagaaggganaanaaaagcaccctctcttgatctcaactgtaacaaggctgtaattccatcaagcgattctactgacatctagtacagtgttgaagcccaagtggttggctggttccagtattagaactcaagttgaaattatatgattaactgaaatttggggcatgcattatttattatacatggcctacaacggttctgtctgcgctgttacgtattacctacacttctgggtttttttgttcttgttctcagcctctctttaagagttcttgggccttccttttccctctttctattttaacagttttaattttagaaccatttacattccagtaggtaattcactatgcgctttatatgccttagggcatccaaataaaaaacaatagggtaaacatccccaaaacccaccttt

SEQ ID NO: 353060 - DNA, 201 bp, Homo Sapiens
ttgggcctggtgttatgacccctcagggcctgccctccatccagattgtccagactctacccgcagtccagctggtgcacacgttttgaggagaggcagtgattcccctcccgccccgcacagagaccccgactcactgccagccggggcggggcagggtgccgcagtgggcttgctaataaagacccgagtctccccgcc

SEQ ID NO: 353061 - DNA, 240 bp, Homo Sapiens
gttcaccaaatctgtgacttagaaaaacatgtggagggttctgccatcttctgaattctgatcctcactgagtcctcattgaaatgttatttggggaagaatgtttacctggggcctccttcccagaaacttttttttcagatgaatttctagtcaaagactaagacttgcctttggaaatgcctggataaatctggatgctaaatgacttgaggacacctaataaaggaatggggtact

SEQ ID NO: 353062 - DNA, 565 bp, Homo Sapiens
gttatgacttaaacaggcccagaatttagtttttcaaatcctagtagtgtgttttttctgtcttgccaaaaagcagcacacctcaaagaagggaaaaggtgtgaattgtgggtatattagggttattagtgcttccgagggaagataggcatcactacttcccagagatgcccctggaaatgatatagaggatgttgaagaattcaatgtgatgacagaatgaggcatttgtagtaatgctgagaacagaaaaatggactaagtggaaaatttgtaagcatgactttgaatgtagatttgttatgtgaacaaactacctagtttatttttagttcaatacaataattgttttaagaaaacatgaaataactactcaatataaaatgcattttaaaactgtaaataagtcaaaactttattctttttatcataatggtcactagctgagtcacaaatactagtacactcttctgagccatcttctttattcatatctacattgtgtggttaggcatctgttatgtggtgtcacatgataaaataaagaacttcttcccataccatt

SEQ ID NO: 353063 - DNA, 395 bp, Homo Sapiens
  misc_feature (8)..(8): n is a, c, g, or t
ctcgtgcncttgagttgtgcttgctgaactcaaaatactaggtgatttggtaatgcgcctaaagagcatggggctcctcctgccaattataagcaaagacatcacatttggagtttggcaagatcagaatatctcaggttgagcacctgctgaatgctaggattgtgtctatgcattttaaatctatttttaatctttattacagtcttataatagggattatgacaccagaacagagacagctgtcttaagatttcaaggggtgctagctgaagaaaacagagaggaaagttgggaagaagctggatccttgataacagctgagccatggacttaaccagtcttagatgagcgatacctcaccttcagatttcatgtcataccacctgaaataa

SEQ ID NO: 353064 - DNA, 1701 bp, Homo Sapiens
  misc_feature (34)..(34): n is a, c, g, or t
  misc_feature (61)..(61): n is a, c, g, or t
  misc_feature (88)..(91): n is a, c, g, or t
  misc_feature (96)..(96): n is a, c, g, or t
  misc_feature (104)..(104): n is a, c, g, or t
  misc_feature (106)..(106): n is a, c, g, or t
  misc_feature (120)..(121): n is a, c, g, or t
  misc_feature (132)..(132): n is a, c, g, or t
  misc_feature (257)..(257): n is a, c, g, or t
  misc_feature (259)..(259): n is a, c, g, or t
  misc_feature (384)..(384): n is a, c, g, or t
  misc_feature (423)..(423): n is a, c, g, or t
  misc_feature (426)..(426): n is a, c, g, or t
  misc_feature (1380)..(1380): n is a, c, g, or t
aaactatttacaatgtattgtttccagaattagntgcttttacatcatctctacccatgtnctgactcggcatgtatcttcagccagnnnnttcantccaattncncattcccctcgacnnctctccaaggnccccgggggttcggggggcccgtccacttacattctctttagtaattatggctcagcaagcatgccaccaaaatcatctagaacccagagactctggcaaccccatataagtaaaaatgtgtagntnaggtttttttctccaataaataataatttgacaatccaatccatttccatcttaagaaattgttttcacttaggaaaatgtttctcagtggagctagagtgaataatctttcttcatactggggntgagttagaatgtctttgtatacaaatatagcatatttnggncagcaatataattgcctgttaaagagtttatttgccttcacacgcaggattgctacatacattcacagttttaatagactgtaaattagctattcccagttgtgcttttaaaatcccgaatattattctcattagtgagtgcaaagcaaatgtcccatctgactacaattggtcctagagttataaactccataatggtttattgtaagtttcctcattctccagtttcatcgtttgctttttcgggtatgacttccaagctccggcgtggcttctggacatcagcattttcggtgcctggtttattcagtccacatgaaacagcagcaaaatggatttgtttcaggttctccaatgtctcattcttagcatatttcaaaagatctgcttgtccctttaagatggtaatattccaggtaaagctctccactgctttttgtagttttctttccttcaaaccttccttggtgcctatgctgtgcaagtgttcatggaattccatggctgccttctgacaatgtacgatcttttcatatacagcatctgcattttcaatcaacgccttgagggactgaatcatcatgtcataagttgttacgatcttcttcagaacctccggcacaattccctgcagctccattgtggggtactgctcgctgagatttaggaccactaggggtgtgttatcgggccccagaaagcggggagacaccgccaacatgcactgcatgagattggccacagaggagaggccacacagctccttgaatgacaccaccgcattctgcatgttttctctcagatctgtggcatcccgtatagggggctgggcattcttgaatacctcatccacggttttaatccacagtgttctcaaagatgcatattccctggatttcttcccttttctcacagaaaggccccttttatgaggcttccctcctcctcttcggntaagtaatagccacgtggacaaataaagaagcatgtgcaaggacctctccagttaaggactgcagggggacatggcggtagcccgtctgtaaacattcaaagggaattgtgtactggcccgatgaattcatccccaatgtagtcatcatccagcactacaaagcgcaccatggccagtttcaggcaggttgatttgaaattcaaagctttcatcaaaaatgggagcgtctccattctggtgcactgtttttgtcctttgttctgcacaatcagcagggattccatggatttcaacatagacataaggatctaccacatcac

SEQ ID NO: 353065 - DNA, 704 bp, Homo Sapiens
  misc_feature (24)..(24): n is a, c, g, or t
  misc_feature (42)..(42): n is a, c, g, or t
agcaggaaaaccttcctctggccnccctaccccttccctcanctccggctcccatcctcccagctggcccccccagatccctgtggcgaacggttcccccccagggcagcccaccctgcctgacccctatccaggacctcccctatagagggaagtgtcccaagtccacctacggttccattggtttggtcccgaagatgtccatatccattcctttgttactgaaaagattgatgggaacctgcttgttcagctaacggaagaaatcctctcagaggatttcaaattgagcaaattgcaggtgaagaagataatgcaattcattaatggctggaggcccaaaatatagccaaataacccccggccagcatggaacaaaactgatcaatgcgtgtgctagaaggggtgggctgggacacaatttcatgtttttgcactaaaaaccttctctgtaaatagggataagagaaactcttactatgcagattacgtttttgaatggtgaacaggctattttgtacatcaataaaaatgctgtacagaacacttggaggtgtgccttgtacgtcactcaacaaacactcagcagctgctaaaagaaaaaaaggcatgtgcagagaaatcattcttacccaagtaggtttatgtgagaaggtatgatatttattacaaaatagccaaagctgaaagacataaaaatcttt

SEQ ID NO: 353066 - DNA, 364 bp, Homo Sapiens
  misc_feature (324)..(324): n is a, c, g, or t
  misc_feature (337)..(337): n is a, c, g, or t
  misc_feature (361)..(361): n is a, c, g, or t
gccatttaaaggtagatttctatcatgtaaaaataatctatctgaaaaacaaatgtaaagaacacacattaattactataattcatctttcaattttttcatggaatggaagttaattaagaagaggtgtatttggataactactttaatattggccaaaaagctaggatatggcatcaggtagactagtggaaagttacaaaaattaataaaaaattgactaacattttaagttgtgcatcttttctccttcctgtccacctattgttctttttttcacttttccatttcaatttcttccttatgtattctggacctactttnctttatatcctcntatccttcccttgcgctctcagtnttt

SEQ ID NO: 353067 - DNA, 1058 bp, Homo Sapiens
  misc_feature (59)..(59): n is a, c, g, or t
  misc_feature (490)..(504): n is a, c, g, or t
caaaaaaccacccaggtagaattgcttaacaattatattaaaggtaggacatagccctnttatcccccctaaagagaaatctgcattaaaagcaaacacattgctgttagctcaaattaatgtcagtgagtagaatcttaagctttaaaacaaaagtggaaataatttaaattagtgttgatgggactattttgaggcaagagataccattaagtgacctagcttggaaatctgccccctttgcccaaacccatgtgatgtctgaaactactgtatattttcaatgaccttgagaaagggagctagtcatttgtatttatgggccttatgaagtcagggcctgctgatcctgttttttaagttcaagcgcaatgcctgaagcatcctagatctccttcaccctcattctacctgacagacagctaggtctgtcttccagctctttctcattgatactacctttacatatgaatactatccatgcttgttnnnnnnnnnnnnnnngtctttccccattttactgttacaattttcaagagctataaaggtagaaaaagtattcctttcattattctaaaaaatatgcccatttttaaatagctggccacttagccagtttagtttcccaaactttattctgaaatcaaattgctgaggtgattctaaatgtctaatgttgatttatcatataaacatctaattagaaagtgtttatgctaaagacttgtattttgtggcattagttcttcatgtttcttttttatatgtttattaaaattgttcacttccaaatgagtggaaaagttgctgttgttgggatgtacagggcaagtgcacttggttagagcatgaactgggaatttcacattctctgatgtgctttgcactctgctcttgtagatttattttgtttacagtagactgatgtcagtttttgtaaatgttttttcttagcactttaactgtgagtgtacaaactgattttaaatgtagtggttgtatattttggttataaattggagatttttaataaaattaaataattctcttttctgtca

SEQ ID NO: 353068 - DNA, 325 bp, Homo Sapiens
  misc_feature (88)..(88): n is a, c, g, or t
  misc_feature (271)..(285): n is a, c, g, or t
actctggacaacagtgtgggaagggagagggggtccccagcaaggggacttgaggtaggagtgcattcgggctctgtggggtaagggnggctgaggccaccgccccactgccccccaggacattcattccggctgaggtaggtgctgagagccaaaacagcaaaaatccatcctgagaaaacaaagtcggtggagggtgacagtgtcagggcccagctacagcagggtcatcttttggagtctaattcaccttcctctatctctctcctcnnnnnnnnnnnnnnnaagttttgctttttaaagaaaaatgttagttcagttcccc

SEQ ID NO: 353069 - DNA, 1355 bp, Homo Sapiens
  misc_feature (339)..(360): n is a, c, g, or t
  misc_feature (1298)..(1298): n is a, c, g, or t
ctggaccggtccggattcccgggatgtgatatgaaaactctggtgaacactgggttagagagtaacaaggaaacaagagatagtgatcaggcatccagagcccccttttttatccatatgaaagccaggggggccagaccttgttcatgtgtgggtctgtcttccttatgccaatcagcagtatatacatcacctctcaccctcacctgctgaaaaaataacctttttacccattattcctactcccttcatcctgcacatacatatatccagctgagagatcacactacaaggctaagagatgatctaatacccccaaatagccctggcccacacagnnnnnnnnnnnnnnnnnnnnnnctttatccccttgaacagtcccctctctcctcttgactgtctttatgtgtctgtgtatttgtgtgcagggtctttgaagacagcatgctatgtgcaaactgtacaagctaggttttctaggggctgtgttctggggatgagggtagtggggaattatatggggttttttctttgtttcaagacaggaagcagtctggttaagggagaactagtggaaagggttaaatgacaggttaagttgagtacaaagctttcccagtactgctgagattaagacaattgtggatgtgtatgtctaggtttgaatctctgggctgcagatggcttttgccctggcagagaaagaggagtctttggggaggtgagctgtttcttgttgatttcaggcaagaggcacatagaaactttgtatcgagtggggatttgttttaagtgctggaaaattagggcaggaattacgtgtttgcaagttgttgccatcactggtttgaatttcgactgcctcatcaaggggcaagaagttattcttcgaagatctcattctcccagaaacagaactttagggaaaatggctgtggcttagcttttcagctgatgcagggtaataagctttctggttggttttccttccaattctggaaaggtgtccacactaagacccttaactctagggcttgcataagtattctagcatcgttagctaatgagttggtcattgtttctctttatcaataattgtgttaataccaatcttataatttaaaaattatcttgtatgtaagagaagttcggggttagggaggaagaggagcaaagtggggatattttctctttaatgcttagatactgtttcttccctaaggatgtgtttctcaaccacaattgggtgggaatgaaccagaggagggcaagagggaagtgaatttgcacccaatttnagtttaggcgactgtggccttttggcagggaaaaactggggtgaatcacagctcctc

SEQ ID NO: 353070 - DNA, 521 bp, Homo Sapiens
  misc_feature (3)..(3): n is a, c, g, or t
agntgtgagtggcagactgattacagtggtgtggcccagaaacaagggacagtgaaacacccagagacttgtatcagcaggaagccattgccattctgagccttgaagggcaaggagggaaacagtgttaccagagcccagtaagaactgctgtcatgaaggaggggccaccttgtaagagacatcattactaccagaactgtggtgccaaattgctggtgtctctctttggagaaaccaaccagatacatctgctggagagcccaggtgggcacagagaagggtggagagagaatctgggaagagaaatggagaataagcagcacagtgttattcatttctgtaaattcctatgtagaaggctcagtgttagaaataaagttattctactagttgcaagttaagtgtttctgtttgttctgctttcctgttagcataagtaaactccctttggaactacacaggtatgtctctccttcaacatgtgtgaagcagacattatattaaattacattattcat

SEQ ID NO: 353071 - DNA, 408 bp, Homo Sapiens
  misc_feature (39)..(40): n is a, c, g, or t
  misc_feature (76)..(76): n is a, c, g, or t
ctgcccatgatatcagacctttcaatcactgaatcaganngtataaaattgaaaataaaaaatgcatgaagaacanttaatcatgtagttttaccaaaaatgttttagtaataaaaaagttaacttttaaaatgaaatgcaatcatattgtttccccaagtcttagttttagtgagaaaaaattaacatgttaaatatattatcagatagctaaaatttccatttttgaatattttataatgcatgttagcaaactgctgtagtagcacatgtataataggagtacagactaattttgaactgggaggtacacttaaaggagtttttactgatctggagaagagaaataaaaaccagaagaagatgtgaggttatgatagataaagttgataggaagcagcatgacaa

SEQ ID NO: 353072 - DNA, 447 bp, Homo Sapiens
ctcatttacttcttaatttgttcattaattacattaattctttcctgtaggatgtctcatggaatatatatgacattttaatttaatcacttcccaagagccaaagctatggaaatacagtgttgtccatcttagtaaataaaagataatttcagaaacatgaacaggatagttctcccttaagcaacctcacaaacaagccgcttctgttaggtacatgtcctgcccttgcaaatgaagcttttaaaaaggtgaagaaaaattttacagtatatcctgttctgtacattaaattaaaaaaacaaaaatgtacatgtgatgttagtaggtgtgatatgcaacctggtatacagacatttgtgcaatttcatttcatcaaattctatctgctaatgttttatatttatatttttgtatttatttttaaaaaaataaaccagtttttac

SEQ ID NO: 353073 - DNA, 423 bp, Homo Sapiens
  misc_feature (22)..(22): n is a, c, g, or t
  misc_feature (36)..(36): n is a, c, g, or t
taaaaagtgcctatttcaatcntctgagataaaaantcacaggtttatcttttcatgacaacttaatgaaatggccttgcatattattagtatgagaaatgtactttcaaatatataacagtaattagagttcttagattttagaatatatatgacagaatacatcatttttataattgtaaaggtaaacctaaacctgctgattagcatactacattttcctgttatttacaaaaccccgttttgctgacataggcatagagataagcagatatgcagtataatttgccaatatgtaataaggttaaattcaaatagaagaaagtatgctaattagtacagaaaacttagagaaagtactaatttagttaagattaattctgttcttattttaattcaaaagatagatcaatttctgtttat

SEQ ID NO: 353074 - DNA, 530 bp, Homo Sapiens
  misc_feature (237)..(238): n is a, c, g, or t
  misc_feature (250)..(250): n is a, c, g, or t
  misc_feature (309)..(309): n is a, c, g, or t
  misc_feature (343)..(344): n is a, c, g, or t
  misc_feature (362)..(362): n is a, c, g, or t
  misc_feature (422)..(422): n is a, c, g, or t
  misc_feature (446)..(446): n is a, c, g, or t
  misc_feature (505)..(505): n is a, c, g, or t
  misc_feature (508)..(508): n is a, c, g, or t
ccattattcatgaagtcaacctagaagggcagactggtaataacatgagttggtacattcttcctggcaatacataaagacctttaatgtcttaaattacttatcctagtaatattacttcctggaatctattctaacgaagtaatcagaaattttaacaggaatctatgcattaaaatgttcatggaaggaaaatgatcagcaatgaggaataattaaacgagacatatataaaanncgcaccccacanttttttttcaagcatggagaaatgctcatgcgagaatactaagtaaacagcagagaaanctcagacatacatggttgcctctgagtagtgaanntttatttccttcctaaanttttgtatttttaatctcttctataaatgaatgtgtattccttttacaatgaaaaataanatttttaaaaactaaaactaaagnaatgtattgtttccttttatgtataaatgtcccaagccaagatacctgaaatataacgnggnaaagattcttttgttcactctg

SEQ ID NO: 353075 - DNA, 1549 bp, Homo Sapiens
ggcccaggggaagagtgtatcatgcataactgcaatttaagtccttcctttgataatacttcaaaacatacacagctttgcttactgaattatttttgcaaataatacaaggaggggaaactaacttgctactagtgttgttaatgaagtataggccttggaacatttaagaaaactggtcttcagatagttaagggcttgggataatttaagtgaaaagtgagatcagtaatgagctgtgttgttaacaatattatctggtaataataccatgcaatatagcgttgtataccaacttagtgcattttatactgtattaaatatggaagatacttcctaatgccctctctaaaattaaattttacataaaagttagttttattcacctttaggctttccaagtgaattgtgactaattttttcaatcttacatagatctttcacccattagcattacttacgtagataattctttatgcctagttattatacatattaatttttaaggtatacatttaaattacacaattgttcattgtggtttgtatcccagaatgtgttgtgttttttaaaagatgcataatagctgaatgtatgcatgactttgaaagaagttaaaatggtgattttttttcacccccttgtaccatttttaaaaccaggccaaatctatttgccaagcagtgtatcactaataagaaaagcagtttttccttttattgcagtttttgtttatctgccatagaatttccttatactgtggcttggtattattcaagattagctaatttcgctgggtattacatctttttaaaagcctattataacatggttagcctataaggcagtgttggtccccttctaatattggcctcataaaggggttccactgtactttccgcatattactgtgttgttgttttcctttgtggatatataagcaaattgagcttgggtgatttttatggagacaataattagacaatactgtataattagttttacttaatagattatcatcttgtgagaagagatgtttaaacgtggtaaatcacttcatattacaaaacagttttacacttaatatgttaacattgggtgcaataatttagtagcattagctttagttacaaatataactggatctttctgctgacaacttaggttgtatgagttatgcttaaaagctttaaatctgatgtttcctgtacctgccacactatgttagaatgtgtccttcaaacatatcctcctgcaacttctcaaactgtactaaattgatatttcttgaagtctaactctgtgctaacagatctccattttaaatagaatacggttttaatttttgataagctgctgaattttaaagagagttttttggggccaccaaatattttggatcatgcagagaatatatattgtactgtagtaattttgtatttacatttgtatgatgtgacataatagatgtgaatgttaatcactgcttgactatgttaataaagttgtttaactaacctgaagcaacaaagaaatcaacaaaatatgt

SEQ ID NO: 353076 - DNA, 1503 bp, Homo Sapiens
  misc_feature (111)..(119): n is a, c, g, or t
  misc_feature (1099)..(1148): n is a, c, g, or t
agacggtccgcagggacatccgtccctggggcctccccagtctccctccccctcgcgcctgggcagctctctcccagggcttcggctcgagcctgcgacctgcacggacannnnnnnnntcaggatctaaaatgtccactgaggcacaaagagttgatgacagtccaagcactagtggaggaatgttccgatggatgatcaacgtgacaagtgttcagcaagaaccagaaagagaacaagttcagcccaagaaaacggagggaaaaatatccagcaaaaccgctgctaaattgtcaactagtgctaaaagaattcagaaggaacttgcagaaatcacattggaccctcctcccaactgtagtgctggacccaaaggagacaacatttatgaatggaggtcaactatattgggacccccaggatctgtctatgaaggaggggtgtctttcttgacattaccttttcaccagactatccgtgtaaaccccctaaggttaccttccgaacaagaatctatcgactgtaatattgaacagccaaggtgtgatctgtctggacatcttaaaggacaactggagtccggctttaactatttctaaagtactcctctccatctgctcacttcttacagattgcaaccctgctgaccctctggtgggcagacatcgccacacagtacatgaccaacagaagcagagcattgaccggatggacaagacagtggaccaaggcggtacgccacataggggcctgctgccatgccgccccgcgggacctgtgcaagcaacattcaccaagtgcatcggtagccctgcccacccctccagacctcggttcttattttcctatttttattaaatttggaaccattttgtgatggtatgttgtccatcttcccatcccagttcttcctgccccccttcctctctcccacgctctcttttatctctcattttattcccttgttgatttctgttaacttgaaagatttgggattttttcccacctcatcatagatgggaacttttgttttcagtgcaaacaatgttggagctgtaatagtaagagctttcttacaaagctttgtattactgtgtgnnnnnnnnnnnnnnnnnnnnnnnnnnnnnnnnnnnnnnnnnnnnnnnnnnatgtgatctttgggaaaacacattcagaattatatctcgtttctacttaaatgtagtgcttagggttaattttttgtactgaagtctttattggtgggtgcatgctactgggaacaagtttttgtacaaaagcttcaatcagaatcactgtgcattactgagactctgtttatcactagccttctgtccctcccgcagaagactgttggattgaacaaaataatatgtattttgatttacttaaagtgcttgtaaatttcttagggacctgccacttttgactgtggatcagttgatgtacacttgtattattaaagcactcaataaatcactgtggctgataactgcaaaaaaa

SEQ ID NO: 353077 - DNA, 1401 bp, Homo Sapiens
cctaatacaattatgtgtcaaatccaacattcttctccgggacgacaaaagctagtgataaacagagtctcaagtaaagcacctgattctgattgaagccttttgtacaaaacttgttccccatagcatgcacccaccataaagacttcagtacaaaaaagtaaccctaagcactacatgtaagtagaaacgagatataattctgaatgtgttttcccaaagatcacattaaagcaataaaatcaaatcaaataactactacatctacataccacacagtaatacaagctttgttaagaaagctcttactattacagctccaacattgtttgcacctgaaaacaaagttcccatctatgatgaggtgggaataaaatcccaaatctttcaagttaacagaaatcaacaagggaataaaatgagagataaaagagagcgtgggagagaggaaggggggcaggaagaactgggatgggaagatggacaacataccatcacaaaatggttccaaatttaataaaaataggaaaataagaaccgaggtctggaggggtgggcagggctaccgatgcacttggtgaatgtgcttgcacaggtcccgcggggcggcaggcagcaggcccctatgtggcgtaccgcttggtccactgtctggccatccggtcatgctctgctctgttggtcatgtactgtgtggcgatgctgcccaccagagggtcagcagggttgcaatctgtaagaagtgagcagatggagaggagaactttagaaatagttaaagccggactccagttgtcctttaagatgtccagacagatcacaccttggctgttaatattacagtgatagattcttgttcggaaggtaaccttagggggtttaaacggatagtctggtgaaaaggtaatgtcaagaaagaacacccctccttcatagacagatcctgggggtcccaatatagttgacctccattcataaatgttgtctcctttgggtccagcactacagttgggaggagggtccaatgtgatttctgcaagttccttctgaattcttttagcactagttgacaatttagcagcggttttgctggatatttttccctcctttttcttgggctgaacttgttctctttctggttcttgctgaacactttcacgttgatctccatcggaacttcctccactagtgcttggactgtcatcaactctttgtgcctcagtggacattttagatccctcagcgccgccgctgccgccgcccccggccgttccagctccggctcctgaggctgctgcccgcggctgtcgctgtggctgcccctgagtcctggaaagtgaagccaccacctccgggagccgccgccgcccggccgtccgcgcgcgcacccgcgagcccgct

SEQ ID NO: 353078 - DNA, 951 bp, Homo Sapiens
  misc_feature (49)..(85): n is a, c, g, or t
gaaagatagatcatatagggcgaattggagctctacgcggtggcggcgnnnnnnnnnnnnnnnnnnnnnnnnnnnnnnnnnnnnnatcaggccaaatcggccgagctcgaattcgtcgagagcggcggtgactagacggtccgcagggacatcccgtccctggggcctccccagtctccctccccctcgcgcctgggcagctctctcccagggcttcggctcgagcctgcgacctgcacggacacccccccctcaggatctaaaatgtccactgaggcacaaagagttgatgacagtccaagcactagtggaggaagttccgatggagatcaacgtgaaagtgttcagcaagaaccagaaagagaacaagttcagcccaagaaaaaggagggaaaaatatccagcaaaaccgctgctaaattgtcaactagtgctaaaagaattcagaaggaacttgcagaaatcacattggaccctcctcccaactgtagtgctggacccaaaggagacaacatttatgaatggaggtcaactatattgggacccccaggatctgtctatgaaggaggggtgttctttcttgacattaccttttcaccagactatccgtttaaaccccctaaggttaccttccgaacaagaatctatcactgtaatattaacagccaaggtgtgatctgtctggacatcttaaaggacaactggagtccggctttaactatttctaaagttctcctctccatctgctcaccttcttacagatggcaaccctgctgaccctctggtgggcagcatcgccacacagtacatgaccaaacagagcagagcatgaccggatggccagacagtggaccaagcgggacgcacattaggggcctgctgctgcgccccgcggaacctgtgcaagcaccattcaccaaggcaatcggtaaccctgccaacccgtcagag

SEQ ID NO: 353079 - DNA, 502 bp, Homo Sapiens
gtcttttgtttctgtttttgtcatgatacctcaaattgatatatgttgtaattatgaatttaaggaagtaaaaaaataactcagggctggagccttcagccatattaacatacattgacataaagacctttgttttaatatgaatgattccagttaacaaatggagaaatagttgtttgaaaattaatatttagcttctcaaaagagactcctgtttggaagcaaattgttggtttaacaggacatactttagatatttgaaaaattctctgtggaatcacaatctcttatttttaagaatgtaggaatatgtgttctatatgcttttaagttatgtattacatactattctctaaaatagaaatgtttatttggcttctaaaagtcatttgtgagttgatgttatttaaaactgcttttcagtcaacttattctttataaaaaagtttgttcaaatagcatgtttttattttgtttctaaataaattcatgtttgataatt

SEQ ID NO: 353080 - DNA, 1209 bp, Homo Sapiens
  misc_feature (7)..(7): n is a, c, g, or t
  misc_feature (15)..(15): n is a, c, g, or t
  misc_feature (21)..(21): n is a, c, g, or t
  misc_feature (28)..(29): n is a, c, g, or t
  misc_feature (40)..(40): n is a, c, g, or t
  misc_feature (47)..(47): n is a, c, g, or t
  misc_feature (52)..(52): n is a, c, g, or t
  misc_feature (57)..(57): n is a, c, g, or t
  misc_feature (86)..(88): n is a, c, g, or t
  misc_feature (96)..(96): n is a, c, g, or t
  misc_feature (100)..(100): n is a, c, g, or t
  misc_feature (106)..(106): n is a, c, g, or t
  misc_feature (133)..(133): n is a, c, g, or t
  misc_feature (168)..(176): n is a, c, g, or t
  misc_feature (179)..(205): n is a, c, g, or t
  misc_feature (427)..(435): n is a, c, g, or t
  misc_feature (466)..(486): n is a, c, g, or t
gagaganatgcgggnggctgngcccccnnggttatatgtngaaactntctcnccaanccccagcctggctccagcaccatccagtnnncccaagancccnccctgntctgttctccaactcttttaaatggtncccaacttttctaagtgagcttagcaatgagaagnnnnnnnnncannnnnnnnnnnnnnnnnnnnnnnnnnngacatgggtaataataggtactaataaatatttatagatgagtgaatgaggaaataattacatcaaaaaggtcagtgacaattgataaatgacaaggaaatatttaattaggtaaaactaaatcattgctctctatactaggatagactttatctacttcatctgttcctaagtcagcatgttagttctggggaaggatcataagaaaggaaatactttttnnnnnnnnntttggaaacatgtaacaaagcaagggtaaannnnnnnnnnnnnnnnnnnnnagtgctgtgactgtaaaagtgtactttccattaattattagccgagttaagagaatggtcacattgaagtactgtgtggactagaaatgtaccctgtcatcatgcaatgaaatattgttatcgttttaacatagctcatttatgtagaatgaattctggtggtttaccccaagtcacagttaggacggtagatggtgagatcgcagatgcgctattatctagattcagtgttacattttcgatgtttatcactcagtgggtttttattaatatgctgattaagttatttactgggccagtcattgtgctaaatagttgctcttttgtgtttcattgccttgatgtttgagtgtaatctagcattttaatacagtgtttattttgcatgatctttaacaaatgttttaagcaattttaaaaaggcaggatgttattgacattatacactgaagtcttaacattttaacatttatagtgcttatttgcaaaattgtataattaggaattatttcagagacaatgttttctttttcaggtgagtagttgccgcgtaatatcattggagtacattctttatactgtttgtgaaattaatactagcatattaagtgtacaaatagatttagaaaacaataaaaaattgcatgctattctgactcatgaatttttattcactatgatgattcacattttgattaaaaataaaagtagtttgtgtgttta

SEQ ID NO: 353081 - DNA, 2248 bp, Homo Sapiens
  misc_feature (1990)..(1998): n is a, c, g, or t
  misc_feature (2221)..(2221): n is a, c, g, or t
gagatgcctatagagaatacattgctcagatgtcccagttagaagggggccccgggtctacaaccattagtggcagatcttctccacatagcacatattacatgggtcagagttcatcagggggctctattcattcaaacctagagcaagaaaaggggaaggatagtgaaccaaagcccgatgatgggaggaagtcctttctaatgaagaggggagatgttatcgattattcatcatcaggggtttccaccaacgatgcttcccccctggttcctatcactgaagaagatgaaaaatcagatcagtcaggcagtaagcttctcccaggcaagaaatcttccgaaaggtcaagcctcttccagacagatttgaagcttaagggaagtgggctgcgctatcaaaaactcccaagtgacgaggatgaatctggcacagaagaatcagataacactccactgctcaaagatgacaaagacagaaaagccgaagggaaagtagagagagtgccgaagtctccagaacacagtgctgagccgatcagaaccttcattaaagccaaagagtatttatcggatgcgctccttgacaaaaaggattcatcggattcaggagtgagatccagtgaaagttctcccaatcactctctgcacaatgaagtggcggatgactcccagcttgaaaaggcaaatctcatagagctggaagatgacagtcacagcggaaagcggggaatcccacatagcctgagtggcctgcaagatccaattatagctcggatgtccatttgttcagaagacaagaaaagcccttccgaatgcagcttgatagccagcagccctgaagaaaactggcctgcatgccagaaagcctacaacctgaaccgaactcccagcaccgtgactctgaacaacaatagtgctccagccaacagagccaatcaaaatttcgatgagatggagggaattagggagacttctcaagtcattttgaggcctagttccagtcccaacccaaccactattcagaatgagaatctaaaaagcatgacacataagcgaagccaacgttcaagttacacaaggctctccaaagatcctccggagctccatgcagcagcctcttctgagagcacaggctttggagaagaaagagaaagcattctttgagaaaaacaagcaaaggagaagagtgttactgtacccttatgacagaattgtcctggattttgactccatccacgcccatcacctttctacattttgctgacagataactaaccgatgatgaggccgaggtaaaagagacatctgcagtgtgacagaagggagcatgagaagcatggctcaccagccagcctctgtggtctttgtaattagaagcttcagaactcactaatactactgtacctttcattggcgcattaccccataaaactttttgagacgaggtgagatctgagtataaagataggtcagaagtattttaaagggcttaatgtgccaaaaagaaacaaaagctagagaccctttttgcaaacatttggtgaccacacatttgagggaagacgtggcgttaggtgaagcagaagcaaaccctgctcttaggggctcacctaggtgagtgcacagcctgtgacgctacagggagaggctgagtaaaccgagatccagcgttctgtatggcaggggtattgcttatcacagaggttctgaagagtaggaagtacataatgaagagggctttaaaaattgccaacaaagtgagtcaccagggctggcagtagtgtgacggggctgtcctgagctgttaggagagtagatgcggggagggctggtgacctccgtgggtttatatgtcggaaactcttctctccaaatcccaggcctggcttccagcaccatccagctgtgcccaagaagccaccctggtctgttctccaactcttttaaatggtgcccaacttttctaagtgagcttagcaatgagaagnnnnnnnnncatgaattctttttctggaaaatcagggagacatgggtaataataggtactaataaatatttatagatgagtgaatgaggaaataattacatcaaaaaggtcagtgacaattgataaatgacaaggaaatatttaattaggtaaaagtaaatcattgctctctatactaggatagactttatctacttcatctgttcctaagtcagcatgttagttctggggnaggatcataagaaaggaaatacttttt

SEQ ID NO: 353082 - DNA, 894 bp, Homo Sapiens
  misc_feature (65)..(65): n is a, c, g, or t
  misc_feature (68)..(68): n is a, c, g, or t
  misc_feature (75)..(75): n is a, c, g, or t
  misc_feature (88)..(88): n is a, c, g, or t
  misc_feature (99)..(99): n is a, c, g, or t
  misc_feature (136)..(136): n is a, c, g, or t
  misc_feature (156)..(156): n is a, c, g, or t
  misc_feature (182)..(182): n is a, c, g, or t
  misc_feature (193)..(193): n is a, c, g, or t
  misc_feature (195)..(195): n is a, c, g, or t
  misc_feature (282)..(282): n is a, c, g, or t
  misc_feature (733)..(733): n is a, c, g, or t
taggctttttggcatgcaggccagttttcttcagggttgttggttatcaaggttgcattcggaanggncttttcnttgtctttttgancaattggacanccggagttataatttgaatcttgcaggccactcaggntatgtgggattccccgtttnccgctgtgactgtcatcttccagctntatgagatttncnttttcaggatgggagtcatccgccacttcattgtgcagagagtgattgggagaacagcatttacagtcagatgctttgggtcaactntaaatatagccagaagagtaattccagatataatgcagccaatgataaaaaggaagatgacaaaagatgggagacaacatgtttttttccatttctttttaccctgagtatcttcagtcttgaatactcgaaaaagcctggttgccaaaaagccaaactctctttcacaagcatccgagagggttgcaatcatttcagccagagaagtttctccacctacactggacagtctattgtaatctgtaaacaaaaacctcacaggtaaagctttagtagtctcgctctggcaactcaggtggattcacaaacatcaatttaaggaggagttccaaatatccaatatgtcttgccaatctagtgctgaggacccaggcccaattccaactctctccttctcgtcgtccaccaaacgtaaatgacaataaagaatatatataagagagccaagaangctcagtgacactgctattccaagatttggggtgggaccgtgaaggcaaacaattaaaccaagccctccacaaagtagcagggtaagaaacactatgaggccatgagaactggaaagagagggctcaatctgttgtccggcgaaggttttcatttcgtctt

SEQ ID NO: 353083 - DNA, 399 bp, Homo Sapiens
cagcaagtaagtaagtcgaacactcactatgccacacttgagttctgctagggttggaggggaatgaaggcaggagtgccagtctgaaagcatacactaagacaaaaataacatgatagtaaaatgatacttcctcattctactttaaatgtttttgccaaaagactatcatattagatggagtacaataggtgaagagaatgtgttaattgtacacacttttatatacctgtttaattatatgtatttttaaacaaaaagaatacatcaacacctctgattaaaatgaaagactgaaaacattttaaaatctcttcttttttacttccaaccctgtaaacattatgttagaggacaaagaaagtataaaaggccaaccaaagacaaaggaaaatgaca

SEQ ID NO: 353084 - DNA, 350 bp, Homo Sapiens
  misc_feature (38)..(38): n is a, c, g, or t
  misc_feature (124)..(124): n is a, c, g, or t
atctatcattccctcctctaaagaagtacatctaactnccattagaataaggataaggataaggatgaagacagatcttaactgcttcctgttgacaggggggtgctgttttgggaaaacggcnagtcaaattgccctcaggggcctatccaagggttcccacgagaaggggccattgcccaaggctccagttgcatgactggagtttcatggcctgaagaagagacaaactgagttattagaaaacacgtataaatatgaaataagagtgtgtggtaaggacagctcaaaaatcccaggggcttttaccagtttgtatggggagaagggggcaaaaagcctgattggct

SEQ ID NO: 353085 - DNA, 673 bp, Homo Sapiens
  misc_feature (169)..(189): n is a, c, g, or t
  misc_feature (660)..(660): n is a, c, g, or t
atatactaagcacaatatataatagtatatcatcttttaaacactagtaatttgaacttctataaatatatttaaataacaaacatagctattcacatagcacacaagtgacatataaacatacaaaaataaatccctcatgtttaactcttttgttgcttccatgggnnnnnnnnnnnnnnnnnnnnngagtaaagatattaaaacaattcagatgccaaagtcgtcttgtcaatattgatcctgggaaacctggatataaattcacactatgtatagggatcacagccaaggacaagagcagtagacattctttgcggaacatattcctatctcctaccattgagtaggaaagctcaaaggaagtagaggtctccaattgtgatgagatgttttctctagctgttgtaaggaaaggaaacattaatcagatcccctaacctgcataaagtgtgaaaacaccaagctgtcctttgaatgagtggaatatggaacacgcctcctccttcagctctcccacatgccactgtctatgaagcatttctcatcacatggaaaaggcaccaccattccataccaaaggcaaggaatttttgttctgcaacaccacgtttgtccttccagtcactgctctagaaaacattcctccactcaaacagngatttgggccaca

SEQ ID NO: 353086 - DNA, 390 bp, Homo Sapiens
  misc_feature (21)..(21): n is a, c, g, or t
  misc_feature (61)..(61): n is a, c, g, or t
  misc_feature (390)..(390): n is a, c, g, or t
aaataactgtatatattattngtaagttcgtacaaatgtattttcgaagaatatttaagancaaagcacttttgttattccatcaataaatgctctattttactcttgtgtggtttaggaaataatcacatttaaagtaatcatttaaaaacatcctaagataatggaattttaaaggccttgctttttagcattggaaaaatacaccacttgaagttcatgtttgttaagcctaactgtaattacatgttacataatctgcattgcctttttactatatgttcgtagtttttgttggccatgccaacatactcccatttctgcctagattatgggaatgactttgtatggggcagatagacagatactttaaaagctatttaaaaagcn

SEQ ID NO: 353087 - DNA, 372 bp, Homo Sapiens
cagatgagattttccaagagttggagaaagaagtagaatattttacaggtataaagatggctgtgaccacatcggggagcaccgagatgatgaaagagaactggcccctgggagccccattgcctctgtctccttcggtgcctgcagagactttgtcttccggcataaggattcccgtgggaaaagcccctccaggagggtggcggtggtcaggctgccgctggcccacgggagcttactaatgatgaaccacccgaccaacacgcactggtaccacagtcttcccgtgagaaagaaggttctggctccacgggtgaatctgacttttcgtaaaattttgcttactaaaaaataaaaacatttttaacagtt

SEQ ID NO: 353088 - DNA, 1185 bp, Homo Sapiens
agcgggtctttcccaccacgaggccaccaggtgactgcgggattccgatctgcgccggagctgcgatgctagagcactcttgccacccccaccccacggacgtgttgcagtgatatcagaattttgcgtgcggtttacccgtgtttaacctctttgcgtctcgcttctgaatcgtatccacttgagcatcactagactgatctattttaacactggtggggggcagcgaggacatggttttaaactttaaaatgaaaatgtgaaactaggaatgttgctgtgagaccccttggacaaacagatttttgcactggggatagaacttgagcaatttctgtcttggcctcgccactgacgtcccttctttcctgtggggacaggatggacagattcctggtgaaaggggctcaagggggccttttgaggaagcaggaggagcaagagccaactggagaagagccagctgtgttgggaggagacaaagaaagcacaaggaagaggcccaggagagaggccccagggaatggaggccactcagcaggccctagctggcggcacattcgggctgagggcctggactgcagttacacagtcctgtttggcaaagctgaggcagatgagattttccaagagttggagaaagaagtagaatattttacaggagcactggccagagtccaggtattcgggaagtggcacagtgtgcccaggaagcaggcaaacgtatggcgacgctgggctgacctacacattttcaggcctcacgctgtctccaaagccctggatcccagttctagagcgcatccgggatcacgtctctggggtgactggacagaccttcaactttgtgctcatcaacaggtataaagatggctgtgaccacatcggggagcaccgagatgatgaaagagaactggcccctgggagccccattgcctctgtctccttcggtgcctgcagagactttgtcttccggcataaggattcccgtgggaaaagcccctccaggagggtggcggtggtcaggctgccgctggcccacgggagcttactaatgatgaaccacccgaccaacacgcactggtaccacagtcttcccgtgagaaagaaggttctggctccacgggtgaatctgacttttcgtaaaattttgcttactaaaaaataaaaacatttttaacagtt

SEQ ID NO: 353089 - DNA, 2218 bp, Homo Sapiens
  misc_feature (57)..(93): n is a, c, g, or t
  misc_feature (1938)..(1938): n is a, c, g, or t
  misc_feature (2054)..(2054): n is a, c, g, or t
accgagccccccgaatgtagatcactataggggaacggagctctacgggggcggcgnnnnnnnnnnnnnnnnnnnnnnnnnnnnnnnnnnnnnatcaggccaaatcggccgagctcgaattcgtcgagagcggagtgctgccgccgctgcccgcggcttgcagagcaggatgaatgtgatagaccacgtgcgggacatggcggccgcggggctgcactccaacgtgcggctcctcagcagcttgttacttacaatgagtaataacaaccctgagttattctccccacctcagaagtaccagcttttggtgtatcatgcagattctctctttcatgataaggaatatcggaatgctgtgagtaagtataccatggctttacagcagaagaaagcgctaagtaaaacttcaaaagtgagaccttcaactggaaattctgcatctactccacaaagtcagtgtcttccatctgaaattgaagtgaaatacaaaatggctgaatgttatacaatgctaaaacaagataaagatgccattgctatacttgatgggatcccttcaagacaaagaactcccaaaataaacatgatgctggcaaacctgtacaagaaggctggtcaggagcgcccttcagtcaccagctataaggaggtgctgaggcagtgcccattagcccttgatgccattctaggcttgttgtccctttctgtaaaaggggcagaggtggcatccatgacaatgaatgtgatccaaaccgtgcctaacttggactggctctctgtgtggatcaaagcgtatgcttttgtgcacactggtgacaactcaagagcaatcagtaccatctgttcactagagaaaaaatccttattgcgagataacgtggacctattgggaagcttggcagatctgtacttcagagctggagacaataaaaactctgtcctcaagtttgaacaggcacagatgttggatccttatctgataaaaggaatggatgtatatggctacctactggcacgagaagggcggctagaggatgttgagaaccttggatgccgccttttcaatatctctgatcagcatgcagaaccgtgggtggtttctggctgtcacagcttctatagcaaacgctactcccgggccctctatttaggagccaaggccattcagctgaacagtaatagtgttcaagctctgctacttaagggagcagcacttaggaacatgggcagagtccaagaagcaataatccactttcgggaggccatacggctcgcaccttgtcgcttagattggtatgaaggtcttatcgaatgttacttagcctccaacagtattcgagaagcaatggtaatggctaacaacgtttacaaaactctgggagcaaatgcacagacccttacccttttagccaccgtttgtcttgaagacccagtgacacaggagaaagccaaaacattattagataaagccctgacccaaaggccagattacattaaggctgtggtgaaaaaagcagaactacttagcagagaacagaaatatgaagatggaattgctttgctgaggaacgcactggctaatcagagtgactgtgtcctgcatcggatcctaggagatttccttgtagctgtcaatgagtatcaggaggcaatggaccagtatagtatagcactaagtttggaccccaatgaccagaagtctctagaggggatgcagaagatggaaaaggaggagagtcccacggatgccactcaggaggaggatgtggacgacatggaagggagtggggaagaaggggacctggagggcagcgacagtgaggcggcccagtgggctgaccaggagcagtggttcggcatgcagtgagggggcggcagctccatggccgcagtggcctgccctgctctgagcacttccgtggactgaaggaaccgtangagcctgctctcagaaggacaatgattcagcatgtgattgcagcaggggtctctgccccctcgctcccaattcctagtcgtgacttcatttctaaaacagagcctgaacaaccttnccatgtatctccattcctcccctgcctccagccaggggaggactgaagggagtggccccgaggacccaccgcacatgttgggggccttctggggccaagaagtacttttttattataaactaaatttctaaaatccaaaaaagcctccaagggaaattagacat

SEQ ID NO: 353090 - DNA, 1209 bp, Homo Sapiens
  misc_feature (504)..(504): n is a, c, g, or t
  misc_feature (753)..(753): n is a, c, g, or t
  misc_feature (1184)..(1184): n is a, c, g, or t
  misc_feature (1209)..(1209): n is a, c, g, or t
aaaactgagggaactcatgctttaatagacactgaaaatcacaaaggaggaaggccaagtgccttagcaatctcaataaaaatatgaagttctttttacatggtaaatttcataatataaaaagtttaatgtctggaaatggtgtaatttacaaaaaaagtccacgtaggccaaagatggctaacactgcatataaggaacgtgaatgccagtggaaaggtgtctgaggaggggcagggccacaggtgtcctgacagggaacatctttgaaggatctggcacaaacaagggcccagttcacaaaccacaggtacactcattttagatagaacagcagaataggtgatgaaaattatacagttttcacttgttgcctacttactgaaagcaaaccagattattgcatggcatttttcccagcctgaactgaaattatcaaggctacagttcttcttgtgggtcctgcaaatgtgtgtggctgggaggtggcaaaatcggcacggnccagggaccggctgcagtgatcatatgctggaccgtcactgggacagagagagcaggatgaggacaccgtgggtgacacctttgtctcctgctaaaacccagcaagtttcagtgtggaccgtgaatttttaaaaaatggaatggaggtgaaaactttcattttgtgttgcacatcagtgtggatcaaaatgtaagttttagtagcaatttttctcttgatattttgacttaattaaaaaaatcaaattnagttgagtcattttactggagagaattaagaaagctttgactcccttgctctgtggtcctgctgaggtttctaagagaggggagttgtacggcttatagtcattgtatttacatctgatggagtagcagagggtggggcatgccagtttcctgagctaaaaggaaatatatgcaatgctttctgcaaatggtaaggaaaaaattgttttgtaaatattacatccatggactcctcccaagtgggacaaagagccaagggctatgcaggaggcatttgcttccatccacgtggccctcacataccctgggctccccggacgccagtcagtctatccactacctgacttgcttttcctagactggagaaacaaaacgttattccattttctgtcatccataccaggagtcagcaaacttcttaaaaggccagntattggctgggcgcagtggctcacn

SEQ ID NO: 353091 - DNA, 461 bp, Homo Sapiens
  misc_feature (23)..(23): n is a, c, g, or t
  misc_feature (56)..(56): n is a, c, g, or t
  misc_feature (105)..(105): n is a, c, g, or t
  misc_feature (120)..(120): n is a, c, g, or t
aactgtaccctgaaaaattccgnttcgggccgggaaaaagcccagccaaaaaaccnggtttgcctttcaagtaaagtaggccaacaagtgaaaaactgtaaaaantttccatcacccaantctgcctgttcctatcctaaaatgagtgtacctgtggtttgtgaactgggcccttgtttgtgccagatccttcaaagatgttccctgtcaggacacctgtggccctgcccctcctcagacaccttcccactggcattcacgttccttatatgcagtgttagccatctttggcctacgtggactttttttgtaaattacaccatttccagacattaaactttttatattatgaaatttaccatgtaaaaagaacttcatatttttattgagattgctaaggcacttggccttcctcctttgtgattttcagtgtctattaaagcatgagttccctcagtttt

SEQ ID NO: 353092 - DNA, 417 bp, Homo Sapiens
  misc_feature (89)..(89): n is a, c, g, or t
cgcctagtggctgcctgtgtgcatggctggaaggcactggtgatgtcccaggaggtagacctccagccctgggtaccaagatgaatgtncggaatcagaaaaacctgttcccatcaccggcctagcctagaatcctagcctagaagccctctctccctctgggctggagctcagtgagggacaactctctagggacacctgtaccagccccacctggcgctgagatccctcagacagcatggcccagccctggccagaagcatcgctccccttcaaccaaccgcgttgatggacacccactgtgtgccaggccccagcgggcccattggggggaggtgacctgggtgaggaaggtcatttgggtttttgtgagatttgtattgagcacctgctgtctacagagaatgtgatgatgtc

SEQ ID NO: 353093 - DNA, 868 bp, Homo Sapiens
  misc_feature (20)..(20): n is a, c, g, or t
  misc_feature (448)..(466): n is a, c, g, or t
agaggaaacaactatttaanctttattttcaaagtctaattttaattcagactgaacaaacaagcagaaaagtgagaaagctaactgtattagcagacacagatgtaccaaatgtaaaacagtgggttattaacagaactatttacatgcatatttacaagcaatccttttgtacacagtttttagttagctggaaaaagatttgacattaggtaaaaatattatttattagggctgaggtggtaccacattatagtaaaagtattagaaaagtgaccctcaaggtgtatcaattataaagcagatgaaaacttgaatgacaaatatctagtaaaattctctagtaaaaaagtcgatgcaacccatgctacaaaataaaagtgagaaagccatataaataaagcagaataatgttctaggctttaaggtaatgaagttagtcagttgnnnnnnnnnnnnnnnnnnngaacaattctagaattggaataaatcttcagtgaagtcttggttgtttagctgggagttcaccaagttgggtttttcccccccatgacattgaaaaagcccttggtattaaatagcatctgcatatgtaaataagttgttgatatattccaagactttagtgctaaagattttcaagattttgatttatatttgaaattcaatttattgggacactaaatggtaaactaaattgaaagcttttattcctctctccctaaaaaaggatggctcatttttttgcagggaataagtattttcccaggacgaaagacttctttcccccttcaagaaaaagttagaatacttaaagggtttacgcgtttttaacccaacttagcaaaatattttgaaaaatttttta

SEQ ID NO: 353094 - DNA, 1104 bp, Homo Sapiens
ggaattcccgggatcacaactgcatgatggccgccctgccggaggacactgtagtttttgagaagcctgtgaagaccatccactggaacgggtccttccaggaggcagcctttcccggggagacctttccagtgtcggtagagtgtgaggatggagaccggttcccggcgcaccatgtcatcgtcaccgtgcccttaggttttcttagggaacatttggacaccttctttgaccctcccctgccggctgagagggcagaagcaatcaggaagataggctttgggaccaacaacaaaatcttcctggagtttgaggagcccttctgggagccagactgccagctgatccagctggtgtgggaggacacgtcgcccctggaggatgctgcccctgagctacaggacgcctggttccggaagctcattggctttgtggtcctgcctgcctttgcgtctgtccacgttctctgtgggttcattgccggacttgagtctgagttcatggagactctgtcggatgaagaagtacttctgtgtctcacccaagtgctccggagagtgacaggaaacccacggctccccgcgcccaagagcgtcctgcggtctcgctggcacagcgccccgtacactagggggtcctacagctacgtggccgtgggcagtactgggggcgacctggacctgctggctcagcccctccctgcagacggcgccggcgcccagctccagatcctgtttgcgggggaagccacacatcgcacgttttactccacgacgcacggggctctgctgtcgggatggagggaggccgaccgcctcctcagtctgtgggccccgcaggtgcagcagcccaggccgaggctctagctgggcccagcctactctgttccacccgtgtcgggggtaggctgggaccgtcatttcttctgacagatttcagtctggcttgaaatttggggatgttaatgagggtcctctggtttttggtaaccagggccaccttctcagttcttgtgtctgttattggagtctggccagggttgacttgagctgagacaccagatgctcacggagatgctggacacataaagcaagttacagccac

SEQ ID NO: 353095 - DNA, 1138 bp, Homo Sapiens
  misc_feature (42)..(42): n is a, c, g, or t
  misc_feature (50)..(50): n is a, c, g, or t
  misc_feature (1071)..(1071): n is a, c, g, or t
  misc_feature (1091)..(1091): n is a, c, g, or t
ctcccccaccgcccgccgggggcccgccccacatggtttctnctcctttntttgtttggtgaattcggcacgaggcccggctactcagaagccctcggactgcccggaccgcgcgatggagtcgaccggcagcgtcggggaggccccgggcggaccccgggtgctggtggtgggcggcggcatcgcggggctgggcgcggcgcagaggctctgcggccactccgccttcccgcacctgcgggtcctggaggccacggcccgcgccgggggccgcatccgctcggagcgctgcttcggtggcgtggtggaggtgggcgcgcactggatccatgggccctcccggggtaaccccgtcttccagctggctgctgagtacgggctgctgggggagaaggagctgtcccaggagaaccagctggtggagaccgggggtcacgtgggcctgccctccgtgagctacgccagctccggggccagcgtgagcctccagctggtggcggagatggcgactctgttctacggcctgatagaccagacccgggagttcctgcacgctgcagagaccccggtgcccagcgtcggggagtacctcaagaaggagattggccagcacgtggccggctggacagaggatgaggagaccaggaagctgaagctggccgtcctgaactccttcttcaacctggaatgctgtgtgagcggcacccacagcatggacctggtggccctggcaccctttggggagtataccgtgctgccggggctggactgcaccttttctaagggctatcaaggactcacaaactgcatgatggccgccctgccggaggacactgtagtttttgagaagcctgtgaagaccatccactggaacgggtccttccaggaggcagcctttcccggggagacctttccagtgtcggtagagtgtgaggatggagaccggttcccggcgcaccatgtcatcgtcaccgtgcccttaggttttcttagggaacatttgggacaccttctttgaccctcccctggccggctgagaaggcagaagcaatcagggaagataggcttttnggggaccaacaacaaaaatnttcctgggagttttgagggagccctttttgggagccagatttgccca

SEQ ID NO: 353096 - DNA, 1222 bp, Homo Sapiens
  misc_feature (7)..(7): n is a, c, g, or t
aaaagantctatcttcagatataaggaaaaaacaatcttttatttcttaggataaatctgtagaaggacctccagacagtgaaggccactgactactttatactctgtaagccatccctccctggtaggaaggactatttccaatcttacagagtacctctcagcaaatagacgttttcacatatactgtgattcatacatccctatggctggtgacctctttaaaaaggaaaggaaaaagcctaatcaaacaaaaagatgctgctagtaattcttaccctattgtgaatcctatataagcaaatttgtatctttgttttttcctacattagcagatctatttgatgtatatctctgagtgcagaaaatattttatggaaaaatcaatatatggaatttcaaattcagaattgctgatacacactatttggtttcacaattttatcctaggaaatagtattagagatttcaatttctggcttaaatggtagaattaattactcttaactcttaattttacttctgagttgaggtcaaggaacaggcagacacctgcagttaacgtctatacctctccatggccaagagttttaattttctcgtcttcaattttgtagatgttcatcattactaaatggattgattagtattttatctcctctccttgtccttactttccctctggtaaatatgttataaacagtgtaaggctcctaagatagagtagctggtaggacttagaagagaaacaaagggcactgataactcacataaatggaaaattggctctggaataactgacaacatattcaagtattttagtgcagtgtcactctcattaagaagaagagaatcagtaaatctatgtgactctaaacattctaatgaaaaaaggaatattctgccaattatctcacatttctaaatatctggatattggccattgtaaagacaaaacatacagatgatggacttgtctttccacctctcatttgcatggtttggagcattgtacctccagccatagactctaaggcaatttatatttgcttcctcttccctcttgagagaaaacgaaaatcttatttttccaagcaattaaaactcttctgcttcagctaggacgaaagaattaggagttctgtctccttgtatctaattgcatgtttcatctttcttgttttaatgattgacagaaaactaataaactgagacatctttg

SEQ ID NO: 353097 - DNA, 380 bp, Homo Sapiens
cctttcctcctttcctttccaagtgtcgtgagtcgtcttgattgtatattggaaataactgtgtaacaaatcgtattataaatatttcaattaattttactctgaatttgtttattaaaagacttttgaacatgaaatgattagtattacttgaatgcatccagaggatatttaaaccaaaatgaaaaaccagaaggccatttggtgtcccctctcccaggtgtccccttgtagcatatgcattatgtcatctgaattgaggcctttctgtgaacagcatcataacttctatcatggaaagtgtactatatataatgtttgtgtcatgtatatgcctaaattttaattatctataaataaaacatctgacataaaaaaaa

SEQ ID NO: 353098 - DNA, 832 bp, Homo Sapiens
  misc_feature (9)..(9): n is a, c, g, or t
caggcgtgnagcactgtgcccagccaaaagagaaatttctacatgaacaaggcaatttcagtgtcttacagcggccaaaccatgacgtgaagaatgagataggagacaggagatcaccataagcgtccctgatatagcagcacacattttcacgtttccacttaaatcgttttgcacaaagtcttgcttcgctcagatgagatgagatatgatttcctagagatgtaaaaataagaatgaatgtggcgcccccttcttccagatgtaatagaaagctctgccctatcacaaggggggtgttgaagcgccccttgtgttttaactgtatttaactgagcacaagatgcacaagctgtggtgggaaaccctcagtttacctttggagtcttccctgcagatcgcagacctgtttccaggctgatgtttctggtgtgtaattgctagcgtttctgaagggttttcccaattgttttagccttgtgaagtattcttaattataacttgcctttcagcgatggtacatgacttgattcaacgtttggttctgaacttacacactgatgcgtttactcatctaacataatctgacagggcctcagcaagggagccatacatttttgtaacattttgatatgttttaatgcatctgacttagatcttactgaaataaagcacttttccaaagaaacaacccccgtaaccgcactatctgcctccctcttttacaccctcgggaaaagaagcgcccacgccccactccaaataaatcaccttggtttgcgcgcgccctgcgggcccctcgaaaaaaggctttttctaagaaaccactttc

SEQ ID NO: 353099 - DNA, 667 bp, Homo Sapiens
aaatgtacatgttttggagacttcaaaggtattatgtgagttcacatttagcaacagcttattaataaccctcaagctgtcagaatctctatagttaccatttacaattttatactgtgaaaaaatacagatcagtgaaagcataaagacaagtcagaattcaactttgaagagggtctgaggcccgggagagtcctctactgtctattgaagaatgaggcatgtataaaatagttggttgaatttcactgatcttcccaatgtgaacaaatatactatgtatattgtgtgtatttctagaaatcaatggcagctgctgatggtgttgtaattagaaatctatatagattatagatgttttagaaagatggtgccaatcctaaaagatttgtgtgggctaaaagtgcttgtacttacttttttctgcacttataactgatttggttttaaaattgtgtgcgtgtatctgttctttctctgttgtggcagcttgtactattaaaataatagagaatgttaaattattttgatgtgaactgcaaatgattttttttcataaagtttaacatttttatcagcattgttttgctttgtacttgtataaatatgttttattttagcacttcaaaatatacttgccctgtttcatcagttgtcgtaaaaaaaa

SEQ ID NO: 353100 - DNA, 461 bp, Homo Sapiens
agaattcttgccatgtggatgaactcattcaaacacaatgactgctttatgagacaatagatagatttctacctcttctcacatgtacagagaaaatatttccaaagtctccggaatatttacatgtattactatttaatataaacttgcaagtctttttaaatgtgtttaaaactatcacagtactaaacatgaactagatgcataataaatgctgaaagtaaaaagcctgacttatttaagtgaaaagagaaaaagatttagatcccaaataaatgtatgcgtttgtgtgtttgtgtgtgtgcgcgcatgtttgctgggcatgtacttgtaaaagtaaaataatagaaagtattattcttggtacccagcattctaggaataatgtcttccacaagattattagaaaactctgctactttgtaggaggagctttggataactatgaataagtcccttta

SEQ ID NO: 353101 - DNA, 427 bp, Homo Sapiens
  misc_feature (382)..(382): n is a, c, g, or t
  misc_feature (395)..(395): n is a, c, g, or t
  misc_feature (423)..(423): n is a, c, g, or t
ttaaataaagattaaattaaatgtcttatgagactaaaactctgatctctgaatattgaaatttccattatatgaagtaatttttgcccaaaatataatttcataacacagttccccgaactgattgaatgaatctagattcagtcagtcttctatggttaataaaatctatagtgaacccaaagaaatgctggtctgcataaagtcacattaatgcaggctgcctattgttaataaaagtactttcaagatattaaatcattagtaatgttttaagatttttgtattatgtcaaaccaaatgggtaaatacataaaggaaaatcaaaaatgtgcatattttctaaaacaaaagaaatccttcccagctaagactttattgnataattccattgngatgcaactctcatcaagaactcaccangggg

SEQ ID NO: 353102 - DNA, 1888 bp, Homo Sapiens
  misc_feature (96)..(96): n is a, c, g, or t
  misc_feature (153)..(153): n is a, c, g, or t
  misc_feature (268)..(338): n is a, c, g, or t
  misc_feature (384)..(421): n is a, c, g, or t
  misc_feature (1767)..(1767): n is a, c, g, or t
  misc_feature (1855)..(1855): n is a, c, g, or t
ttattcaataaaattaatccccccatattaatgccacagtattgcccaccaaatgccccacttccattttgtctgcatagacatattaagaatttntccaatgatgtaatttaattatcctaaaaggaaatgacagattcttctgtaggaaangaataaaaacatgaatatctcaaattataatggttaatctctaaaatatgcttaaagtaagatgtttctatgttatgtggttatgttatcgaataatatttggttgatcttcacnnnnnnnnnnnnnnnnnnnnnnnnnnnnnnnnnnnnnnnnnnnnnnnnnnnnnnnnnnnnnnnnnnnnnnngtcaagaaatgtatgattattttggagagaatgggcccaaatgtgnnnnnnnnnnnnnnnnnnnnnnnnnnnnnnnnnnnnnncactattttcccctacgaaatatactgtatatttcaaaagaagaaaagttaaaagatatttgaagattgcaggggcaaaacaaaaacctaccagggctcagcacttaagcacttttcccacatccagggtcaaagcagcagtaactacatggacttttaagtgcggtatgaaatgcaacattacgcttacaaacagtactgtcaaacctcaaatgctttctttcttcagatgctttttcgtgtacatgatactagtagacacttttctctttatatttactgatagtgaaaatcatacggcaataaaatattgatgtttgaaggcagtgggtcaccaattgggtttaaaaaactatggaatgtaaactgaattgttatatctctatcctttttggcttttctctgtgtttttaatgtagggaataaatctcataaatagaaagaaaaataatctagaaatttttcaaagctagtactctttctccttataaatgtacacaattttaatctttttacaaatttatttaactgtacctactgtacttattgtagattcaatgacgcagttaagtcatcacccaaggatttatgaatttgagattactgacctgttttcttcatattgcattcacatcaatatttgtgaatttgttgttcagcttttcattcaaacaaaaaatattccctcaagaaagctccatttttatcataaacatttcaacataaccaacattagaacaagtctgccatgttaaaaataatttaaagacttatctctgaaaacggtatccagaaacgcaggtgttcccagtaatgtagcttcaaaaataaaatgtgctatttatatgacatgaaattcataacttttggaagggtatatttatgacagcataaaaaataaattctgtgctataaagaagatccaacaaattaaccatataagcacagaaagtagagaaacacagttattgaatctactcttgtcattaacattttcaaaaaacaaaatgcatattgtaatatttggtacatgacacttgcatgttgatatgcctatatacttacaaagtattcaatgtgtacttagcggcgcttaaaatatgtcatgtacaactcttataaacatttttacagggttcccatttgcacttcatctttcagtaaagtcttgtcagaaaaaaattgtctgataaatatggaaaaataaaatttgaattttagttatctgttggacattactgaatttgctattacattagtacaatttcttaaccttgtaaacagacattgaaagatgggaactttcctttttccagtgacaggtccattaaaatcgatggtacaanaacatactttctttaatgccaaactacaatattattggaataaccttatttttccaaccttcccaattatcccattccattttaagtnttatctctcgatgaatgccccttttcttttgtt

SEQ ID NO: 353103 - DNA, 1521 bp, Homo Sapiens
  misc_feature (830)..(866): n is a, c, g, or t
  misc_feature (950)..(978): n is a, c, g, or t
ctaaaatcatcagcatttttatgtattgagattattaatattgaatgcaatagttattggatatagctggtaagttctctgccatgcatacttacaataatccttctacctctcacttttaacatgggctatgatacttcaatataaatagaggaaataattatttaccagatatcccaggaagcattcttatggaactattataacagtgcactccccaccccctgggaaatctcaaaagccaagttcttcagtgtattctatggtgtatgaatctgcatttgtttttccttttctatcattagcttttcctaaaggcaaaatattataactttataagaatagtccttctcctgcctatttaatatttcaatgttaatataattgtattggtttttaaaaataattaaaatggcaacactttgcgatccaatctgatatttaatttttaaaatgtaacaatttcttataaattcatgctgtgttttaacgtaaaaatcatgtatatgaattattttaccaagtagtattatctgcacgagacaaatttaagtattttaaaaattactccttattaataaataatcctcatataatgcacagtattgccacaaatgcccacttcattttgtctgcatagacatattaagaatttttcaatgatgtaatttaattatcctaaaagaaatgacagattcttctgtaggaaaaaataaaaacatgaatatctcaaattataatggttaatctctaaaatatgcttaaagtaagatgtttctatgttatgtggttatgttatcaataatatttggttgatcttcacatatttnnnnnnnnnnnnnnnnnnnnnnnnnnnnnnnnnnnnnactcaagaaactcaagttatatatatatgtcaagaaatgtatgattattttggagagaatgggcccaaatgtgaaaaagatatnnnnnnnnnnnnnnnnnnnnnnnnnnnnncactattttcccctacgaaatatactgtatatttcaaacagaagaaaagttaaacaggataattttgaagattgcagggcaaaacaaaaacctaccaggctcagcacttaagcacttttcccacatccaggtcaaagcagcagtaactacatggacttttaagtgcggtatgaaatgcaacattacgcttacaaacagtactgtcaaacctcaaatgcttctttctcagatgcttttcggtgttcatgatactagtagacacttttctctttatattactgatagtgaaaaatcattcgcataaattgatgttgaggcagggccccatggtaaacactattgatgttaccgagggtaaattccaacattgcacccgggtaagttggaaattttaaataacacatactaaatttacaactaacataccttaagccaataaccttaaatataaggccccattgacacagtagcggatctcaagttaaaagataatacgtatcattcatctgtaacataacaataacaaatgacactacacaataa

SEQ ID NO: 353104 - DNA, 392 bp, Homo Sapiens
  misc_feature (2)..(2): n is a, c, g, or t
  misc_feature (15)..(15): n is a, c, g, or t
  misc_feature (106)..(106): n is a, c, g, or t
  misc_feature (123)..(123): n is a, c, g, or t
  misc_feature (249)..(249): n is a, c, g, or t
  misc_feature (263)..(263): n is a, c, g, or t
  misc_feature (268)..(268): n is a, c, g, or t
tnaagccaaccgtgnttaaccgtgtgccatgtgattcctgtgatctatgctaaatcgggaggtgaaatttaactaaagggtgcacaatccacttatccagaaatanagggcataggaaagaanagcctcctcatccatgagtaacacctaaaacatggggcttaattcatagttttgcaaggggtgacactggcgaagctaaaacaacaatgtagtttcaagatataggtgcgttaggtgaaaaaaaanggactgtggaggangaaanataatctagaaatgattttttaaaatctgtattttgaagaaaggaagcaccaccaattgcataaatttataaaattacagtaataaacatgtaaataattatcaggtttataataccaataaaa

SEQ ID NO: 353105 - DNA, 350 bp, Homo Sapiens
  misc_feature (19)..(19): n is a, c, g, or t
  misc_feature (111)..(111): n is a, c, g, or t
  misc_feature (201)..(216): n is a, c, g, or t
  misc_feature (273)..(274): n is a, c, g, or t
  misc_feature (319)..(319): n is a, c, g, or t
  misc_feature (326)..(326): n is a, c, g, or t
agaaaaaaggaaaaaaganatattccaaaatgttaagagcggttgcctctccaatgtgggaggggaggatgaactttctccaatgaacatatattactttgataataaggnacaaaagtaaacaaaattttaaaactgtctgatgaagcgacaatcagccataaccttgttttatatctttaaaacatgcacggacacgtnnnnnnnnnnnnnnnncaaaaattccagtctggggccttctgacagtagaaagaacaccatgaagtatatatnnggctctctactgttccaaacttttaactctatgacagtaaattangttattnacaatcctggttaagaataaacat

SEQ ID NO: 353106 - DNA, 307 bp, Homo Sapiens
  misc_feature (2)..(2): n is a, c, g, or t
  misc_feature (23)..(23): n is a, c, g, or t
tncacacacacatatgcgtgtgngcacaccaccctccccagtggtctgtacctggagagcacctgagggcgtctgtgtgcatagaccactggggggtaatcatgaaaatatgtgtgcttttgaagctaaattaagcagtcagaagccatttcccacctcacaagcactcccctgggctgccagtgcatctgttttgcagaagcagctggtgacacactttttaccttaccaggaagtcacttcccagagggaagctacggcaggcggtgccagggcaggggcttcaccagagagcactgcaaagctt

SEQ ID NO: 353107 - DNA, 917 bp, Homo Sapiens
  misc_feature (463)..(476): n is a, c, g, or t
ggcctgggtggcgaattcggcacgaggccaaggtgtctatcaaaatgatgtagggggtatcttaaactgtccaaggcaatcatgcattgaactttattcctatgcagagccaaaacgaatagtgttgataaaatagctaaactttctaaactggagaggaggctacagtgccagagagttattgtctcttttgctttaaatggtaatcttaaaagttgcattgtgctcttcctttgttttgggatagatatatatagagagagatactataaggaagtttatttcttaggaagtgcactgaataatgtatttcttttacagtgtaatatgggggtggggatatgcgaaagaaatgtgtatttttgctagttgcctaccttctgagataaataagcacaatcttgcaatggatccaataacccagttaggtattatagattagtatttaagtttgctgtagatnnnnnnnnnnnnnnctaagtaaaagttccatgattcacaattttagtattaacccatgttgcaaaagctgttactggccaacagattgtaatgatgtgtaccatataacacaagcattaactaggcattaacgtttgtaaagccaaatataccatgcagaagtcttcatttttatagcagactgcattaaaacaagttaaatcttgctgtttggggggaaatagtcttgtttgtacaaagtgaaaaatggcacaatttgggcatattttgttgggaagagggggtggtgtaaagggagcacttgactgtggctttgacaaaacaaatgaagtcaatgacccatccaggttagactccataaggaactaagacattgatttttctttaaagtcttagagctggaaaaaagcctttacaataaatccagtctgtgatttttttaaacctttttggtg

SEQ ID NO: 353108 - DNA, 457 bp, Homo Sapiens
  misc_feature (412)..(412): n is a, c, g, or t
gaagaatgttacagtgaaagtgaacaggaagatccagaaatagctgcggagacaccaccccctcctcacgcttcccagactcagtctttgactgcacagcaggcatcttcatcctcacccagcctgagtggaacgccgtattctttctcttccctggaaaatacagtgaagacacccagcagttttccttcctccttatctaaagagagacaatccttgcctgacacagttaacagtttgtctgctgctgaagatgagggacaaccaataacgtttgctgtgcaagttcattcacctgtaccctcagaggcaggcatccacaaggccctgggaaacagttttgtcacatcagaaagtggatttttgactctttatctagtgatgatacttcttcattgagtagcaatcatgnccatcttactgtcccagataagcctgctggatcaaagatcatgga

SEQ ID NO: 353109 - DNA, 1337 bp, Homo Sapiens
  misc_feature (666)..(674): n is a, c, g, or t
  misc_feature (771)..(820): n is a, c, g, or t
  misc_feature (1171)..(1204): n is a, c, g, or t
  misc_feature (1299)..(1299): n is a, c, g, or t
gggaggactcagtgtgaagccttcatcaatagcaagcactttttaagggagtaaaagttgttaaaggcaaacgtcaaaaacatgaaagggcattcaggatgtcccatggcaataagaacaggggaaatctcagagcacaattcagcaggatgagagaaggggaaccagaagctccggagtcattgctcacttcagagtttgaattcgtgagctgacaaagagtaacatgctctttctacacagacatggacaatttagacagtattggaaaattacttgaagctggattttcatgaagttctgaatgagtgtaaatgttttttaggatactataaagagtgatgtttttcataagcaccataaaatgggttctggaaaaactgattaccttagcatcctgtaatataacttatggtagcagattggggaaaatgaagcagcccactgaataattgacaaagtctgcttggagaacattctaaagtacaatatcatggagctcctttttccttttctccactaattgcgtgatgagctattgttctgggctggtaattctccaactcggctgtcatttgaagtggcagacttaatatggaaagtttttataattatgagtttgaaaaagcattttaagatgatacagaaagtatccaaaacaacagnnnnnnnnngccacgtcattttagatgaattgcgtgccttaaaatggtgaacgttagaaaattaaacaagtctggattccacaagtagttccaagtcaccaagtgnnnnnnnnnnnnnnnnnnnnnnnnnnnnnnnnnnnnnnnnnnnnnnnnnngctccaagctgcagtggatttaattatgaggctaaaactacctcatactttccttggaagaactaattagctatggtttattgtagggttttgtttgtttgttttttaaagcaaatgatttccatattccagattgatcttttttgtcatctttgcttcaaaattacataaaaggtgctcctttcccccttcttttatacaagtttcttgttcatattgtgaatagaaaagtttctgaacaacttttttggaacattttctatctatattccaaagcatgtaatatatacataaaaacgatttgttaaactggtccttagtcatttgtataattagaaatgaagtttgggnnnnnnnnnnnnnnnnnnnnnnnnnnnnnnnnnntaacttaattcctttttgcatattctgatagccttctagaatcagaaataaccttcttgcatattctcttatggtctgacttttcaagacctatntatttttacataggtcaataaacaaaaggtggctactg

SEQ ID NO: 353110 - DNA, 663 bp, Homo Sapiens
  misc_feature (133)..(167): n is a, c, g, or t
  misc_feature (518)..(569): n is a, c, g, or t
agcacaccttttgtttattgacctatgtaaaaaaataataggtcttgaaaagtcagaacaataaaagaatatgcaaaaaggttatttctgattctagaaggctatacaaatatgcaaaaaaggaataagttannnnnnnnnnnnnnnnnnnnnnnnnnnnnnnnnnncccaaacttcatttctaattatacaaatgactaaggaccagtttaacaaatcgtttttatgtatatattacatgctttggaatatagatagaaaatgttccaaaaaagttgttcagaaacttttctattcacaatatgaacaagaaacttgtataaaagaagggggaaaggagcaccttttatgtaattttgaagcaaagatgacaaaaaagatcaatcaggaatatggaaatcatttgctttaaaaaacaaacaaacaaaaccctacaataaaccatagctaattagttcttccaaggaaagtatgaggtagttttagcctcataattaaatccactgcagcttggagcnnnnnnnnnnnnnnnnnnnnnnnnnnnnnnnnnnnnnnnnnnnnnnnnnnnncttggtgacttggaactacttgtggaatccagacttgtttaattttctaacgttcaccattttaaggcacgcaattcatctaaaatgacgtggc

SEQ ID NO: 353111 - DNA, 668 bp, Homo Sapiens
  misc_feature (195)..(207): n is a, c, g, or t
  misc_feature (466)..(466): n is a, c, g, or t
  misc_feature (593)..(593): n is a, c, g, or t
  misc_feature (598)..(598): n is a, c, g, or t
  misc_feature (605)..(605): n is a, c, g, or t
  misc_feature (608)..(608): n is a, c, g, or t
  misc_feature (628)..(628): n is a, c, g, or t
tttccttttaaatataaggcaacttgccaacacataacttaaaactggtcttcagtcacattgcttcagatcactagagaatttctggctaacgaacagtagtggatagtgaacaaaatgcaaaaccttaaataagaaccatcagctgacattccccagagacaagaggaaaggtaagggcttatttcatctgtnnnnnnnnnnnnngcccaattctgcatctttaacagaatggtgcaaaaatttgtaacaaaacagtctaagtttaaaattacagaaaagtgtttctagccaactaattgtcgcttgggatgagacgtgctgagcatggagtggatgaaggtatgctctaagaatggacagagggcaggaggggcttgtttccaatgtaggcccagctccaggtgttagaaccatgctcatttggtaaaggaagtactcaaagagcttaaggctttgtgtttgnttttttttccttcattaaactgaggggctgcactagagggtgaatgtacctgtggggccactcacacacaatgctactcaaacccacactacattcatacagaaacgtaacgtttaaaacttacagngtaanagttttncantaggccaacaagtgctcgangaattccgaacttttaaagcagaaagtacactttccgtca

SEQ ID NO: 353112 - DNA, 758 bp, Homo Sapiens
acttactatcatgctggctgcctccaatttccttctggaccgaccaataattcccccaccacctccccatatgtccagattctctcgatgatgctgactgctttgggaagtatgttaacttcatggtacatgagtggcgtatcatactggctattatatgggtttcagacaaaatcaaaaagaaggaaggtgctcacattccttaaattaaggagaaatgctggcatagagcagcaactaaatgacaccgactaaagaaacgatcagacagatctggaatgtgaagcgttatagaagataactggcctcatttcttcaaaatatcaagtgttgggaaagaaaaaaggaagtggaatgggtaactcttcttgattaaaagttatgtaatgaacctaaatgctaatgtgaaatattcttactggactctattttgaaaaaccatctgtaaatagactggggtgggggtgggaggccagcacggtggtgaggcagttgagaaaatttgaatgtggattagattttgaatgatattggataattattaggtaattttagtgagctgtgagaagggtgttgtagtcttataaaagactgtcttaattgtgcatacttaagcatttaggaatgaagtgttagagtgtcttaaaatgtttcaaatggtttaacaaaatgtatgtgaggcgtatgtggcaaaatgttcagaatctaactggtggacatggctgttcatgtactgtttttttccaatcttcaaaatg

SEQ ID NO: 353113 - DNA, 1304 bp, Homo Sapiens
  misc_feature (158)..(197): n is a, c, g, or t
atgagccactgcaagaaaaccttaactgcagcctaataattgttttctttgggataacttttaaagtacattaaaagactatcaacttaatttctgatcatattttgttgaataaaataagtaaaatgtcttgtgaaacaaaatgctttttaacatcnnnnnnnnnnnnnnnnnnnnnnnnnnnnnnnnnnnnnnnngctattttttttaacttcctttattttccttacagggttttagacaaaatcaaaaagaaggaaggtgctcacattccttaaattaaggagtaagtctgccagcattatgaaagtgaatcttacttttgtaaaactttatggtttgtggaaaacaaatgtttttgaacatttaaaaagttcagatgttagaaaagttgaaaggttaatgtaaaacaatcaatattaaagaattttgatgccaaaactattagataaaaggttaatctacatccctactagaattctcatacttaactggttggttgtgtggaaaaaacatactttcacaataaagagctttaggatatgatgccattttatatcactagtaggcagaccagcagacttttttttattgtgatatgggataacctaggcatactgcactgtacactctgacatatgaagtgctctagtcaagtttaactggtgtccacagaggacatggtttaactggaattcgtcaagcctctggttctaatttctcatttgcaggaaatgctggcatagagcagcactaaatgacaccactaaagaaacgatcagacagatctggaatgtgaagcgttatagaagataactggcctcatttcttcaaaatatcaagtgttgggaaagaaaaaaggaagtggaatgggtaactcttcttgattaaaagttatgtaataaccaaatgcaatgtgaaatattttactggactctattttgaaaaaccatctgtaaaagactggggtgggggtgggaggccagcacggtggtgaggcagttgagaaaatttgaatgtggattagattttgaatgatattggataattattggtaattttatgagctgtgagaagggtgttgtagtttataaaagactgtcttaatttgcatacttaagcatttaggaatgaagtgttagagtgtcttaaaatgtttcaaatggtttaacaaaatgtatgtgaggcgtatgtggcaaaatgttacagaatctaactggtggacatggctgttcattgtactgtttttttctatcttctatatgtttaaaagtatataataaaaatatttaattttttaaatt

SEQ ID NO: 353114 - DNA, 1602 bp, Homo Sapiens
  misc_feature (981)..(1066): n is a, c, g, or t
agcggactcttaagaagggacggggccccacgctgcgcacccgcgggtttgctatggcgatgagcagcggcggcagtggtggcggcgtcccggagcaggaggattccgtgctgttccggcgcggcacaggccagagcgatgattctgacatttgggatgatacagcactgataaaagcatatgataaagctgtggcttcatttaagcatgctctaaagaatggtgacatttgtgaaacttcgggtaaaccaaaaaccacacctaaaagaaaacctgctaagaagaataaaagccaaaagaagaatactgcagcttccttacaacagtggaaagttggggacaaatgttctgccatttggtcagaagacggttgcatttacccagctaccattgcttcaattgattttaagagagaaacctgtgttgtggtttacactggatatggaaatagagaggagcaaaatctgtccgatctactttccccaatctgtgaagtagctaataatatagaacagaatgctcaagagaatgaaaatgaaagccaagtttcaacagatgaaagtgagaactccaggtctcctggaaataaatcagataacatcaagcccaaatctgctccatggaactcttttctccctccaccaccccccatgccagggccaagactgggaccaggaaagccaggtctaaaattcaattggcccaccaacgccaacgccagcaacaacaccccacttactatcatgctggctgactccatttccttctggaccaccaataattcccccaccacctcccatatgtccagattctcttgatgatgctgatgctttgggaagtatgttaatttcatggtacatgagtggctatcatactggctattatatgggtttcagacaaaatcaaaaagaaggaaggtgctcacattccttaaattaaggagaaatgctggcatagagcagcactaaatgacaccactannnnnnnnnnnnnnnnnnnnnnnnnnnnnnnnnnnnnnnnnnnnnnnnnnnnnnnnnnnnnnnnnnnnnnnnnnnnnnnnnnnnnnaaaaaggaagtggaatgggtaactcttcttgattaaaagttatgtaataaccaaatgcaatgtgaaatattttactggactctattttgaaaaaccatctgtaaaagactggggtgggggtgggaggccagcacggtggtgaggcagttgagaaaatttgaactgtggattagatattgaatgatattgggatcaattatgcgtaattttatgacgctgtgaacagggtgtggcagtttatacaagaactggcttaattgcatacttaagccatttacgaatgacgtgtagaatgtcttaaaattgttcaaaatggcgtttagcaacacttgactgtgaacgcgtatgatggcccaaatgttaccagaattctacatggtgtgaattgcatgtcaactggacctgttatcacaaactctcaaatgtttacacgatattactacacaccttttcaccttttatcaaacaagaacatacaacgacaagcacaacaccacgccaacaaagcaactaatagcgacacagcctacaaacac

SEQ ID NO: 353115 - DNA, 446 bp, Homo Sapiens
  misc_feature (14)..(14): n is a, c, g, or t
  misc_feature (37)..(37): n is a, c, g, or t
  misc_feature (133)..(133): n is a, c, g, or t
aatttccccttctntcaaacatgtcagtgaccaattncctacagtaagtttagtgggccctggtgctgacagtataggttgacttgaagtagatggctttacttggcctcgagctctttgtaacttctctaanaattcacttcggctttctgaactgtcagatccaccttccggactaccacttgaatacatggtggcaagttttccatccaagataaatctgaaccatccattactgccattagataattccaaggctgctgcatcactccaaatatataagcagtcccttcccctaatgattgaccagtctctccaatgatatggtttaccttgttgcaattctttagcatcttcctgtggttcatcttctttttctggttttgattcctcttcattctcatcatcagaggaaggacctgccaaacgttgacactttgctaatt

SEQ ID NO: 353116 - DNA, 413 bp, Homo Sapiens
  misc_feature (5)..(5): n is a, c, g, or t
  misc_feature (54)..(54): n is a, c, g, or t
  misc_feature (78)..(78): n is a, c, g, or t
  misc_feature (91)..(91): n is a, c, g, or t
  misc_feature (94)..(96): n is a, c, g, or t
ttaantcaaataactctaatgatatgttcccatacatttttagagaataaaagnagttcctagagttgagtttaagcnatgttatttgtgnggnnnaattattaaattaaccttaaagcttagtaaaattcttgcctgtctcgatacccattattttatctgcagatatcaagtatttgatcaagtaataaattaagaagtaacaaagaactgaagtttgactttttaattaatttaatgtctcttatttatccgtgtaaatacagagaaaatgatgtagatttttaaaacattagtttgactatcatcttcattcacttcattttaaatttctttttcagatatgaatttgtgactataaagaatttaagatacataattaaaaaggataatttaggccaggcacagtggcc

SEQ ID NO: 353117 - DNA, 527 bp, Homo Sapiens
  misc_feature (84)..(130): n is a, c, g, or t
  misc_feature (517)..(517): n is a, c, g, or t
  misc_feature (519)..(519): n is a, c, g, or t
ccgccggctgactctatgaagagatctcccctgtgggtataccaccaatatcccgggatatgcccccaatgtttttaaaccccnnnnnnnnnnnnnnnnnnnnnnnnnnnnnnnnnnnnnnnnnnnnnnnctttgttgctaggattaaggttattctaattgctttactctcaggaaagtgtaataacgcatgggaattctgtacgttatcactgtaatggaatatccaatttacagatagtatgatatacatttcatcatttaagtaagggatcgaaaacatttcaaattgctctatctgggctgatagacatttcgtcatttaagtaagggatcgaagacatttcaaattgctatctccatctgggctgatccaaaattctgagattgttggctacctatattttgttgcagcttttaaatgtactctgaacttccaaaccacattcattccagcctggtagaacaaatattcttggatctttgatcaaagcctggaatgatagctttaataaangngggaaaaa

SEQ ID NO: 353118 - DNA, 498 bp, Homo Sapiens
  misc_feature (345)..(345): n is a, c, g, or t
tttgttatagaaatctgtttaatggtttaggaatgtgtacactctggctctgccaagtttccataaaggcaacttttccatgttttaaaaaatagatttggtataaagatttatatattcataaataggtggcatgaaaaattaccaaatgcaaatggaatacttgcgctgactgaagccctgttcaccccaagtccaggccctgcaggggtccgagggtctctgctggaggaggccccaactccggcagcctcttagggaagagaaactgaattaaatgtgtattaggaacccctccagctccttaagccagcgtcgcactggccccaccgaggcctcagcccnacctccctctgttccccccgccacctccaccattgccccctcccctgcactctggcccctgaccccacctgttcccactctttggcaatttatcaacaaaggaagagatgacactgttctccttccgccccagagcccgggctgccgggagag

SEQ ID NO: 353119 - DNA, 771 bp, Homo Sapiens
  misc_feature (56)..(56): n is a, c, g, or t
  misc_feature (525)..(525): n is a, c, g, or t
  misc_feature (735)..(737): n is a, c, g, or t
  misc_feature (740)..(741): n is a, c, g, or t
  misc_feature (748)..(750): n is a, c, g, or t
gtggttgtggaatgcatacatttccatgtatttttacagtaaaaatgcattaaaanatctttcacaaaagaaacttaaaaaatacaattagggtgttgagtcctcccccccaacattctttcaggcatcaactgtgtaacggagggagacaaattcctaaatcgtttgatttcatcatacaaaatactcatccattatctctcatcaagacatttacattaagtgggggaggggggcggcgggattaaggaaagtaggctcacaagaatcagtttccaatttaaggttacagcagttcaaagaaaactatatctttctgcataatgcatagtccctgtacagtacaatatttccaaacaaatctgatgtgtggaattcaggtgaaactgccacaccaaaaagtccacggattgagacaagcccaggtgggtagcacatagattttaaattgccaaatatcatcttacaacaagaaggacatcaagatgttaacttcaggatatattcccaaaatccaccttgatntcatttatttaaaactctggatcacaattgagagcatcagtcatttaacatcacagattttgttagaactagtgagaagaatcctagcagtggaagccctgggaataaaatctccaagtcagctcttaggaacttgatgaaaaagaacatcattattcagttgtactcttcctcagccttactacagctcaatgtatgctttgtatggannngcnntaataannngaatagcattcacagactttt

SEQ ID NO: 353120 - DNA, 355 bp, Homo Sapiens
  misc_feature (13)..(13): n is a, c, g, or t
  misc_feature (16)..(16): n is a, c, g, or t
  misc_feature (26)..(29): n is a, c, g, or t
ttatatgaatganacntctgttctgnnnnagatattatatgttgttgagtgtagttgtcaaagcaactagcacgatccaagtaatatagaaatcaccagcttgagttgggtctgccataacagcacctaaaacgtatccactaaattagtattaaatggacaagtaaaccaaactcagagggttgaaatgaagacttgtaatacccagtgaaaaaaaattattgaaactaccatctaaaattaattggaagcttaatattacctctaggaaagagtgtgggaaatgaggaaaggcaaaaggtaatgtgttcatgtttgttctgttccataatccaagaaatagataaacacaggc

SEQ ID NO: 353121 - DNA, 246 bp, Homo Sapiens
  misc_feature (209)..(209): n is a, c, g, or t
ggaaattcaggaggaaggaatgtaataactatcttcaagtatatgaatgacagtcatctaaaagataaattatgttgctttctgttactccaacaaatagaccatcagccagtgatgaaacctacaagaataaaatactcaagtcaatatgaaacactaactttgtagcagccttctgtgttcaaaggtaaaaaataggagggtaaaanataatatggaagatagacctagattaaatctcagtta

SEQ ID NO: 353122 - DNA, 847 bp, Homo Sapiens
ctcctgctgggcccattgcccatgaggaaccttctctggctgtcctttctgcattgctgctgcactcagagcaaagccacactgtggaggcctgtacacttcggctttgttcccatgaccttccctgccaggcgttcaggctgaagttcttgacggtagaactgcagtatcactattgtaccagcaaacttaacaagaattccttaatatcaccaaatattgtattcacacttccccgtgtgcaagtgtacttttcacggtttgattatttgaactgaggcagacgaaagtcacacatgtcactcttggttgataggtctcttaaatctgtttaatctacgggcttctgctccacctagctctcgtttattcttccacaatatttttttgaaggaatcggtcacttgtgccatagagtctctcatcgtctggttttgctgattgcatccgctgcaggcgtttagcaagctcctgtgtctcttgtttaagttggttgagcggtgagaccgagagccgtgatcacattcaggctcagctgattttggttctggcaggtccgcctgtgggcaggcttgaggtgctgtttattcccaacaagagatgtctggcaaccagccacctctctatgctactgtcagtcattgagaatatgcctggatccagcggccagtggccagcggcatgctcattccattcctcctttcgtctgggagctgaaattctcccaaagagggaagctgaccccaggcacagttcatagaggaaaggtggaatacatgttttactctttcctcttactcaccagttgtcaaaataatgatgagttggttttctagtgtcaaaaaaa

SEQ ID NO: 353123 - DNA, 445 bp, Homo Sapiens
ccaaaccactagtgccaaagggtcatgttgaaacagttcagaatatttattcgtcagaatataataattgccccccaccttagtatttttgcactttacagaaatttagatactgtttttcagtggcttgagcgttttgccttttcaaaggataactattattttcttgaaaatggaatataatcatgagaggaagaagatgtaaaaaatgtcaaatgttgattggttgtgtaaaagttttgtcatagacatgtattggggagcttccaattagcatacatagacacatgtgtcagtggccaagacctgcttatattttgctttatagatgtagtcatagcatgttgttattgcctcatgtaaataaaaaggctattaagttttccagtaatatttattaatctgtatgtgttttaaaataaaataacttatttctagctgaaac

SEQ ID NO: 353124 - DNA, 864 bp, Homo Sapiens
  misc_feature (747)..(747): n is a, c, g, or t
  misc_feature (760)..(760): n is a, c, g, or t
aggtgtgaaccaacacacctggctccccaaggttcagtttttatcctcctcttggagaggtgagtgacttgaggtcatttcttcacaagctccggtaggcacccacagtattgtcaaagagttttgtgttagggaagtgtccagttttgtccaagaggaaatagaagcgtcggcctttgactttcagaggtagcatggcagggacttcaccccggtgggccatgcaagatacctgcttcaaaggaactgtgaaatgggcccccaagccaaagggggcatgagtggtgagggtcacctgctgccctccagctcgaagcaccactgagcgcacagaccggagagagaagagaagaccagcaccgagtacgagggctccgatggcgccgcagccgacggccagaccgtagcgccagagcgcggagcgcaggtcgaaggggccacgatttgggacctccgcatccagaggctgcaccggaaccgggggccgggacacggctgccacagccatggaagcccagaagacgccctggcccgcgcagaacagcccgaggatggtgaagaagcggccccgatcatgctcaaagagcagcacatcccgttgcagcgtcgtgccttgcaggggccggcaggtgagcaggggccgcagcacggctagcagccccgtgggccatcgcctccaaggcgccgccatggccagccgacttccggggtggggcttcctgccgcagagccgccttccgccctccntgggcgcccccgntagagggcccgcccccctcgctcagggctgggaggagacaaccaatccagcacgcagaacacgaaatacaacatcactctttatattaaaaagtgcagaacacg

SEQ ID NO: 353125 - DNA, 350 bp, Homo Sapiens
  misc_feature (301)..(304): n is a, c, g, or t
  misc_feature (306)..(306): n is a, c, g, or t
  misc_feature (346)..(346): n is a, c, g, or t
  misc_feature (349)..(350): n is a, c, g, or t
ataaaataactgacaatatgaatctatacatagaacttaggaagtctcatctgcctgaaaatgactgtgtggatcccacccaaatccaactcatcctggtttgctgcacactggttcatcaaaagaaggttaccgaggggaaggaactaaaggtgtttgcacttcatgttactttttgagtttataaacataaaaacagaatttacttctgttacagacctagttactgggaattcattacttgccatggactacctttgctaagaaaagtctgaatgagaagatggcaggacgtctgaannnnanagttataattaataaaatctgcggagaattgtaaaaaaanccnn

SEQ ID NO: 353126 - DNA, 662 bp, Homo Sapiens
  misc_feature (75)..(75): n is a, c, g, or t
  misc_feature (80)..(80): n is a, c, g, or t
  misc_feature (94)..(94): n is a, c, g, or t
  misc_feature (113)..(113): n is a, c, g, or t
agcactggttcggagaatggctaaagcacgagcctcatctgtaaatgcagctcccacttcatttctttaatgaanatatntagttggaagactntcacaaagactgctgatanactatctgtgattgataggaaattttttttcttgatttctctgtgcagaacatgtaatgctgacttttcataaagcctggacttctactttatttaataaatcaatgtttgcaatggtaaatgaaacatttccttggacatgtatttgaaagtcattaaatacaaaagttttggaaattcaggaaagttagcaattatgtacggatattatacagaggaaagtagttatatttttaaatgctattattgcagaggatcatcaaaaaagaggtaatctacgtaatttcctattctaatgtctttttcctaataaaaaacttcaactttctatagggcgccacgacggagcacgcccaaaaaacatgtcggcccggcctcggcccctcgaaaaagtttcctagaaccatttccgtttgcgcgccccggggccccccgtaaggggtagaggggaaacatggggccccataaccttgtttttccctaagcgagaaaccccctgggttccaacggacctcacacggcccttgcgaaattttctccaccctaatt

SEQ ID NO: 353127 - DNA, 507 bp, Homo Sapiens
agtgataaggctcataacaattagagaaggcttcttattggtcttacacagaaagatacatcaaaagcagcatgactcaaaatgatttggaaaaggttaaagttagtgctctgctgaagtgcctttgatatagacttgcattattagaaggatataacatcttttttaagtgtgcattttctttcagttaaccaaattaaacagatgtgcagttttattaaaaatataaacctagtgtttcatgttggaacaataaatattgcatgggagtagtatttcttgttttttgaatacagtatatattgataaattgtttatgttggaatgaagttagaaactatatagcaaaacattatattttaagtgtttatttttcccacctttaaataaaaatgtttcatctcaccttggtaatgaaatacacatattggtataagggtataccattcaggtatgccacttattttattcctttttgtgtaagggaaatgaaatgatgtatccccg

SEQ ID NO: 353128 - DNA, 2135 bp, Homo Sapiens
  misc_feature (2108)..(2108): n is a, c, g, or t
ggggccgttgctgggggaatgcagaagcggccgcgggctagcaagctcccggagccggcggcgcaccaccatgacccagtcggtggtcgtacaggtcggccagtgcggaaaccagatcggctgctgcttctgggacctggcactaagggagcacgccgcggtcaaccagaaaggaatttatgatgaggcaataagcagcttctttagaaatgtggacaccagagtggttggtgatggtggaagtatttccaagggaaaaatatgttctttaaaagcacgagcagtcttgattgatatggaagaaggggtagtgaatgaaattctgcagggaccactgagagatgtatttgatacgaaacagctcatcactgatatttctggctcaggaaataattgggccgtgggtcacaaagttttcggcagtctttaccaagaccagattttagagaaattcagaaagtcggcagagcactgtgattgcttgcagtgtttctttataatacattccatgggaggaggaacaggatctggacttggcacatttcttttaaaggtgcttgaagacgaattcccagaagtatacagatttgtgacttccatttatccttctggtgaggatgatgtcataacctcaccttataatagcatcttggcaatgaaggaacttaatgagcatgcagactgtgtattgcccattgacaatcaatctttatttgacatcattagcaaaatcgacctcatggtgaattctggaaagttgggtacaactgtgaagccaaagagtctggttacttcaagttctggggctttaaaaaagcagcataagaagccctttgatgcaatgaataacattgtggcaaatttgctcctcaacctaacgaggctctgcaagatttgaagggtcccttaatatggaccttaatgaaatcagcatgaatttagttccttttcctcaacttcattatctcgtgtcaagcctaacacctctgtatacactgacagatgttaacattcctcctagaagattggatcagatgttttcagatgcctttagtaaagatcaccagctgcttcgggcagaccccaaacacagtctttacctcgcctgtgcactcatggttagaggaaatgtacaaatttcagatcttcgtagaaatattgaaagattaaaaccatctctacaatttgtctcctggaatcaagaaggctggaagaccagcctgtgttccgtacctcctgtgggccattctcattcgttattagctttagcaaataacacatgtgtgaagcccaccttcatggaactgaaagagagattcatgaggctctacaagaaaaaggctcaccttcatcactatctacaagttgaagggatggaagaaagctgtttcacagaagctgtgtcatctttatcagcactcatacaggaatatgaccaactggacgccacaaaaaacatgcctgtgcaggatttacccagactaagcatagctatgtgaaaaagaaaccctcaaaaatactttcttaatttcacattgttttttctgacctttctgtttcaacatttttgtaatttggaaactccagttttttcatattatcgggaaatatttttgtctaaaagagtgatttctgtttaatcgcaatttgttggtaataccaatgtgtgaaattagtgaaatcttagtaccttaacttcaaacatttctcttcagaaaagttcccttttctaaaattgagataacatagttcttgaatattttgctgtatttatagcctcatatttaggcatttatgcactgatgtgtcttcaataaaaatcttgtacagatatatttttataattatttataatttatattttgatattctatttaagttatcctgattctttaaaagtagttattgggagtagaagaacacaatataaatatttccgtgtaatagccaccaacttttcaggcataggttttattacaactgttaaggaggttttgcttcttctttagataacaacttgtttgcccaaaagaatcctaatttgtacacttaacatgtatttgtattaaactttttaaataattgctttcttatcaaaccaattgatnttataataaatgtctatatttttcaac

SEQ ID NO: 353129 - DNA, 987 bp, Homo Sapiens
  misc_feature (684)..(704): n is a, c, g, or t
agcggtgtagcggccgcgggctagcaagctcccggagccggcggcgcaccaccatgacccagtcggtggtcgtacaggtcggccagtgcggaaaccagatcggctgctgcttctgggacctggcactaagggagcacgccgcggtcaacaagaaaggaatttatgatgaggcaataagcagcttctttagaaatgtggacaccagagtggttggtgatggtggaagtatttccaagggaaaaatatgttctttaaaagcacgagcagtcttgattgatatggaagaaggggtagtgaatgaaattctgcagggaccactgagagatgtatttgatacgaaacagctcatcactgatatttctggctcaggaaataattgggccgtgggtcacaaagttttcggcagtctttaccaagaccagattttagagaaattcagaaagtcggcagagcactgtgattgcttgcagtgtttctttataatacattccatgggaggaggtaaaatttttcactcattttgcctgtaacagtgttaaaggataagtgggaattcattttgcaaacgtaagtcttgtttttagacctgtgcttgataaagatagaactattcggagggtgtgtagtttgagtatataaacatacacctttttatcttacaatttgtggacattatgtcactannnnnnnnnnnnnnnnnnnnnagttcttaatgtaagccctcttaagaagtcaccagacctatcctggcgaaattttttctcttggtccccttaaggtccttttaccgaacctttcagaagtccttctcaggagtgttttgagcactttggggacactggtgggtgtccccctaggagattgccctgtcaggcgctattcgctgaggtgagcgcactttgcgggcggcccgatgttgtgctgtccccagggtatttatcccctctcttgtgcctctctaacgcttctgtcgtcccggcggacctg

SEQ ID NO: 353130 - DNA, 625 bp, Homo Sapiens
  misc_feature (85)..(85): n is a, c, g, or t
aaatttcctaaaactttattttgaaaaaaatatatgctgtctttcagtatcaggcagagtaaaatattttagaatagtatataanatagtatataaacaaactgatagcaactaaaataattttaatggtacattcaggaatttacatttgaaatgacatttctggtcttttttttgcataaattcaaatgttacggttatgatccaaatatcaacattttgttaatgttacttattattttcaaaacagttaaaactaacacacgagattctaggctagagataccaaaaaatactacttcagtaaagtgctactgtagccaacatgttttaataattatttcctaaattaatttctgaaataataagctagatctaatgttagctactggatattataatgatgtgtcacaagtgctctgaaggttttgccagtaatcataactcataaagcattctgcaaattaaatttcactcaggatcaacatatatgaaaataaatacatgttagcattaactatacatttgtatagttaaatgattcatatcatttatttggtgatttcactatttcaatatctcaggaaaattggatccaaagggggatccactagttctagagcgg

SEQ ID NO: 353131 - DNA, 604 bp, Homo Sapiens
  misc_feature (14)..(14): n is a, c, g, or t
  misc_feature (65)..(66): n is a, c, g, or t
  misc_feature (91)..(95): n is a, c, g, or t
  misc_feature (116)..(116): n is a, c, g, or t
  misc_feature (207)..(207): n is a, c, g, or t
  misc_feature (212)..(255): n is a, c, g, or t
cttagaaatatttnattaactcttttaaaacaacttgtatactaacaactattgtattaatattnnccattacctgagaatatatattaannnnncccattgcaattatgcatttncaggtcaactttgtaattttgtcaggttattcattatacattctaaataatgagtcagtattaccatttgcatataagtccaagtactttntttcnnnnnnnnnnnnnnnnnnnnnnnnnnnnnnnnnnnnnnnnnnnnttcttacatggtcacaatttttctcatgaatctaatttctcatttagaataccacaggaacaaagcatgcttttgtctgtgccatcttgccagagaccactagaatcacacctatagtcaaagagtggcatgtaaagagttgtaataaggatgaacacaaagcatcaatgacggagggttatccataagagggtgctcaagaggacttcttataggatttgtgtttcttttaggtgatttcattgccattcaacaaagtgaggtgtttgtattggatgctgttaggtgaactcaattccatccttggaaaattctaatagttcttatctaggaggcagaaagaatagag

SEQ ID NO: 353132 - DNA, 163 bp, Homo Sapiens
gcctactactactatacggctgcgagaagacgacagaaggggtcaatgtattaaacctgcgattggatgttttactgtcattttgagagactaaatgtggggggcagatgtcaaaatacctgtacaatttgtaaaatgccacaattaaacatgagctggtttc

SEQ ID NO: 353133 - DNA, 477 bp, Homo Sapiens
  misc_feature (35)..(37): n is a, c, g, or t
  misc_feature (44)..(44): n is a, c, g, or t
  misc_feature (49)..(49): n is a, c, g, or t
  misc_feature (52)..(52): n is a, c, g, or t
tcttcctttttatatatcccatttattcccttagnnnttccttnttgtnttntttgggaaaccagctcatgtttaattgtgacattttaaaattgtacaggtattttgacatctgccccccacatttagtctctcaaaatgacaggaaaacaaccaatcacaggtttaatacattgaccccttcagttcctatatgcagcacccaatattcctttgaaatatgaaatagacctggcagtggccaacagtaaatttctgcccgctgcctcccaccaccaacggagttgaaaagttcaggtttagtgttgttgtagtggcacttgtccagaattggtacctccccatagttgggggactttaaatgtaccaatgaaaatagctttttccccttcaaggggaagaaagaaaatcactcctcaaaacccagcagatctggctgtgaggtctttcctcctatctcatctcttcaggctttcc

SEQ ID NO: 353134 - DNA, 502 bp, Homo Sapiens
  misc_feature (5)..(5): n is a, c, g, or t
  misc_feature (25)..(25): n is a, c, g, or t
  misc_feature (56)..(56): n is a, c, g, or t
  misc_feature (60)..(60): n is a, c, g, or t
  misc_feature (286)..(352): n is a, c, g, or t
aaaantggaaaatgctgggactttncatgaactttgtcttaagtgttgacatgaancatnctaaaaggctaaaacattttacagtaaagttattaaggttggtttaaaaacaactgcattagaaataatgcgtgtttggggggcagaatgcagatttttttaatttacaaagcgtgatcgctagcaaaagcattagtgctttttatctgcagtcttttttatgagctttacaaagtttttagtcagccttgcttgtcacattgcaaaacctagcttaagagcattnnnnnnnnnnnnnnnnnnnnnnnnnnnnnnnnnnnnnnnnnnnnnnnnnnnnnnnnnnnnnnnnnnngcaatagatagagaaattgttgacaatttctgtagtctttcctagttgtgatcaaattcagcctatggatggcctattttataccaaagatgaagtgacaccctattacagtccagaagatagaggttgttttcgtttcttttcttttta

SEQ ID NO: 353135 - DNA, 787 bp, Homo Sapiens
  misc_feature (765)..(765): n is a, c, g, or t
ctgatccacaagcaggaggagataatccagaagttcatggtcaagtagaagtgaaaactgagaagaggccaaacttcgttgatcgacaggcatccacagttgagtatctcccaggcatgctacattcaaattgccctaaaggtctcctacccaaattctccagctggtctttggttaaactaggccctgctaagtcttataactttcatacaggtttggaccaacagggctttattccaggaacaaattatcttatgccttgggacattgtcatcaggactagagctgaagatgaaggagacttagacacaaactcttggcctgctccaaataaagctattcctggaaagagaagtgcggttgtaatgggaagaggaagacggcgagatgacatagctcgagcttttgtgggctttgaatatgaagactctcgaggtcggagattcatgtgctctgggcctgacaaagtaatgaaagtaatgggaagtgggccaaaggaatcagctttaaaagccctaaatagtgacatgcccttatatattctgtcatcctctcaaggtagagggctgaaacctcattatgctcaacttatgaggctttttgttgtggttcctgatgctcctttgcagataatactaatgcctcaggttcagccaggcccaccaccatgtccgggtattctacccagaaaaaccagaaatcaccctttcacctgatgggcctttgggtttttggagatttcccttatgcatatgtggactgganagaggaacttggtttcccccct

SEQ ID NO: 353136 - DNA, 439 bp, Homo Sapiens
ggtgcctcaggttcagccaggcccaccaccatgtccggtattctacccagaaaaacaagaaatcacccttccacctgatggcctttgggttttgagatttccttatgcatatgtgactgagagaggaccttgtttcccccctaaggaaaatgtgcagttaatgagctacaaggtgctccgtggggttcttaaggcagtaacacaataagtgttttccagccagttcaatcctatacttgagctggtttttgtttttggtatttgtggctgtgtttttggtatgtgtttactgtgttttcccaaatccaaaatgtgttttggttacaggagttcagtatttggaaactaatttgttctactttttcattatattgttgatatttattgtaaacgtgactacaactttctaataaagattggttgttctagaaaagaatat

SEQ ID NO: 353137 - DNA, 421 bp, Homo Sapiens
ctcggctctaccttgtctccatgattgtgtataatcatggagacaaagcttattgttttaaatgattttgtcaaatactagaaagtagttcactgagttaaaaggtttcatacaggtttcctaaaaaccatttggcttagatatagttaactatctgtgaaactacttgttattatcctctttactattgtatgggtttggttggattttgtctgttgaacacagatcctctgattttatttcgattttatttgaattgctttctgtaatattcaactacatggaaattgtgtttaatttgggcttatgtagagtggtccatagactttgagtgtgtgtttgcggttgctgttctgaagaacagaagtagccaagaagtagtctgaaaaagtaggaccataaaaaattagactggtagaac

SEQ ID NO: 353138 - DNA, 1090 bp, Homo Sapiens
tgcactgtagatcgctcccccaagcaggtgaggagtcggggaggagaaagcgatgttaaaatgaaaactcactgcaaaagaggaggcagaggaagaaggaatgtaaaccccttaaagcagatgtgtgtggggccttatgaagaccaggattctgcgggtgtcaggggattgcccctcttgacagagactagggttttagactgaggcttcctgcagggtgttcgcattgcccttctccgttccccttcagacctttctggggagaagaggtcggaggaggggagaaagactgttcatcttattctgaatcctggagcagctgaaggttttctcttgagtcaggatgcagtggtaatgcattaaccagcaagtgtggccaaggataatgaaaaagtgggaaaggaaggtcctcctcctccctgattgtagcatccagcagtctctgtagccaggttactcaagaaccacatttgatttcctggccctttgccttggcagtgatggcatttttatttcactgtgttttaaagtcttcatttatttttataacatgggttagggagaagggccacaaatggagggattgtcctttcaagcaccacagcttcagataaaattagtactttcaaatattgtccactttaacttaaaaaattctagagggattatattggagactcaactgcccttggttttagtttataaaatggcctagtactgtggaattttaattttagaaagtcttagcatcagatcataaacattcattaaaagaactcacatcccatctgaaacttcccaggggagttgggattcttagtagattggtagaaaggggctcattttctactgcatttcccatttttggtatcttgttcagcatgttttatttttatttcttgtctgcagaacatcctatatttatgagaacattctttaagaagaccaccacatagaataccccttcctatcagctcgctctgatttagccttaattttgttaaattttttagagatgaatgaagtgctgctgtggaaagaaatgtacatatactatttctgtatcattaaaattacatttttatggttc

SEQ ID NO: 353139 - DNA, 894 bp, Homo Sapiens
  misc_feature (201)..(247): n is a, c, g, or t
  misc_feature (327)..(343): n is a, c, g, or t
catacagtattatagtaatgctactgaagttattcatcttctagtatttttaagaacaaaaaataatttaaaataaaacaaatgtatacattaggaaattgggcagacattggtgtacttaaatgtaaacgctacccattccttaattcacagccctgtaggaaagaagactttccttaagagttaaggggaaggatattnnnnnnnnnnnnnnnnnnnnnnnnnnnnnnnnnnnnnnnnnnnnnnncataatcatagttttaaaaacatgttacagaggaagtagcaccaccccctcccccaataaaaccttaaatttttgctgtnnnnnnnnnnnnnnnnncaactccctttctccagaaaggaaatgaaatggcttgtcaaatggattctattcatggggcaaacatggagatgcgacccttcccttgattactcatctcatgctttataagaatctaaacacaaataggaaacacgatgataattttaacatcctattagtatatgtaattgtaaggattattaaagaagatactataaaccaataattctaccaatgctccttttaataaataaatatcactttttaaattaaagggaaaagagaatacccattcaataacctatttatatatatgtgccactcattttaaatctgcatatttatttcaaaaaatgagcaagtgtgttcatctatatcgtctcacgaaattaacactgaccttacaacatatttcatttgtggacaaagacacagtaaatgtgaggaaactacagaattgctatgactggagctaaatgaatagctctgaagtcagtgtcccatatttgcatatagatattcagaccaggcttgaggccaggcgtggtggctcacacctgtaatccgct

SEQ ID NO: 353140 - DNA, 431 bp, Homo Sapiens
  misc_feature (16)..(16): n is a, c, g, or t
  misc_feature (28)..(28): n is a, c, g, or t
  misc_feature (51)..(51): n is a, c, g, or t
gtttttaaaaaccccncccccctaaacnccctaagggaaagtccttccttnccccaacagggctgtgaaatttaaggaatggggtaagccgtttaccatttaagtacacccaatgtctgcccaatttcctaatgtatacatttgttttattttaaattattttttgttcttaaaaatactagaagaaaacatagatgtttctagtgcctttgaacttatactgtagtctgactaatttaatgaataacttcagtagcattactataatactgtatgctggccaaaattacaaattacagtttgttgcatcagtttcaaaagccatgctttcattgtattttatgtataaattgtatttgttcaagttgtatatattggtattgtatgtatacatgcagcatggttaaataagaataaaaatcttttaccta

SEQ ID NO: 353141 - DNA, 512 bp, Homo Sapiens
gccactttgccactttgcagccctcatctcatgttctttgtagcggaccgagtgggtttgctataggcctcgtctgactttgtcttgcgtcttttctctgtggactcttgaggacgcctgagccccagccctgcccctgaccagcctcccccttgggtccaggggtctttcggctcatattgcagggcctgccaatgccttcacgcaccccttccccaaaggtgcccggcagggaggcagggcctcccccactcagcgcaggtcaggctaaggccagtcggctggtcactatgcaatgctgccctggggaggctccctgagggcacagtgggcgctggacccggccccccaactctcttgcctgctgcctgtgaccctgaagaacagaattgattcttgcccctctccctgtgtgagcttggccccgcctcttgccccaggcccctgctggcgggtctcaccccccacccctcgctttgaataaagcacttgcgcccactgcctgctcctgg

SEQ ID NO: 353142 - DNA, 931 bp, Homo Sapiens
gaacatattcagactatttcctgcccttggaatctgaccttcagaaggattaacgccaaactaaactgacctgaaacagttttgttactattggcattccttgactaaaaaggaccacctgatgctcagtcccgagagtaggaatcgtggtttattatttttcatatccataccacctagttcagtacctgttatagagtgtttaattgctgatactaggaattaagggattttttaaaagtagcaaatagtttaaggaacaatcaaaaaatgaattttctaattcagttttttcaatgaagtcccatcactgaactttataatgtaatgtttattaagcagacatccccttaaatactcagtttctttggagagagcaaagcatatctctctgtggaaattatatataatgcctggtattttacactcaaagcaaggtgttggccagaaaggtaaagaaatggggtctatgtagacttaatatcactagtctaagtgtcattttgagcctagtagcactaccttccaagtgagtcacaacaaatttgatcctatttggtatgtttttgtccactgttatgattcatcatgtatcttacaagagccactcaagcaagactctgcttctatgtatggtgaggccttgttgttctaggctagaataaactctttgtatgcctcattgaatatgccaggtaaaatatatgcagtcaagaatgaattatttttctgactaaagtgtgtagcagtagttcaaaattgtgcccttgttttaacagtttctgtcaacatcttctcatttttccctacaaaaacaccagggtgtattataagtactgcctgtgagaatttgcactttatgtatttgtgtgtggatttcttgtggttttagccaaatgaagtgttatcagtaataaacaggtctcttcat

SEQ ID NO: 353143 - DNA, 293 bp, Homo Sapiens
gcaagagaataattattttctttattaaaaaagaaatactggatgctaagtccaaaagacataaattattttatactaataactactaatattttattcattaaaatataaaggtcaaagatttcaaaatgatctttaaatgactaataacatgttgatctttttcttctttctgtaaacctttttgagtctaaaaaatactaaactatacaagcatattaaatagtatataaacttggattaaaatattcaaatttactagaatgtggacattggaaagaatgaaaataaac

SEQ ID NO: 353144 - DNA, 1089 bp, Homo Sapiens
  misc_feature (33)..(33): n is a, c, g, or t
aaaacagctattcactgaagtcttacaggaganttatttttggtgcatcttctacgcatttcttcaagagctgctctttctctctcagcacctgcttaagtcttcttatttttcatctcgaatggttcttctaactccggtggtgtcactgggaaaatatcttcggtataatttttattgaagaaatgactttgttcataagctgcatttgaattcaaagtgcctttctcttgcttctcatgggtatagtattccatctcagttctcttttcttgtctggttttgctgtgactcgtgagaatgttatgttgtgacacatctgaagttggtaaaatactgcttaggagttgggaaccggtgacattagcttccccatttatgattgcgttataagcattctctgtttttctcttctttatgtgatccatcttcttattagtttttgcttttcttttcttatcaaaattctgctgttttctctctccttccttcaccataaactctgtctctttgtaagtaccactctttaccaaactgctaaaggaatcgaaaccttctccagaggtcaaatggtcaggaattcgagtaaggcacactctcaaatccttagtaaggccaaatatctttttaaattcagcatcactcttcagatgtaatgccttattacttcttccttgagaatctttcttgtcatttcttccttgggcacctttatctgatgttgatgccatctcattatggatcaacgcgaggcgttgcctgaattttcctctgcgggtttcaggaagaccctccgtaggttatttgacattttagtggggagaaaggggacacctcatccagaaaagtgggaagcgtggggccgagtttcccaatggggcgagaaccagagcgagggaatgttgggctggagttgcccacagcaactgtgaggggttcgaccttaacggagggcgacagcgggctctcgagagggtgtatccccaggcttcgggacgaggtcgcgcaccgcgcagaaaccggaaggctcctggcggtggactgcgccctcacagccctacgctgagagagaatcggcgtgagtctccc

SEQ ID NO: 353145 - DNA, 1002 bp, Homo Sapiens
  misc_feature (314)..(314): n is a, c, g, or t
ggaattcccgggatcagtccaccgccaggagccttccggtttctgcgcggtgcgcgacctcgtcccgaagcctggggatacaccctctcgagagcccgctgtcgccctccgttaaggtcgaacccctcacagttgctgtgggcaactccagcccaacattccctcgctctggttctcgccccattgggaaactcggccccacgcttcccacttttctggatgaggtgtcccctttctccccactaaaatgtcaaataacctacggagggtcttcctgaaacccgcagaggaaaattcaggcaacgcctcgcgtntgcgtttcaggctgcatgtaccaagtagttcagacgattggctcggatggaaaaaatcttctgcaattacttccaattcctaagtcttctggaaatcttataccactagttcaatcttcagtcatgtctgatgctttgaaagggaatacaggaaaaccagttcaagttacttttcagactcagatttccagctcttccacaagtgcatcagttcaattgcccatttttcagccagccagttcttcaaactattttcttacaagaacagtagatacatcagaaaaaggtagagttacttctgtgggaactggaaatttttcttcatcagtttctaaagttcagagtcatggtgtgaaaattgatggactcaccatgcaaacatttgctgttcctccctcaacacaaaaagactcatcttttattgtagttaatacccagagtcttccagtgactgtgaagtctccagttttgccttctgggcatcatttacagattccagcccatgctgaagtgaaatctgtaccagcgtcatcattgcctcctttagtgcagcaaaagatacttgcaactgccaccacccagtactctagaatggttggaggccctcccaaatgcccaaccggtatttaaggaaccccccgggaaaaacagggaaaaaaatggaagttacccaagaaacttttcaaac

SEQ ID NO: 353146 - DNA, 471 bp, Homo Sapiens
atggagagtatattcctttgtttcaaatttgggtaactctcctgtgtttcaggaacagctctccctattttttcactgccatcttcaggcttcctagccaggctccaaacaaatgtcatataagaaagaaagattaattattacatattgtgtattgagagtttgtaccctgtggttctcatcgtgctgttaattttacttttcttgccaaacaaaaataatttgacattgattatgtgctttttgatattttcaagggcaattattaaggttatgagctctgtcttagggcacttgatgccttatatgttaatagcaagtgtgtcatatcattttaaaataaaactattcaaaggctttattgtgtttattaagcttaatttaaattggaatctgtaatgctgatttggtcttttaaaattatatttgaaattatttgtccaaaaaaaattaaaatgaatatttacccct

SEQ ID NO: 353147 - DNA, 387 bp, Homo Sapiens
ttctaaaacgagtccagttctagtaacctaaagtaaatttgttaaccaaaatgataggtaaaaagatctatacatcttaatgaaataaaacattcctgcttttagttattatgtatgtacaccatatatgaataaacagtttccaaaaacttaaaatacaaaatatattttaccaaaaattatactgaatataatttaaccttggggaatccagaatacttagtattttcacatgaaactacaaatcatagactctgacactttgatttttaaagtactctgtccataaaagatttgtactgtttagatgggagaaacctctagagagagtaaaaatgaattacactgtatcttatatgaagtaaaaaataaatcagaggtgagaat

SEQ ID NO: 353148 - DNA, 649 bp, Homo Sapiens
  misc_feature (505)..(505): n is a, c, g, or t
  misc_feature (567)..(568): n is a, c, g, or t
caaatagactatatactccattgaacgtttaataaattatattcaagtatgactttctttaaaaaagagacaaaattataatgcaagtatttattaaaatgctgacaatttaaacatcctctgaattatatgaaatacttatttacttttgtgaaatgcgttagtgaaaatctaggagtttctatgtaaggctgagcattttcaacattcctggcctagatgagaaaagaatgcattctcttactggtactcaggaaatatttatacaatacacttgggttctacttgctggtgtgtggagactaggctagcacccatgactggctgggctctagaaaacaagcatgcagtgctcctgtgccatctgggacccaagagacaaaagtctgatctagggtgaagctacatgcagagggtgaagaggactataccaacagcctcacttgtctggaggagcaaaaggaaagccgtgcacagatattgctttgacctttaatatttgttnagtgtggcccgatagaatcccggtgtcttctctcacccgttccctgtcagcctttcctaagnnttttctctcaaggcaattggccgaaaattttaatgcctgctggccctggctcaagaattaaaccatcagaacatatccatt

SEQ ID NO: 353149 - DNA, 489 bp, Homo Sapiens
  misc_feature (478)..(478): n is a, c, g, or t
  misc_feature (483)..(484): n is a, c, g, or t
  misc_feature (488)..(488): n is a, c, g, or t
atttaggtgctatagctgcttgtacaccacaatggcagaggtgaatagaaaccatctcaaagcctaaaatatttaccatacatcccctcacagcaaaagtttgctaatctcgggtttagggactccattgagaattaaagtttaagatgcgtggctgccacccggaattgaccataataggcagaggaaacgtggacacccaatgttagactgagtacaactaactaattaaagcaaaaaactaaaacattatattgtggggtttgtaagtacatgggtgcgaagtatttgaaaacaacggcaaaaatgaaaaagaatttgaaattgcacaaagccaaatttcttatattttacattaagtgactcaatattaagtagaataaaaatgcatattgtaatctcttgagcaaccacaaaaattttaatacaaagaggagcatttaaaagccaatagagagataagaaagaacaagagggncgggnnagtng

SEQ ID NO: 353150 - DNA, 2531 bp, Homo Sapiens
  misc_feature (2483)..(2483): n is a, c, g, or t
ccaagccctgcagaagaccctccggagggccatcggcaagagccggccctactttgagctcaaggcccagttcagccagatcctggaggagcacaaggccaaggtgacagaactggagcagcaggtagctcaggccaagacgcgctactccgtggcccttcgtaacctggagcagatcagcgagcagattcacgcacggcgccgcgggggtctgcctccccaccccctgggccctcggcgctcctcccccgtgggggccgaggcaggacccgaggacatggaggacggagacagcgggattgagggggccgagggtgcggggctggaggagggcagcagcctggggcccggccccgcccccgacaccgataccctgagtctgctgagcctgcgcacggtggcttcagacctgcagaagtgcgactccgtggagcacttgcgaggcctctcggaccacgtcagtctggacggccaagagctgggaacgcggagtggagggcgccggggcagcgacggcggagcccgtggggggtcggcaccagcgcagcgtcagcctgtagccgaggggccagggttcctggcttgaatctgccaccacgggccggttggggcccacagtcttctcacgccctctcctctggggcctcgtcttcccgaaggtccccttctccagtgcttccctgggagaggccagctgtgttcgagtcctctgtgcctgccctggcgttctcacagcctcccccttcccctcagcaggcggctctctttgccttacccattcagaaggctcgccctcggcgctctgtctgcctctgcctgccagctcatcacgatctgcagggcattgaccctttgctttccctttctgctccctctctttccatctgtttggctttttccctcagggaacttggtctagaaggcactgggaagctcatcagagaaaatgggtgctgggcctgagtactcccgtcggaggggatggacagtcacccctcccgttggtttccagccccgccccccttcccaaggcaactctggagggtaccctaggtatgctgctgagccctgccccccgtcctgctccagcctgcccgtgtgtaacctgtaagatgtactgtgtgcctccggaagacaccacctttcccttcagcattccctttcatgacctgaggcactctgcgatgtgtgccccaaagcagaacttacagggcctgcaggaagctggtgtcagggagagaaacccaaccccactgtcaacatagggagcatcaccaactccagactggctcctgtgggtatggtgtttccgctgggctgggtcctcaacattgccaaggtgctagtgggtccctaagagggcccatgttgggggtgaagtcatgaggtcctgaaggcttaggcccctgtcattcccaccctcactcttgctgcacagttgtgtttactttttctgggtagaggatgctgaactgactcagcaccctcctgcaggacggggttagggaatttggtgctcaattgctctcccttgctcttccccaaactgaaaatacctactgcaggatccctcggggcacactgaagcttggctgccaaccctcttacttcctttgttacagggaggggttggcttggggtgaaaagttctgccctccgcagggagcagctccagctgcctggcagtgctcccagtttgtagggaagccacaccagatctgggtgccttgggagaaccagtccttccttttgacccaccccaggaagatggagtgctcttttctaggcccatgttctgccagcaaccgggatgcgtgggcaactggactctgcacgggggtctacaggttgagggaggttggtcacaatgagaacctcggggtttgaggtggccatgggcagacagccgaaagggagggagggtgtgggtgtgcgtgtgtgcatgtgctggtgtgtaagggggaaagggtctttcctggttttatttaaataaagtagtttatgtaaccaaacaacaaaccccatccaaacatccccaccaagctctggttgctgaacaaaactcaaccataagggggggcccgctcctaaagaattccccccggggggcccaaagtttaacccgtaccccgtgtttttttgaaaaaaaggggccccaaatagggggagccggattaaaaaacctaggggccggggccggccgtttttataaaagctccggaacttggaaaaaaatctgcgaccctttgggaaccttctttggaaagggaaccttacccttcccggggggggcggccacaactgtggaaacaactatccctcacctaaactattttaaacccgccaccagggacaaaacataacaactgttttttaagcggcgtcaaaaagaggcttaagacagtccacccccacctaattggctgcacgcgtcttagacggatatttacaccttcacccgacgaaccggctctattgtgggnacaaagttgcacacgctcgccgtccgccctagtattcacccttcccct

SEQ ID NO: 353151 - DNA, 2785 bp, Homo Sapiens
  misc_feature (405)..(405): n is a, c, g, or t
  misc_feature (409)..(410): n is a, c, g, or t
cgcgggatcagggccctgggagggcgggcgcgggatcagggccctgggagggcgagcgcggcgaggggcgcatgcagggccccgacgcgccactgctcctgagcgcgagggagctggggcccgggcgccggggctcggcctcctggtaccgccaggagggcggcgcggtgtgcaactggctgcggaagccgcagccgctcgagccacgcaccagtttcccctcggcgcgccgctccgagttccgtccacccaggaggctgccatgggccggccctgcctccgcccagtccgaggagggtcacgcaggcggcagatgccaggcgggcagccccgcccctgcgcgccgcctcagcggcgccttcaagacgctggtcccaggcacccacgcccagggcgcctcggatnattnnacccacaaacccccacacaccccggtcctcaataacccctctccgcaagatggtttcccggtcctctggcgaggatcctccaaggcgtctcacatgaaccggctcagaaacgccaaaatctacgtggagagagctgtcaagcagaagaagatctttacaatccaaggctgctacccggtgatccggtgtctcttgcgccggaggggctgggtggagaaaaagatggtccatcgctcaggccccaccctgctgccaccccagaaggatctggatagctcagcgatggggtgacagtgacaccactgaggatgaggatgaagatgaggacgaggagttccagccatcacagctgttcgacttcgatgatttactgaaatttgatgacctagatggaacacatgctctgatggtgggtctatgtctcaatctccggaatttgccgtggtttgatgaggttgatgccaactccttcttcccacgctgctactgcctgggggctgaggatgacaaaaaagccttcatagaggacttctggctgactgctgcccgcaacgttctcaagctggtggtgaagtctgagtggaagtcataccctattcaggcagtagaggaagaggcctcaggagacaagcagcccaagaaacaggagaaaaacccagtgttggtgtccccagagtttgtggatgaagctctgtgtgcgtgcgaggagtaccttagcaacttggcccacatggacatcgacaaggacctggaggccccgctgtacctcacccccgagggctggtccctcttcctccagcgctactaccaagtggtccacgaaggggcagaactcaggcacctcgacactcaggtccagcgctgtgaggacatcctgcagcagctgcaggccgtggtaccccagatagacatggaaggggatcgcaacatctggatcgtgaagccaggagccaagtcccgcggacgaggcatcatgtgcatggaccacctggaggagatgctgaagctggtgaacggcaaccccgtggtgatgaaggacggcaagtgggtggtgcagaagtatattgagcggcccctcctcatctttggcaccaagtttgacctcagacagtggttcctggtaactgactggaacccacttaccgtgtggttctaccgcgacagctatatccgcttttccacgcagcccttctccctgaagaacctggacaactcagtgcacctgtgcaacaactccatccagaagcacctggagaactcatgccatcggcatccactgcttccgccagacaacatgtggtctagccagaggttccaggcccacctgcaggagatgggtgccccaaatgcttggtccaccatcatcgtgcctggcatgaaggatgctgtgatccacgcacttcagacctcccaggacaccgtgcagtgtcggaaggccagctttgagctctatggcgctgacttcgtgttcggggaggacttccagccctggctgattgagatcaacgccagccccacgatggcaccctccacagcagtcactgcccggctctgtgctggcgtgcaagctgacaccctgcgcgtggtcattgaccggaggctggaccgcaactgtgacacaggagcctttgagctcatctataagcagcccgtcaccacttccccagcctccacaccaaggcccagcctgccttctccccatgtactccgacaccagggccaggtcctcagacgacagcacagcaagctggtgggcactaaagcccctgtcgaccacaggcaaggcccttgaggactctaccccacggctaaggtcttcatttccctcccaccgaaccttgatttcagggtggcacccagcatcctgaagccaagaaaggtgggcctcgacctgtgactcacacccagtggacagtgctgagcacggggtcagggctggagggcacaggcagagggcagctcccaggctggctggcaccccaagggaagagctggtctccctcagaagccccttcctccacagacttctgatcatctccctcttctcccctcctttcacaccgaggctcctgctctcctgtgcctccgaggcccccagctggaagtgccttgttgcctctgccctttgaagtcggaacaattcctagcacctgtcggaaggtcaaggccaaaggcaaattcaaggccagactgtgacaaacccagggctgaggcctgccccatgaagaggctgagccccctgaaacccctgccccttgttggtacattccagaggcgcaggggcctgggggatatgaagctagggaagcccctgcttcgattccccactgcccttgtcctggatccaacaccaaataaaaagaaacaagtgaagt

SEQ ID NO: 353152 - DNA, 683 bp, Homo Sapiens
  misc_feature (62)..(218): n is a, c, g, or t
tccatgctggtacggccggcgtattggatatcgtcgaccgcgcgctcgcgcacgcgtcggcnnnnnnnnnnnnnnnnnnnnnnnnnnnnnnnnnnnnnnnnnnnnnnnnnnnnnnnnnnnnnnnnnnnnnnnnnnnnnnnnnnnnnnnnnnnnnnnnnnnnnnnnnnnnnnnnnnnnnnnnnnnnnnnnnnnnnnnnnnnnnnnnnnnnnnnnnnnnntcagccaccgtgaccagcctgaaacaggagcaagttctaaactcaggctctagagtcagaaaagtgtagagtcaggttctggatccaaaatggggcaagtcctgatcaggttctggaaccagaacaggcctcaagcctaggggctgagcagggtatcccctggcctgggagcagaggacttctggctgactgctgcccgcaacgttctcaagctggctggtgaagtctgagtggaagtcataccctattcaggcagtagaggaagaggcctcaggtaagtactgtggttacctccactctcccacccattaatcctccacccatccgcccttccacctatctgcccttctacctatctattatccacgcacctactggttatccacacatctgtgtatgattcacatctacccatctgtccatccatccaccagccatcatccatctaatccacccacgagtaaa

SEQ ID NO: 353153 - DNA, 634 bp, Homo Sapiens
ctcgtgcgaattcggcagagggtgagagcagggcctgagaaaaggcagccacctcctctccctggctgaacccctgccaccctactcctcaccagaattgtcagtggcctttcaccacagtggtccttcctgcctgagccctgcactgtcccagaccacacagaagtctggtcacctctgggcgcctgggatggtcaccgaagagaagcacgctgtccccgtctctcctggcttctgccagaaaatcgaacaagtgcaattaacacactgttactgccgaagcctgaaactcccaggacttgtccttgatccttccagaaaccaccaggtccggcacttggagccccccggagagggacctcccagccgagccctcaaagaactccatgaaatcaggaactgcttgatgaaatgtatctccttgtacctggaagatgaagcccaaacacccacacctctgtctcccccagggctcgggatgtctccagcagcccggccacgcagcttcccaggtgggctcggggaggtgggagcagggaccatctctgtcccctccaccctcactccatccacctcggagaccaccctcccccagccagatacggaataaaactacagacgcagacgtcggaat

SEQ ID NO: 353154 - DNA, 466 bp, Homo Sapiens
  misc_feature (126)..(126): n is a, c, g, or t
  misc_feature (129)..(129): n is a, c, g, or t
  misc_feature (455)..(455): n is a, c, g, or t
gagcaggactcttctctccctggacgcctctcccctggtctggaatcttccagttctgccagaattggcctttcccagatgctgcaaacttccagttgaacccctttttctgtgtggcccctgggntgncgagaccaaaatccatgagttctgtgtaccctagacctttggaaggtgagagcagggccctgagaaaaggcagccacctcctctccctggctgaacccctgccaccctactcctcaccagaattgtcagtggcctttcaccacagtggtccttcctggcctgagccctgcactgtcccagaccacacagaagtctggtcacctctgggcgcctggggatggtcaccgaagagaagcacgctgttccccgtcttttcctgggttttggcagaaaattcgaacaagttgcaatttaacacaatgttaattgccgaagcctgaaaattnccagggatttt

SEQ ID NO: 353155 - DNA, 1097 bp, Homo Sapiens
  misc_feature (5)..(5): n is a, c, g, or t
  misc_feature (23)..(23): n is a, c, g, or t
  misc_feature (58)..(58): n is a, c, g, or t
taacntgtgaaaagaaataatcntccccctaattaccatatagaacataacacttagnaaaatattcctctgtgtcagctggaatgccttcagctctaagtatcagacagccctaagccaaataaaaaacagttattgagggttataaaaagtcccagtagagaacaggtatagagagcagagtagctcggcaacgtcacctctgagctggcttttcccaccttgtgcactgttatcttcaggctactgcccttcagagataaaaacgataagccaataccatgttacagacatgaaaaagcccagcagagtctcttctcatgtcatgacaatgttgtatcaaggagatctttcccagaagtactacacaatacttcccaaacatctcattgctcccaagttcaccccaacagaatcattaaaatggaacttccatgattagctttgactaatctggacttaccacctaagtcatctgggagaaggatgcacaaaaatataaaatttagctcagcaaggatgaagtagggaatggccatcatgtgggcagtgtctcttagaactgctgaccaatgtgttccaagggggcaaaagaaacaacaggacaagggaggcagagatactctaaaatactaatacgcagaactagtgttacatagaccgtgcccaaacagatacacaatgaaaaatcaaggatatcaaaagggcctttcattacataccgccactttttgaggagtgcagtgttactgcttgttaacctttgcataatttatgtaaaaaccattcttattaacaacatttacattacagaatgacccagaggtagctgaaaaacctcagaaaagtactgtttaacttctttactgaagtgatagttcaataatggccatattcatgcatatatgccaggaaacagtcagaggaaaggtacgtgatatagttctttgtgaaataatatttcactaaaaacatatactggccaacctacaaagagactccggtagtatttagagtaggacagattcagaggtagttaaaaacctcacggaaatatttttggcttctttcttgaagacgtggttcagctgtaaatg

SEQ ID NO: 353156 - DNA, 599 bp, Homo Sapiens
ctcgcgaacgtgttatccgggcggcggcgtcggtacgaggcgcgcgctcggggtcccggtcgcgaggaggaggaggatgtggcgcgcggaggggaaatggctgccgaaaacaagccggaagagcgtttcccaaagtgtattctgcggaactagcacctactgtgttctcaacaccgtgccacctatagaagatgatcatgggaacagcaatagtagtcatgtaaaaatctttttaccgaaaaagctgcttgaatgtctgccgaaatgttcaagtttaccaaaagagaggcaccgctggaacactaatgagagatcatgatgcagccgtccttttggatttctttttaataatgtgtgacccttcacctttgatcccctgacctgcattaccttggtaaccatttcatcttttaattcaatttcacttcttcattttggtgtacaagctgtaacatttcatctttcaaagtgtaacacgctgatttcctcaaatagagatacccctttgagtgataaatttgcaaaatgctgtcttcattttctgtattaaaattcatttcagttttaaaataaagtgtaatctgtgttttcatccttat

SEQ ID NO: 353157 - DNA, 254 bp, Homo Sapiens
ccaattactggaaattccaaatttgggaacttttgatacgatcttgtgaaaacactgtattttcgactgaaaattccactttcttcatcttgttttttagctaaaaagagggactgttaaatacaatgtatgataccatgacaaaaatctttcctgaattgtctttgtaaaagtattattgaattttcaatttgtaatttcttttgaaaatgaccatgctcgaataaaaatgtagccaaactaaataaaaaaaa

SEQ ID NO: 353158 - DNA, 837 bp, Homo Sapiens
aattctttagctttctccacttctgtctcccacatatactaaaattcttaggtactaggctgtgtgtcttgggatcttaagatcaatgaacctttccccaatatctagtctttgcaaattctagtagaagatttccacagtgaaatcagtgagccagaccaactctacatctcctgcctaacctactgcctaagtcattagggctgagggctcggctgtaggggcttccttaggctgagagtgcccccaggctgacatctgtgttggcttttgttcagaaccattactctggcacatgctcaatggtatattgcagggaggagaggagtagatttagatttgagtaaatgccaatcactttacacatgaaggtgggtgggactttccttccattcatcccttgctctcttggatctgaactcttctggagcctcagctcaggatagctgctggccactcctgtcctgtggattgtgcaggtggcctttcctcccaaaagaaaaggcatcaggctccccaagccccacagctctcctttccaccaaagccaggtttcctggtaaggtcactcgaagataagggatggggatgggggctgactgacaaaaaattttagccccaggtctcagtacctggctggggagggggatatttttccttccttaagtagttttacattgccacagtgtgtatgtgttcactatataaaatgttcctctgctctttgaaagtaagagtgttgtgtctgtacaaatccttttaacatgcattcattggagtaaattctgagtatctactgtgtattggataatacaaaagatgtaatgtcatttacaa

SEQ ID NO: 353159 - DNA, 448 bp, Homo Sapiens
  misc_feature (28)..(28): n is a, c, g, or t
  misc_feature (73)..(73): n is a, c, g, or t
  misc_feature (91)..(91): n is a, c, g, or t
gtgagaaatgctgctatcatgttttagncctgtgcccttaaagagaagtatagaactgttagctatatgcctncttccacttgattctctnccaaaaattaaaggaatggagaaggacttttttattttgcatttaaaataaagtaggtatggtatctctaagcaggttttaaaaactaggcagtttattgtcaggcttagtattaaattaaatgtatagccatgaatgattatctctaaatcaaattagtagggaatctgagtctataatgaaaggacatttaaacatttttactattaactacaaatataatgaaaatatatcaatgcccagatccttttacatgaaaaacaagcttgataaacaatgcacagtttcaaaatagccaccataattgctgagtactttaagaatctagctacaactaaattagaaattttattaata

SEQ ID NO: 353160 - DNA, 493 bp, Homo Sapiens
  misc_feature (209)..(209): n is a, c, g, or t
gcatgacatatatagattaactgtgactaaactttacttccgtaacagtaaatattacttaacccattcctgaaatataaagctcatacacaggtcagggaaaaagtattctaagtatctgaatggagaaaaatctagagtgactattttagatgactgtagagggcagcaaagcaacagtagtatcctcaaagaaaaacatgtatttntcttagggaacgtcaaatttgttttatatttcaagagatgctgtcaggattaaagcttttgaaggaaaaggggctttggggcatgccaaatacaaatttcaccagctacttatatatttaaacatttttactattaactacaaatataatgaaaatatatcaatgcccagatccttttacatgaaaaacaagcttgataaacaatgcacagtttcaaaatagccaccataattgctgagtactttaagaatctagctacaactaaattagaaattttattaata

SEQ ID NO: 353161 - DNA, 1080 bp, Homo Sapiens
agtactgttcattggctctgtcagcatttgtaattgtacatttattcatcaggtatttatagtgaatcatactgtaaaaaagaggtagcatgatatgctggaaagcatattagactaggagtcaagacctggtttctagtcttggttttgccattaatgtgctgcatgatcttgggaaaatcatttaccctaaataagggtggtggactatcttgaagaaccctttcaactctaaaaattgaccctatcaactggagagcccacaaggcatagggaatagagaaaagggaaatgttttcagttttcttttttattttggttatgcttaaatatgaatgtaattaccaaaagatttagaagtgcatgtgctttggaggatttgtattgagcttttacagtattcatttttcaactcaaggcaatggctttctacaccaactctaatccataaacgggtcttatgacatctatgaagtagtagcaagacatgcttagtgtgtatttctctctttgagacactgtaatttctaccagaaatttccagagcattatgtaggtagaaaaaaatgcaagcaagctgttaaagatcttggatcccattatatagtatgtatagctgaaatctgtaattcaatcactttttctcttttatcctctaaccaaaaaattgtttaattttgcatcccaaatgtttttaatctttgtatattttttaaaaatccttttctcctcatcattgccttttttgtggttgtaaatagacttacttgcactttgaagatgagttactccttgtcatcttacaaatatgtgatatggtaattttcataacagatgtcagttttgaaccaagaattggtgatttgtttataagaaaaaaactggcttcatttctgtgaaattgctctttgaaaatttctttttacacgtgtaagccaactgagataccgtgatggtgttgatttctttcaatgatgcttaccatctattttagccactgagccttttattatttgtctatttgtaaagtttatttgtcttaactcatttaataaatatactgtttatctgtaaaaaaaa

SEQ ID NO: 353162 - DNA, 707 bp, Homo Sapiens
tttttctacaaagaaatggtgtgcctggatggtcgtgtaggtgagttttaccaaggattatggtaacaaatgagtgagacctctatggagaaaatattgaaggacattaaagaagacctcataaatggagagagatatatcattaatggataggaagcctcaatggcataagtatgtcagtttctttcaaaactcacctatggattcaatgtgattccaaaccaaatcccaacaaggtctttcctggaattggaagccagattctgaaatgtatttggaaaagtaaagaggcagggttagctatttcattaacaaagaaggaacatcaggcagggagacttgtgttattattaaggcttattataaattattattgtgatcaagatagtgtatttttggtgtagagatagttaaattggccaatggattgagccaaatttccaaaacagacccacaaataaatgaaactctaatttacaacagagacagtactgcagatcatggggggaaaggatgaactattgagggattggcaaacttttttggtaaaggctagacagccttacgtggtgttcacagtgtctgttgtagttagtcacctctgctgtggtattgtaagagcagctatagacaatactgtacgtgaacaaatgatcatggatatgttctaataaaactttatgtgcattgagatttaaatttcatat

SEQ ID NO: 353163 - DNA, 1476 bp, Homo Sapiens
  misc_feature (42)..(78): n is a, c, g, or t
  misc_feature (1417)..(1417): n is a, c, g, or t
ggtaatcatatagggaactgcgagtcatcgcggtggcggcgnnnnnnnnnnnnnnnnnnnnnnnnnnnnnnnnnnnnnatcaggccaaatcggccgagctcgaattcgtcgagagcgggggtgccgttgtcggctgcgccggaagtccctagccaggcctggcggtaaccttgggggcctcactgcagccgccgctgctgttggagtgggctttgcgagtctgaacgttggcggggctaggctcgttaactgccgagagcctccgggtttgcggtggaggacgctgaggcccgtggggggcaggcacccgggcgccgggcctcccagccgacatgtctctagtggcggaagccttcgtctcccagattgcagctgcagaaccttggcctgaaaatgctacattatatcagcaattgaaaggggagcaaattttactttctgacaatgcagcttctcttgcagtgcaggcctttttgcaaatgtgtaacttgcctatcaaagtagtttgtagggcaaatgcagaatatatgtctccatctggtaaagtaccttttattcatgtgggaaatcaagtagtatcagaacttggtccaatagtccaatttgttaaagccaagggccattctcttagtgatgggctggaggaagtccaaaaagcagaaatgaaagcttacatggaattagtcaacaatatgctgttgactgcagagctgtatcttcagtggtgtgatgaagctacagtaggggagatcactcatgctaggtatggatctccttacccttggcctctgaatcatattttggcctatcaaaaacagtgggaagtcaaacgtaagatgaaagctattggatggggaaagaagactctggaccaggtcttagaggatgtagaccagtgctgtcaagctctctctcaaagactgggaacacaaccgtatttcttcaataagcagcctactgaacttgacgcactggtatttggccatctatacaccattcttaccacacaattgacaaatgatgaactttctgagaaggtgaaaaactatagcaacctccttgctttctgtaggagaattgaacagcactattttgaagatcgtggtaaaggcaggctgtcatagagttatgtgttagtctcaggagtcttaacttttgaaatatgttttacttgaatgttacattagatattggtgtcagaattttaaaaccaaattactgctttttgaaacctcaaattatataatgtatcttatgtatgtgctttatattgttatttgtgtatacattaaaataattctgaattatttaatctgatatgttgtattctgtatcttgaaatttttgtttccttgaaacatgcatgcatttaaaaataaagcttaaacaactgaattggatgttaaaaacacacacncccatcaccccacccccttcactctacctccccctcccaaaaaaacccaatacctacat

SEQ ID NO: 353164 - DNA, 600 bp, Homo Sapiens
  misc_feature (540)..(540): n is a, c, g, or t
tctaacttgccttcagacatctaatgacactcggcacttcaagacatcacaaaccttgcagaggcccgagtgacagacctggctccgctctcttccttcttccagctccccctctactcacctggggtgctgcggttcgagctgggggtgtgtaactcgggggcagctctctgaggggcggcgatcgagtcatgctggcggggatgggggcgcgggcgcccccaacccgcgttatctgggcgctcccataggctagcccggtctcccggtaccgctgggccccgcgtagggattcagtggggccgccaaggcgcgggcgtgggagagactgtggggtgtgggtgttaaagcggctgggagggaggagtgcagggagctgcgggtccggggcgcggcgccgggattcacccgctccgtgggccgtgggccgcggcggctggaggaggaatgggtcccgcgcgcaggcggaattgctggcccgagacgcacagcagggctcgaggtggcaactgcagtccccgggaggcggctggagctccnagaaaagggagctggccggggcgacgccctcccattggctgaggggcccgcaaattaccc

SEQ ID NO: 353165 - DNA, 541 bp, Homo Sapiens
ctgactactgggtggaaacaccaatcagtgggtagaaaccacacagtggtaacactgatcagtgggtagaaaacaatgacagcaggtatatgaggcatggaacacttggcttattgtaaagttttcaaaatatgcagtcctttctatccaccaggggttgggagttgtctttgtatatcaaccgtggaagggctgttttggttcatcattctgtggtctacctgggtagacctgatgcagccgtgtttctgaggaaaggaagaacagcttttgttttgtgatatgtaatggtagatgtagtgccatggaatgatgcagatttcattcagatattcttggatcttggccccaggactcactcattcttccctatatgagcattggtagttacaggttttatccttcctttaattgtaagtcttttgaagccaaaaactgtatccaatttgtcactgtctcctaacagtacttagcagtgtctgatgcatcatagggagtttgtaaatgtttggataaataaagggaaaacaaaaacaaccac

SEQ ID NO: 353166 - DNA, 1055 bp, Homo Sapiens
  misc_feature (450)..(451): n is a, c, g, or t
  misc_feature (530)..(531): n is a, c, g, or t
  misc_feature (563)..(563): n is a, c, g, or t
tgtcccaccgcgcctggcgcaaatatgtatgcgttttaaaatttcctctgatactataagctctttgcatttatctgaagcagtatacatgcctttggtatcagcaattttaacagttgggatatacttatcagctatctgattccaaaactacatctacttcttccagtatagaatctggtgcttcctgaccaaaaagatgagaaaaacaatgttaaaaatatagatgctttccattgaaatggagtgaaaacattggttctatatgttttcttttaaaataatttccttattaaaaacttgctgtctttattatacttaccctttttatgcatatcaatagtatttataagatgtgttctataattatgtaattgtagatactgttatgcattgtccagtgacatcataaggcaggcccctactgctgtatcttttctacccttctannttgtatagaaactatagaatgtatgactaaaaagtcactttaagattgacttttttaaaaagttataaccttctgctgnntgcaaaagtgcaaaactgtgagtggaattgtntttattctgacttaatgtgttagaaattagagaatacagtgggaggatttttagacattgctgctgctgttacccaaggtattttagataaaaaatttttaataaacatccctttggtatttaaagtggaacatttagcctgttcattttaatctaaagcaaaaagtaatttgggtcaaaatattggtatatttgtaaagcgccttaatatatccctttgtggaaggcactacacagtttacttttatattgtattgtgtatataagtattttgtattaaaattgaatcagtggcaacattaaagttttataaaatcatgctttgttagaaaaagaattacagctttgcaatataactaattgtttcgcataattctgaatgtaatagatatgaataatcagcctgtgtttttaatgaacttatttgtattttcccaatcattttctctagtgtaatgtttgctgggataataaaaaaaattcaaatctttc

SEQ ID NO: 353167 - DNA, 333 bp, Homo Sapiens
ggttgattataacttttattttttaatgtacagatgtactgtctctcattgagcactgatagaatttatttttctttcaatagtttaaaatcacttatgtggagacacatacttaagtgtgttcaactcgttttcttcccacatatctagtgtgacctttaaaaaccacaactttattttggacattaaatgtgcaatattcactacttattcattgttccacatttttcatacttgtacaaagggtaagtttttatataatggtgagaaacaggaagaaatgacaactggttaagtaaaattctgcaaataaactagattcgaatttaattt

SEQ ID NO: 353168 - DNA, 714 bp, Homo Sapiens
gatgtattactgcaaagccgccccacggctgccttggtagcccgcggcacacccctatgtggatttgccccaggtatgtcactggctggttcagcccctaccaccgccagcggaagctcatccacccggtcatggttcagcacatccagcccgcagcgctcaggtgaggccctgggctcttataggccgtgcagccatgggttccctgagaactgctgctgttgctgacatgtccctcaactagagagcagagggtgagcccctagttgtaaaaggccctctggtctcagatgtgcagctggctttctacccggatgccgtggaggagtggctggaggaaaacgtgcaccccagcctgcagcggctgcaagctctgctgcaggacctcagcgaggtgtctgcccccccgctgccacccaccagccctggcagggacgttgctcaggacccctgaggggagagctcatgccagggggctcctgctggaggctgggggggctctgcactgccaaatggcctgggcaatacgggcccacgtgggcgtcgtgccctctggcccagcagtgtcttgcccacactcagttcctgagggccctgggcagcccctgggggagagactagaaaacacagaaggaagcagcacagggagacccgctttgtgatctgcatgtgtgacactgattctttggaaataaagagtggaagctgcaggtg

SEQ ID NO: 353169 - DNA, 320 bp, Homo Sapiens
  misc_feature (147)..(164): n is a, c, g, or t
aactgagaaaaaggggccaagagatcattctcaaaccttacacttagcctgtgtgatcacacaggacctgtgacacaccaccttttataatgaagcaagaaatagcactcactgaatgaaactagaggagaattcaacacactgccnnnnnnnnnnnnnnnnnngaagaggattttaggaagaagactacagtatgagtcagacatcacggcagtccaaggtgaaaacagagagtcactgactctcaggggtgcaagggacctccgaaaggtccttggtctcgtcttaccactggctgcctttaattgcaaggaaatcac

SEQ ID NO: 353170 - DNA, 392 bp, Homo Sapiens
  misc_feature (7)..(8): n is a, c, g, or t
  misc_feature (23)..(23): n is a, c, g, or t
  misc_feature (178)..(220): n is a, c, g, or t
gaaagcnnttaaagcagagattntcttatcagattgctgataaatcacctgctcagctaaggtatcacccattcccaagtcaccaatatcaaggtcaacaaactaatccaaagaccatctcaatgaaaccttagttctttctgttatgaataatatcccaactgtttcaacaatcagnnnnnnnnnnnnnnnnnnnnnnnnnnnnnnnnnnnnnnnnnnntttcagagaaacaaagaataataactacgattacaaaatatatttggtataactaagaatgaggtatacaagctttgagtacagaaatttgggctctggctccatttatctgctctatgacttatgttcctatgctctataagttacttgacttttctgagtctcagtcttc

SEQ ID NO: 353171 - DNA, 1785 bp, Homo Sapiens
  misc_feature (389)..(401): n is a, c, g, or t
agggagtctggggtgggagggaggcatctgcatgggtcttcttttactggactgtctgatcagggtggagggaaggtgagaggtttgcatccacttcaggagccctactgaagggaacagcctgagccgaacatgttatttaacctgagtatagtatttaacgaagcctagaagcacggctgtgggtggtgatttggtcagcatatcttaggtatataataactttgaagccataacttttaactggagtggtttgatttctttttttaattttattgggagggtttggattttaactttttttaatgttgttaaatattaagtttttgtaaaaggaaaaccatctctgtgattacctctcaatctatttgtttttaaagaaatccctnnnnnnnnnnnnnttatccaattgaacgcacatagctcaatcacacgggaaatgtttggtccttgcacctgagcctgttcccactcagcagtgagagttcctcttggccctgaggctcagtctctcatcgtatttggtccccacccccaattccttgagtggttttggctctagggccctttcttgcactgtccagctggttgtaccctctccaggcatttattcaacaaatgtgggtgaagtgcctgctgggtgccaggtgctgggaatacatctgtggacaagacatgcttgggtcctactcctggagcactgtaaaaagagctgattcaagtaagtagatgcctgttttgagaccagaaggtttcataattggttctacgacccttttgagcctagaattattgttcttatataagatcactgaagaaagaggaacccccacaaccccctccacaaagagaccaggggcgggtgatgagacctggggtttagaaccccaggtgagacctcaaatcactgcattcattctgagcccccttcctgtccccaggggaggtgtattgtgtatgtagccttagagcatctctgcctccaacccagcagttctctgccaaagcttgtggaggagggagagccctgtccctgccctcaggctccccagtgctcctggcccttctatttatttgactgattattgcttctttccttgcattaaaggagatcttcccctaacctttgggccaatttactggccactaatttcgtttaaataccattgtgtcattggggggaccgtctttacccctgctgacctcccacctatccgccctgcagcagaaccttggcggtttataggtaatgatggaacttagactcctcttcccagagtcacaagtagcctctgggatctgccaacacacgtccactcccaagccactagcccactccccagttggcccttctgcccttaccccacacacagtccaactcttccacctctggggaagatggagcaggtctttgggaagctcccacacccacctctgccactcttaacactaagtgagagttggggagaaactgaagccgtgtttttggccccccgaggctaaccctgatccatagtgctacctgcacctctggattctggattcacagaccaagtccaagcccgttcttacgtcgccataaaggcccccgaacggcattctcggtacttctgtttgtttttgtacattttattagaaaggactgtaaaatagccacttagacactttacctcttcagtatgcaaatgtaaataaattgtaatataggaaatcttttgttttaatataagaatgagcctgtccaatttctgctgtacattattaaaagttttattcacagaaaaa

SEQ ID NO: 353172 - DNA, 417 bp, Homo Sapiens
cccaccctctggggaagatgggagcaggtcctttggggaagctccccacaccccaccctctgcccactccttaacacctaagtgagagttggggagaaactgaagccgtgtttttggccccccgaggctaaccctgatcccatagtgctacctgcacctctggattctggattcacagaccaagtccaagcccgttccttacgtcgccataaaggcccccgaacggcattcctcggtacttctgtttgtttttgtacattttattagaaaggactgtaaaatagccacttagacactttacctcttcagtatgcaaatgtaaataaattgtaatataggaaatcttttgttttaatataagaatgagcctgtccaatttctgctgtacattattaaaagttttattcacagaaaaaa

SEQ ID NO: 353173 - DNA, 595 bp, Homo Sapiens
  misc_feature (61)..(204): n is a, c, g, or t
ctcccctccgaggcaaacattattcctgcccatcttggaggaaccggacccaaaggcgggnnnnnnnnnnnnnnnnnnnnnnnnnnnnnnnnnnnnnnnnnnnnnnnnnnnnnnnnnnnnnnnnnnnnnnnnnnnnnnnnnnnnnnnnnnnnnnnnnnnnnnnnnnnnnnnnnnnnnnnnnnnnnnnnnnnnnnnnnnnnnnnncagtaaatacattttttattatcaaaaaaagagtagtgtatggttggcgtattctgtgtagaatgtattttattgatgtctcctatttttataattctgagttaagtactttttaattaatgctttttagttttgggcagattcagttgactaaagcacctcatttcccagatacatgaaataaaatatttggcttcttttccaatttcacactgatgttattttgtgaaaatcagtgctttaagataaatcgttatacgttaagataaacatgagaaacttgatctaatatttaatagttattcagttctacactttattaacttctacaccagcagatttagacattatgtaaccatctcaagaagtttcacttggatgtaatgcttca

SEQ ID NO: 353174 - DNA, 472 bp, Homo Sapiens
  misc_feature (36)..(36): n is a, c, g, or t
  misc_feature (135)..(152): n is a, c, g, or t
aacagggaaagatgaaaatcccaatgttttagctantttttaatattaaatggtgaggaacaaaaatgatctctagcaaatgatgccaactggcaccaaattctttttgaatcttaaacatatatgcacacgtgnnnnnnnnnnnnnnnnnngagcttcggcataatttaggtaaatgcataaagatgccgtaagaaggacttggctatcatttggagtaattgcaggtctttgctcttggccttgtagcacacttgattcctggcatacacatcctagcataacatataacagtgtggcttcttcacctagtgtaggcataaatcctttgcttttcatggttttgtaaaaaggtagtaacatacctattatgctttgaaatttgattcgttatgctctgcataagtggtaaaggctgtattgctttgcactgttaattatgaacaagaaataaaacaaatttgaagatagt

SEQ ID NO: 353175 - DNA, 1013 bp, Homo Sapiens
gggtgcagttcaggagatagctgttctccagcctttctggagggatgcagagcctttccttaggacaaacaagcatttcaaaaggtttgaactacctaaccattatggcaccaggaaacctcttggcatatgagaaataacttctctcttggttcaaggatgttggatgactcgattttcagcagaaaacatcttcaaatcagtttcatttaggctttttggtgtgaagtgtcataatacagacagtgagcctttgaaaaatgaggacctactgaaaaacttacttactatgggagtagatattgacatggcaaggaaacgacagcctggagtttttcataggatgattaccaatgagcaggacctgaagatgttccttctttccaaaggagctagcaaagaagtgatcgctagcatcatatcaagatatccacgagcaataacacgtactcccgagaatctttcaaaacggtgggatctgtggagaaagattgtgacatcagaccttgaaattgtaacatattttggaacgttctcctgaatccttttttcggtccaataacaacctaaacttagagaataatataaagttcctctactcagttggattgacccgtaaatgcctttgtcgatttgttgaccaatgcccctcgtaccttctccaatagtcttgatctgaataaacagatggttgaatttttgcaggcagccggtttgtcattgggtcacaatgatcccgcagatttgtcagaaagataatttttaaaaaccccttttatcttaattcagagcaccaagcgggttgaaagctaacatcggaattcttacgggtcaactttcaatttcgaccagttgaggaactgctgggtcctgatatgtggggcccaggagctgtaaatccctaaaactttcccaaaggatttgccagaaagaagctcccacacactcctacgagaaactgggtctctatggattcctcataacaaagtcccacaagtgttctaagcatcaca

SEQ ID NO: 353176 - DNA, 773 bp, Homo Sapiens
tctcctgattcgaggaaggaatcctccactaacgcaccaacatagagtaccttggacaaacaccagactcagacgtaccgagggcacaggtgggtcagcatgttgccaccttgaaagaacatgatgaattctgtcagaagaagaggcaacagcattattgacaaaagccctgtacagaagagtgtggccgtaggtcagctattcacagtagtgaatcatcttgcagcttgccatctattctgaatgacaatagtggaataaaggaagccaaacctgctgtatggctcaacagtgttcctacaagggaacaagaagtttcaagtggctgtggagacaagagcaagaaagcaaaatgtggctgcagatatcccaatcacagaaacagaagcctatcagttgctgaagaaggccacccttcaggataatacaaatcaaactgaaaacaggtttcaaaagacagatgcttctgtgtcacacttgtcaggtttgaatattggcagcggtgcattcgagacaaagacagctaacaaaattgcttcggaagctagtttttcatctagtgaaggaagtcctttgtcaacggcatgaaaacaaaaagaaacccgtgatcaatttaaaatctaatgccctctgggatgagtctgatgacagtaactcagaaattgaggctgctttacgccccagaaaccacaacaccgatgattctgatgatctttatgactaacgcgctgtgacattggtttcaaataaagtctttaaacaaactaaaaaaa

SEQ ID NO: 353177 - DNA, 721 bp, Homo Sapiens
  misc_feature (373)..(373): n is a, c, g, or t
ctgaaaataagtggtctcaagagaagcattctccttgggaaggtgtttcagatcatcttgctcacagggaaccaaagtcacaaaagcccttcagaaaaatgcaggaagaggaggaggaaagttggagcaccagcagtgaccttaccatttcaataagtgaagatgatctgattttagagagcccagaaccacagccaaatccaggtggcaagatggagggagaagatggaatagaggccttaaaattaatccatgctgagcaagaaagagttgccctatccacttgaaaaaaattgtatttttgcaaaccctaagctctccttgattcagaaaaggaatccttccactaacgcaccaacaagagaacctggancaaacaccagactcagacgtaccgagggcacaggcaacagcattattgagaaaagcccttacagaagagtgtggccgtaggtcagctattcacagtagaatcatcttgcagcttgccatctattctgaatgacaatagtggaataaaggaagccaaacctgctgtatggctcaacagtgttcctacaagggaacaagaagtttcaagtggctgtggagacaagagcaagaaagaaaatgtggctgcagatatcccaatcacagaaacagaagccctatcagttgctgaagaaggccacccttcaggataatacaaatcaaactgaaaacaggtttcaaaagacagatg

SEQ ID NO: 353178 - DNA, 477 bp, Homo Sapiens
  misc_feature (24)..(24): n is a, c, g, or t
  misc_feature (44)..(44): n is a, c, g, or t
  misc_feature (51)..(51): n is a, c, g, or t
  misc_feature (63)..(63): n is a, c, g, or t
  misc_feature (80)..(80): n is a, c, g, or t
ccccccggggaacccctgcttccntgtaccccttgacctttaancccctancctataataaangagtgggccaccacccngaagggaaaagggaagtattctgcaaaatggttttcccataaccagtgcagaggacacactttgcaatgtgtaatttgtgcagtatgacatgcatttgggtgtgtctggtcaggtacatcatgtggtgtccctgttatgcattttgcagactgacactctgcttaaccagtccttccgtgctgtgctgttttgtaagctcttaaccagaatgcaaaaatgttaaataactgtctggttttattttccagccctctgggatgagtctgatgacagtaactcagaaattgaggctgctttacgccccagaaaccataacaccgatgattctgatgatttttatgactaacgtgctgtgacattggtttcaaataaagtctttaaacaaactaaaaaaaa

SEQ ID NO: 353179 - DNA, 653 bp, Homo Sapiens
  misc_feature (174)..(174): n is a, c, g, or t
  misc_feature (482)..(490): n is a, c, g, or t
agaaaatacacgctttctgcatgtattagaaacgcacgagctccaccaagtctacaatgaaagtttgaaatttaactgcaaggaattagaagcatatttgcaatcattgcagcttcttctttcttctgctcataaaaggaggaacactttagatagagggcaaatatatctganaacctaatttctttctttttttgataaggaaatcttttccatctccatcctaacatgcacaacctgtgaagagaattgtttctatagtaactggtctgtgatcttttgtggcaagagaatagcaggcaagaattagggccttgacagaatttccacgaagctctgagaacatgtttgtttcgaatgtctgattcctctttgtcatcaatgtgtatgctctgtccccatccttcactcctcctcaagctcacaccaattggtttggcacaggcacagagctggtccctagttaagtggcatttatgttnnnnnnnnntagttcagaatctcagccttttctttgtgtcatcaaaacagcttaagaaggggactactgccaatgtcctctagtctgacctccacccagggaggacccatggcaggtcttttcaactttctgattcatgagaacaaccttgtgaagcttttcccacctccta

SEQ ID NO: 353180 - DNA, 522 bp, Homo Sapiens
  misc_feature (282)..(381): n is a, c, g, or t
  misc_feature (383)..(388): n is a, c, g, or t
gtaactttgagcaagttttatacatatccttcccatgagtttttcatttctaatactggctgtgtaatacagtatgtttcatagacttgctgtaataatcgatggagtgtatctaatagtgtttattttactgtaactgggccacagttaggaagtactcaattaaaattagccgtcattattcctagtattaatatggtgatgaacagctaaagagcatttaaataattatcattaatatggataaattttgaccatacctgaataaatatttataatatnnnnnnnnnnnnnnnnnnnnnnnnnnnnnnnnnnnnnnnnnnnnnnnnnnnnnnnnnnnnnnnnnnnnnnnnnnnnnnnnnnnnnnnnnnnnnnnnnnnnannnnnnccctgggcggcccgccccgccccccaaaaatttttcaaaacctttctttgggcgcgcggccccaaagggaaagggaccttggccaaacttgttcccaagaaaacccggggcaggaaaagggttgggatcccccc

SEQ ID NO: 353181 - DNA, 408 bp, Homo Sapiens
  misc_feature (88)..(88): n is a, c, g, or t
  misc_feature (107)..(107): n is a, c, g, or t
  misc_feature (112)..(112): n is a, c, g, or t
  misc_feature (292)..(292): n is a, c, g, or t
aaaggtgatgctttctgtaaaattgtctgtttataaactaagcataaaatgtcaaaaggtcttgtgtctggtattctaaatttaaaanaaagttcttagtttatgantcttnaaatatgggaaatgaacaagtactcactgtcgtctctagtcacctattcctatttttggctgacaacatttctggttagagctttatttggaagctttaacatattttaactgttacacattactcagctcaaactatagccaagataacttgcttgtcagtttattaacagcaaattantcaaatatgttccatcgtttgtgattaaagggcctgtggtgagaggggagagatgaagggaggaacaaacaaagatggggagggattgtcacggttaataataaaacagtatttct

SEQ ID NO: 353182 - DNA, 379 bp, Homo Sapiens
  misc_feature (335)..(335): n is a, c, g, or t
  misc_feature (358)..(358): n is a, c, g, or t
  misc_feature (377)..(377): n is a, c, g, or t
ctcgtgccaggaaacttctaccctacctttgaacattatggtaaattatgaattaattctttcccagctaaaagagattttaaaaaagcagaacctcaataggcatgataaagaatctccaccatgtaacactacattagtccaactaagttatcatgtcattgtccacttaacagagaatggagcttaattagagaaaaaaatcataaaaatgttcacagtttcccccgaaatggaaagatgtacagggagatgtgggggtgggaaaaagaagagagaaggcagtcagtaacaaacacttggttataatgatgtaagaaccatttcctttatgnaattttgttggtgtcatttttanatccctctcagctatatgnct

SEQ ID NO: 353183 - DNA, 949 bp, Homo Sapiens
  misc_feature (596)..(596): n is a, c, g, or t
  misc_feature (721)..(722): n is a, c, g, or t
  misc_feature (724)..(724): n is a, c, g, or t
  misc_feature (732)..(733): n is a, c, g, or t
gtaggaatcatgaaaacattaatcttatacaggaaaaatgtctggccatatgttagttagttcgggaatggttattggtaatttgttttgtattatagcatacaataactagagttaccaaaggcttgttttttcttgagcagttgaaaggagagaccaatatttgtgacatggatagtttcatgaccacaactcattcaatcattttatagtctatggcaatatccaagagattgccaagagtagaagacagaatatttcatctgacagtatctgattggtttactgtttttctaatcatatgtggtcataacgggaagcagaattatgctttattcaaacaaacctgcttctgcctcattttcctaagctatgagaacaattagaggaacagattcatgcttgtatcttgcattcagaaaacaaactgtcctactaatcaaagctgcatatctcatcagagataatggttgaattttattgcaaccatattggcaatctgaaactggcaaacacaaaggattgttttcactaggcttaccattttgctttgcttttttaacacactgagccaaagatgcagtgtaattaatggngcttttgcctaatgtgaagttaagtgtaagcattggaagctagtgattctgaatgatatatatatccattgcatgttgaacccctttagaattttgttcttaaacaaacttagaatttcaaaagnnanacatatgnnccattaagtggagtgtttatgattattgctagaaagaaggcagacttcatattctcatcgcccatttttcaaacttgttacattgatctgtacattattttaagccacatgtttgtaattgtttaaaacaaagtggaaacattacacaatgtccttaataaataggcccatgtaaattttaattacaattaataaatgatcaaaaaatttgcattt

SEQ ID NO: 353184 - DNA, 700 bp, Homo Sapiens
ttgatgagaagtacatgtggtctgaggacacccaagcctgcaggtgtgtctaaagcgagggcagcctagtggggactggtggccttaacctgtggcatttgaggtaacatcagggagttgacatcagaattgcatcacaaagtgctgggattacaggtgtgaaccaccgtgcccggccctactttctatcgaagtagaatagaagcactgagaccacagaggcaagagctgggggaaggaaaactgcccatgagatgagatgtgcctctcagcttccaaaaatcggggagggttgcaaagggatgacaccatccacaccagaactgcatgaatggcatcaggaatgatcagagaccataaattccagtgagacccaataacaccatttctggtcctgcatgctcttccaaactttgccactaaccccttcaagagatgccccccatggaatccagccatcatgctgtgaggaatccaagcagctacatagaaaggccacaactagatattccagctgtagtcagctgaagctccagccaacagccaacatcaaccaccacgcgtgaaaacgagcaagccttcagatgattccgactcccaacctccaagccacctcagctgaagccaagtagagcagagactagctgtcccccaatgctctaatatgcagattcataattaaaaagaatgttattgttct

SEQ ID NO: 353185 - DNA, 358 bp, Homo Sapiens
ataaatgttgctaacaaaagtaaaagctcttttgaggcacaagataaagaggtttagctaatgagcagggtaacgaacctaactggaaaagtactgctaagggacatataataagaggtagcagattcagagagttggaggaaagtcactgaaatgatgaagttcttaatcttattatctctcacaaacccaaaataaatttaaaataattctaagtgattgaaaacatgaataaagaagtattttctattcatggaacaaatttcaaggtgatacaaatacagaaaacccacaagtactagcactaaaattataatgacattatttctataataaaaatttatgtcatattcttata

SEQ ID NO: 353186 - DNA, 2108 bp, Homo Sapiens
  misc_feature (55)..(55): n is a, c, g, or t
  misc_feature (108)..(290): n is a, c, g, or t
  misc_feature (1528)..(1528): n is a, c, g, or t
  misc_feature (1537)..(1537): n is a, c, g, or t
  misc_feature (1583)..(1583): n is a, c, g, or t
  misc_feature (1634)..(1634): n is a, c, g, or t
  misc_feature (1648)..(1648): n is a, c, g, or t
  misc_feature (1653)..(1653): n is a, c, g, or t
  misc_feature (1655)..(1655): n is a, c, g, or t
  misc_feature (1668)..(1668): n is a, c, g, or t
  misc_feature (1670)..(1670): n is a, c, g, or t
  misc_feature (1674)..(1674): n is a, c, g, or t
  misc_feature (1678)..(1678): n is a, c, g, or t
  misc_feature (1683)..(1683): n is a, c, g, or t
  misc_feature (1694)..(1694): n is a, c, g, or t
  misc_feature (1705)..(1708): n is a, c, g, or t
  misc_feature (1717)..(1718): n is a, c, g, or t
  misc_feature (1720)..(1720): n is a, c, g, or t
  misc_feature (1723)..(1724): n is a, c, g, or t
  misc_feature (1734)..(1734): n is a, c, g, or t
  misc_feature (1743)..(1743): n is a, c, g, or t
  misc_feature (1756)..(1756): n is a, c, g, or t
  misc_feature (1759)..(1759): n is a, c, g, or t
  misc_feature (1763)..(1763): n is a, c, g, or t
  misc_feature (1778)..(1779): n is a, c, g, or t
  misc_feature (1784)..(1784): n is a, c, g, or t
  misc_feature (1788)..(1788): n is a, c, g, or t
  misc_feature (1801)..(1801): n is a, c, g, or t
  misc_feature (1879)..(1879): n is a, c, g, or t
  misc_feature (1971)..(1971): n is a, c, g, or t
  misc_feature (1986)..(1986): n is a, c, g, or t
  misc_feature (1995)..(1995): n is a, c, g, or t
  misc_feature (2008)..(2008): n is a, c, g, or t
  misc_feature (2016)..(2016): n is a, c, g, or t
  misc_feature (2036)..(2036): n is a, c, g, or t
  misc_feature (2048)..(2048): n is a, c, g, or t
  misc_feature (2063)..(2063): n is a, c, g, or t
  misc_feature (2066)..(2067): n is a, c, g, or t
  misc_feature (2093)..(2093): n is a, c, g, or t
  misc_feature (2101)..(2101): n is a, c, g, or t
  misc_feature (2103)..(2104): n is a, c, g, or t
caagcttggcacgcaggcaactcctgataaaaaatattggaaaaaatttttatancaataaaaaccaataatacaacaataattacaaataatacattgtaacaatgnnnnnnnnnnnnnnnnnnnnnnnnnnnnnnnnnnnnnnnnnnnnnnnnnnnnnnnnnnnnnnnnnnnnnnnnnnnnnnnnnnnnnnnnnnnnnnnnnnnnnnnnnnnnnnnnnnnnnnnnnnnnnnnnnnnnnnnnnnnnnnnnnnnnnnnnnnnnnnnnnnnnnnnnnnnnnnnnnnnnnnntagttctctgtctttgaaaacattaatcgatacaagtggccagtgaatgtatagtatgggagggagtaatccagtatgggggacaaggttgccatatatttgccaaaagtagttgaatcttctttctgtttttcccccctggtggaataagtttattgtttgctatgaggagccagaggctgtgtttgtttaaagcaatggtacccaatcttaagcatgtgtaaaggtctccctgggtctgtgaaccataccttgagaaataactagaaaagtaaaagaatggtgaaccactattaataatacttccattttgcatactaaaaatgttgcgtgtacctgtgggtgtgtgttgggaatagtaatatgaagtttactcacaaaacactcccactgtgattcacattattttatagcacaaccaataatgattaaacataattatttcctttgactacttttcatttcagtggtaaaacagctgatgaaggttatttgggatggaaagagtaatacaagacatacgcagatggagtctcctgtgcgtaggtttagcacacccatgttagcttgtccacattaggccttcttttgaaggtactgtatctaaagataagggcataagtgatcatttaattctcagccacttcactgatactacaaggtgttacacagtaattatagtggtttgatacagacatttgtttacaagaaactgaattggcattattaacttatttcacacaaaaaaagttagctttacccatgaactgtaattcagattgataaggtgacctacccatgaaaaagacacctgagacctgtttacttttttaaactatgaagtgaaatcctcagttcaataagtgtcccaaggagaatttcctctgttaaattttccctgttaacttagtataattggttttcttgaatagaagaataatgatttctgtaagatattttaatgtgaatatttttgctgtcttcatctttaaaaattaaatacagtactatatatagatattaaaattttaaagtgggactaggtgtttttatgtatacaattacagtttgtctcctctctttgcaaatttactggctattatcagaataaaggttggactcattttgcttatcccagtcattaaaatgttgtgatctgtttctaacatatttagcatttcatttttaaaatgagatgtgccattatcataacaaaggcaactattaatgttcctagnaaaaatgangtaaaggacttacccctagtcaatattaacacttaatcccactttntttttcccccaaatggccccagtacattgccaagggagggggatttggatnccccacagtacccngaacncnatatgatatttgncngctnactntccancatgtcttggnaaaattgcccnnnnaaaaaaaanngnccnnccacctattnaaaaacaantcaaataatctgnacngttnccataatttgacggnnaattncttnaaatttagcaccntcttagaaatcttcttaatataaactactgattgaaatgtgtttatactttctatcatatttcaaactgttttacttnccttgcattaagacaattaaaacacaaactacatgttagaatgaataatttaaaggacatgctgctgtttcagcataaaaaatggtaaagtntttataaatagaatncttatgatngcccttaacgtantgaattgnttaattacgcccagttgtgnttccgccgaatntaagacgttttcttnctnncatgtgttaaattgttaccctataanatgttcgngnnaaaa

SEQ ID NO: 353187 - DNA, 316 bp, Homo Sapiens
  misc_feature (13)..(13): n is a, c, g, or t
  misc_feature (213)..(213): n is a, c, g, or t
  misc_feature (222)..(222): n is a, c, g, or t
  misc_feature (285)..(285): n is a, c, g, or t
ctgcagggaaatntggattcctcacagtactcagaacacaatatgatatttgtcagctaactttccatcatgtcttggtaaaattgctcagttaaatataattggccatctacttattaaaaaacaattcaaataatctgtacagttaccataatttgacaacaaattactttaaatttagcaccatcttagaaatcttcttaatataaactnactgattgnatgtgtttatactttctatcatatttcaaactgttttactttccttgcattaagacaattaanacacaaactacatgttagaatgaataattta

SEQ ID NO: 353188 - DNA, 451 bp, Homo Sapiens
  misc_feature (425)..(426): n is a, c, g, or t
  misc_feature (444)..(444): n is a, c, g, or t
actaggcaggtgtgaggagccctgctgaggtcactgtggggcacggttgccacacggctgtcatttttcacctggtcattctgtgaccaccaccccctcccctcaccgcctcccaggtggcccgggagctgcaggtggggatggctttgtcctttgctcctgctccccgtgggacctgggaccttaaagcgttgcaggttcctgatttggacagaggtgtggggccttccaggccgttacatacctcctgccaattctctaactctctgagactgcgaggatctccaggcagggttctcccctctggagtctgaccaattacttcattttgcttcaaatggccaattgtgcagagggacaaagccacagccacactcttcaacggttaccaaactgtttttggaaatcacaccaaggtcgggccnntgcaggcagctggcacangtggccc

SEQ ID NO: 353189 - DNA, 510 bp, Homo Sapiens
  misc_feature (58)..(58): n is a, c, g, or t
  misc_feature (70)..(70): n is a, c, g, or t
  misc_feature (83)..(83): n is a, c, g, or t
  misc_feature (164)..(164): n is a, c, g, or t
  misc_feature (338)..(351): n is a, c, g, or t
aaggataagggtaaatcatttcaagggcaggttacccaacccactaactattttgttnttcattttttgntcttgtagaaggntttatatcttgttttaccttggctcattagtgtttaaaaatgtactgatgatgtgcttagagaaattcctggggctttctntcgttgtagatcagaatttcaccagggagtaaaattacctgaaaacgtaagaagttttaaacagcttttcacacaaattagatgcaactgttcccatgtctgagtacttatttaaaagaaaggtaaagattggcctgttagaaaaagcataatgtgagctttggattactggannnnnnnnnnnnnnaaacacacctggagaggacatttgaaaacactgttcttaccctcgaaccctgatgtggttccattatgtaaatatttcaaatattaaaaatgtatatatttgatcctggggactcatattctttcagaatcatgtaaataaatggcatcatgttgtaaa

SEQ ID NO: 353190 - DNA, 1669 bp, Homo Sapiens
  misc_feature (48)..(84): n is a, c, g, or t
  misc_feature (1582)..(1582): n is a, c, g, or t
  misc_feature (1645)..(1645): n is a, c, g, or t
aatgatacgatcctatagggcgacctggagctcacgcggtggcggcgnnnnnnnnnnnnnnnnnnnnnnnnnnnnnnnnnnnnnatcaggccaaatcggccgagctcgaattcgtcgagagcggggcgtgcgccgccttaagtgccgcgccagcccggggcggcccagtcggcctgtcagccggcttcgagataagtcccggtgcttgcgcggcggcggctatggcggcggaagaggaggaggtggactctgccgacaccggagagaggtcaggatggctaactggttggctccccacatggtgccctacgtctatatcacaccttaaagaagctgaagagaagatgttaaaatgtgtgccttgcacatacaaaaaagaacctgttcgtatatctaatggaaataaaatatggacactgaagttctctcataatatttcaaataagactccacttgtccttctccatggttttggaggaggtcttgggctctgggcactgaattttggagatctttgcaccaacagacctgtctatgcttttgacctattgggttttggacgaagtagtagacccaggtttgacagtgatgcagaagaagtggagaatcagtttgtggaatccattgaagagtggagatgtgccctaggattggacaaaatgatcttgcttgggcacaacctaggtggattcttggctgctgcttactcgctgaagtacccatcaagggttaatcatctcattttagtggagccttggggtttccctgaacgaccagaccttgctgatcaagacagaccaattccagttttggatcagagccttgggagcagcattgactccctttaaccctttagctggcctaaggattgcaggaccctttggtttaagtctagtgcagcgtttaaggcctgatttcaaacgaaagtattcttcaatgttcgaagacgatactgtgacagaatacatctaccactgtaatgtgcagactccaagtggtgagacagctttcaagaatatgactattccttatggatgggcaaaaaggccaatgctccagcgaattggtaaaatgcaccctgacattccagtttcagtgatctttggcgcccgatcctgcatagatggcaattctggcaccagcatccagtccttacgaccacattcatatgtgaagacaatagctattcttgggggcaggacattatgtatatgcagatcaaccagaagaattcaaccagaaagtaaaggagatctgcgacactgtggactgaacacactgaagctctgatgggaaaacctggtgactgatatagttgttcagcaataattcatagtctgtgatgaagagtagtgaatacaacacacaaccaggcagccttcttgactatactttgcacatgttttctttaggaattcactcacacatttaaaccagttagtgccttctagaagaatggctttcctttctcctacacaaaattgaaatatacaagtctctaaatataatacctttaaataaaaggttatttgtccctctgatgtactgaaaaactgtaatgtttcagctggaaaattttttnaatcttaactttggctagttatttttattattgcaatctatatttacccatttagggagtggnttctgagtctcttacactgttaag

SEQ ID NO: 353191 - DNA, 426 bp, Homo Sapiens
  misc_feature (310)..(310): n is a, c, g, or t
  misc_feature (319)..(321): n is a, c, g, or t
  misc_feature (393)..(393): n is a, c, g, or t
  misc_feature (414)..(414): n is a, c, g, or t
gaagagtaaagagaggtggggaagtaggtgatgggtgtgctagcaggataccaagcaagaaggaacttaccccgtccagcattcagtttcacctctcattttagaagactttacttttcaaaagatctctttgttgaagtataaccaatggtctcctggagctggctcaactgagcttgcaagaaccaatcatatgtctctttgcccaactcagaattgacaccacattcgtagcatgtaatcaaccatggtagaaatatttacaccacaggaattgacaaatgctacaattaagggctttttaattaanacaaatttnnntttttgcaagttaaacatttaccagcttatctgtggggataacacgcatagagaaaagcgcatgtattaganatgaatggcttgatgaatttncacaaactgacc

SEQ ID NO: 353192 - DNA, 333 bp, Homo Sapiens
  misc_feature (158)..(158): n is a, c, g, or t
  misc_feature (276)..(276): n is a, c, g, or t
  misc_feature (301)..(301): n is a, c, g, or t
  misc_feature (314)..(314): n is a, c, g, or t
  misc_feature (322)..(322): n is a, c, g, or t
  misc_feature (325)..(325): n is a, c, g, or t
  misc_feature (329)..(329): n is a, c, g, or t
caatctgtttgggactttgagggctggggtgggaaggtagtggaatggaatagataaacagccagtcaagagctgtggggaggttgacagaattggggtgcaggtacatgtaggatacacagaagctttgtgtctgtggaggctgtatgagtctgtgnggtgagcagcatgtctaagtgggtggaaacatgtatagctaaaggcaggaactcttcccatacagctaaacccttgttcaagcaatttaaataaacaagaacattttaaaaaattaanaccccactaaaacaatccttgtggngcagttttcttgngtgctaangangggnccag

SEQ ID NO: 353193 - DNA, 785 bp, Homo Sapiens
  misc_feature (689)..(689): n is a, c, g, or t
  misc_feature (692)..(692): n is a, c, g, or t
  misc_feature (695)..(695): n is a, c, g, or t
  misc_feature (766)..(766): n is a, c, g, or t
ccaaaaggaaaaggaccccaatcagtgtctcttgactttgttctttgatccctcagtttcttcttgatttcagcatgtgtcgggttcctaattttgggtatgagttagcaaatttaaccattgtgtttgtgccctacccaggggactccccagtttctgacttgaagtagactgagaagaatccacgaggtgctatctggccagatttaagtagattctatttccttggttctccctctccctgaggacctcttattttattgtcccctcttctaggttaattctcctttgatttgactttgttgagaaggaggttggacagtagattagcaaagttccaagtgcaaaattacagtgtgttagagtgtggggggaaaattagtcttatttttccctacatgggatacaacactgtgaattcaatcttcaactgaaggccctgcagttctcctaaaacatagttgtttgtttttctttaacaaagtttaagctagtgttaataaattaaaaaaaattgcttgtctgtctacttcagctttgttttatgcccatttcatattgttgtctgtgttgtaattcataacttttgataccatttctgatgtgtaaaattggttgtcttgtaaatatcttataaagagttcaattgtaaataaactattgtggctgttaatttttgaacttctgcntcnatntattatatttattggcaaacaaacaattctgcttgtatatttgaaacattggaaaaagaaatccattttcncaataaaaaagaataacac

SEQ ID NO: 353194 - DNA, 788 bp, Homo Sapiens
gttctagctcgcgatctagaacgtggttttcaaactttaaaacactggaagctctctttgaaaacaaaagatgagaattgaaatggatggcactggaagctgttcttgtctactggggtttggagctgccaggggacctgctcacatccactcctcactcagcccctcccgcccctcccttctccacgcactgtgactgacttccatgtgtgaaggcctgcagttaattctcctgtgtcttgaatggttgggagatgagttggtcagacccttagtgaaatgatgtgggaaggaacaggaatgctgtggctctgaagaaggtagtagaacatcccacacctgctaataagcacattttgcaaactcagttgactcacctcagatttgcctagtgaaaactgaagggctggatgtagacccagagagcagggtggacagagcccatgctggaagtactgagcatcaggactgtatggggctggctttagcatcatcattctgtgcaaagacaaataaataattaatgtcacactgtctgaaattttcaccaaaaccaaaaaggcgcattaacatgattgttccaacctcatggtttttcaagtgtgagcgcccagagacctcttcagaggctaagagagcatgcgctgccacagctgttagcatttggagacgtaattacaatgcccccactccccgcaccaaacctgggtttttctaccgtttttgtagatgtcatgatgtcacgacccctgcaccctgaaaaaaataaatgtttttaaggacagtca

SEQ ID NO: 353195 - DNA, 1226 bp, Homo Sapiens
  misc_feature (465)..(465): n is a, c, g, or t
  misc_feature (1045)..(1059): n is a, c, g, or t
ctaaggctaggcagcgaggctgggtgtcgactcggcacgaggcacacctgactactaagcaggtgtgggatgttctactaccttcttcagagccacagcattcctgttccttcccacatcatttcactaagggtctgaccaactcatctcccaaccattcaagacacaggagaattaactgcaggctctcacacatggaagtcagtcacagtgcgtggagaagggaggggcgggaggggctgagtgaggagtggatgtgagcaggtcccctggcagctccaaaccccagtagacaagaacagcttccagtgccatccatttcaattctcatcttatgttttcaaagagagcttccagtgttttaaagtttgaaaaccactcatctagttttattccctttttactcaaataaggacactgaggcacagaaagtgaaggagacatgctcagggtcacacagcgagnccggggattaatatgcaaatggatctcatgtttccagaatcccaggccagtctccttctgctgcatagtacagaaggtgatgccatcccaatattttagacatggaatggcaggcttacaggcggaaagttcacttccaacaaggactccaaaatgtaatgcacaatgtgagcggtgtgaaagtgtgccttaaaagttgggatgagtcttgataagagtccctgaagcctgtggattggcaacatctgcctttacatagttttgagatgaccctgagtagcagcaccgtggagtagagaggggaccaaggagggccaggtgccctgagctctgctcctctttcagaagccttcaggccttgggcaagtagcttctcctctcagagcctggtttcttcatctgctaaaggcagggacattaacacctgtcctgccccatctcccagagttgggatcaagctttatgaacttaaaggactgtgcatagtaagggatctcaattcttattttaaaattgtaatcacctaaggatctatttttttaagataagatagcaaatattctcctttcttttttcattnnnnnnnnnnnnnnngagagccttactcttgggtgaggtcaaaatgtttgtaggtaaaatatattctactacaatctaattccacagtctggagataacacctgacccctttttttacaatttgatcgtcagaagcctggtatccaccgcttctaaccacctgtttagagaatgctagctag

SEQ ID NO: 353196 - DNA, 315 bp, Homo Sapiens
  misc_feature (38)..(38): n is a, c, g, or t
  misc_feature (46)..(46): n is a, c, g, or t
ccaggattcaaggaggctcttaaagacctgggatctgncaaagggntatacaagccaacctgaagggatttctacaggccatgtaaaaatgagacagtttgagcatgaaatatttgtatatgtgcctgtttttaactcttaataacctcatcactgtacaagaaaggcagggtaagtgcttgatttcacttccctttattatcagttctcaggacaaattgatatgctgccaatctctaaagcaacaaaatcgaacctgtagggtagtcaaaaagctcatgctggaaaattccaccgaataaagataaaagttag

SEQ ID NO: 353197 - DNA, 148 bp, Homo Sapiens
  misc_feature (58)..(58): n is a, c, g, or t
  misc_feature (108)..(108): n is a, c, g, or t
gctcagtataagataatggttcagaattcagatcctagaattggatctttcctttgtnatttactaataaagcacttatccactctgaatctcaattcttcatctgtnaaatattattatgcatcttaataatatgaagattaaaaac

SEQ ID NO: 353198 - DNA, 536 bp, Homo Sapiens
  misc_feature (51)..(97): n is a, c, g, or t
acagatgctgagatggcgtttatcgcggcaaaaaaaggtgaagtcgccgannnnnnnnnnnnnnnnnnnnnnnnnnnnnnnnnnnnnnnnnnnnnnnccatggaagctaatacatggtgcactaggtcacacaacggacactgggggtgggtgagtgggtggggtgggcgtcgcccaggcatggcaatgtggggagtgggaggagacggcagtccaccccagccaggagcttctggaggtggtgggcaggaggcgggcggcgtctctggtcgcagaggatggaaggaatcagttagagggggttgaatggaggcactggaggcatggccacattccaagaaatggaatgaaggagtgggacagcaggcagggggccagcctggggcctgggccttttaatctaaggactggggagaaccaagggaccttagaggtcctccagtcctccccatattccaagagggagaacaagcctggagaggaggctaccttaaggtcctaagaaggatttagcaatcggttctccaaagatagcc

SEQ ID NO: 353199 - DNA, 1329 bp, Homo Sapiens
ggtcaggaaccaggagccccaaaagagatcccatagacccagtgtcagctggcgcttcagctgccaaggcagagctgccaccagatcatgaacacaaaaccttaggtcactgggtgacaatcagtgaccaagaaaagaggacagcactgcaggtgtttgacccactggcaaaaacatgactgagcagctttgaaggctgcagtcctatagaatgcataccttcctccctctagacatccctccaccagaagagacatctatttaaaggcacacgggccaaaacgtttgtgcatctgtcactctcgtgtagtttacaaaaatcgtgtctcttattcagtaagatggttactcagccaccaaaatatatttcactcaaggcttgtacatctgaagtttgctcttcaaggaatgggaaccttcctgttaaattcggtgtatggattttaagaaaggaatctagccaatgaggtccaagaagttctcacccattgaatttttaaatggctgttcagttcatgttgtacgtgatggagatttgtcttttgttttatttgcattttacagatttggtataacattttggggagccacctgaaggttgatgtataaagtaaggattagagaaagaggtcgttgtgaccattagtagctgtcctggcccacttaaacaaggttacaaaaaatcagagtcggaagcagccaaataggtcaacctaatgactagactgtacattcccatgagccttcatgtttaagtgtgtacatgtgcgttaaccttgatgatgcgtgaatcccgagggagccggtggcatacaccgttagcttaaccttagcttaaactagctgaaggctcctgtgccatgtcttagacattgcatgccctatcaattactataatcctgagccatggtgtgctactgaaaccaatttttatccaccatctagtccttattaaatgaaacctcacggatcctttgttccgcttatattccatgcataccacataaaagcacacagtgcgaaaactcttgctgatacgcgatattgattctcattgttagaatatggagagtgtttcagcctcgtctgtccggctggagcttcgggatggaaagtgctatgtgtccctgcatataagaatcaccaggccagtgtttctgggttgcttgtctatatgtttgtctatattttttgcctatacatttttcccacgtttccaaacagcacttctcacctattcaataactgaaaaagacattaccatagtggtttacattcttaaaagtaatgctacaaggtctgggaatccatttggagccagatacccgt

SEQ ID NO: 353200 - DNA, 381 bp, Homo Sapiens
attttttcaagcagggatcaatcccgtggccattttttgtggtactttggcctcaattcttcaccaggaatcactgtgtttacatgaaatgacaatttgatactgtatttgatagaaaactatttttttgttaccggggtttacatagaagcacgttgtttataccactaagtgactttggcggggctctcccatggaaacggatggcactccctgaagctccctggtcacaggtggatgaaaacgtgtccgtgggtgacatcaggtggtgtctccaccaccaaaagcagttagaagccaaggagattcctttatctacctagggttcattttcaaaagaaaatttaaactataatttaaacaattaacgttcttttctac

SEQ ID NO: 353201 - DNA, 489 bp, Homo Sapiens
  misc_feature (37)..(37): n is a, c, g, or t
  misc_feature (42)..(42): n is a, c, g, or t
  misc_feature (55)..(55): n is a, c, g, or t
gcttattttttaccttatccaaggattccggattttnaatangcataaatggggnctgactttaaaattataatgtcggcgtcacccatttaaaatgtctggtccattaggtaatgtaataaaagaaggtcttccaaaaatgtatttaacatgaatggtatccatagttggcatcatcataaatactggagtttattgttaaattattaaacatagtaggtgcattaacataaatcagtctccacacagtaacatttaactgataattcattaatcagctttgaaaaattaaattgttaattaaaccaatctaacatttcagtaaagtttattttgtatgcttctgtttttaacttttatttctgtagataaactgactggataatattatattggacttttctctagattatctaagcaggagacctgaatctgcttgcaataaagaataaaagtctgcttcagtttctttataaagaaactcacaca

SEQ ID NO: 353202 - DNA, 853 bp, Homo Sapiens
  misc_feature (786)..(797): n is a, c, g, or t
tgcgatctgtgagaggcctctggatggtcatgggaagatgggctccctggcccccagcccatgcctccctgggatgaagagtccccctcctggcagaatgtctgggctttgcagagcaggccccgggggtgaagtcgcagcttcacttacaccagctgctctgtgagcaaggcttggtgccctggacaaggcccttcccctttaaggaggtccagcctcgcaagctgaaacctcccctcggctcagccctataccaggcggccacagcaggactggccacacccacgccgcacctcatccgtgcacgcgtcggagcacggccagccttccgccacgagccagctgggaagggccgcggccgcctaaagccccagtcaacccagcctgtgtctgagcagacagggcgaacaagcaggccacaccgtctcgagggaggaggccagatgcggccagcgtctccaacagggtgaccatccgctcggcttgctgagcgtttaaacaaatgtttagacaggctgtggggactcccctgagttgagccttggccaggggtccggtgctgtcgcgggaaacctccagccttgttcttcaaaccactcagctcatgtgttttgcactgactagtactgaataatacaaccactcttatttaatgttagtattatttatttgacaactcagtgtctaacagcttgatatgcaggtccttgcatcctacatttctttaggaagttacccatttgtaactttaaaaacaggaaaaatatcagttggcaaatgcaatcnnnnnnnnnnnnaagctaaaggtgggtgaactggaatgaaaatctttctgatgtgtgtctataagcag

SEQ ID NO: 353203 - DNA, 579 bp, Homo Sapiens
  misc_feature (431)..(442): n is a, c, g, or t
gcgacacgcctaaagccccagtcaacccagcctgtgtctgagcagacagggcgaacaagcaggccacaccgtctcgagggaggaggccagatgcggccagcgtctccaacagggtgaccatccgctcggcttgctgagcgtttaaacaaatgtttagacaggctgtggggactcccgagttgagccttggccaggggtccggtgctgtcgcgggaaacctccagccttgttcttcaaaccactcagctcatgtgttttgcactgactagtactgaataatacaaccactcttatttaatgttagtattatttatttgacaactcagtgtctaacagcttgatatgcaggtccttgcatcctacatttctttaggaagttacccatttgtaactttaaaaacaggaaaaatatcagttggcaaatgcaatcnnnnnnnnnnnnaagctaaaggtgggtgaactggaatgaaaatctttctgatgttgtgtctataagcagccttgatgggatatgttagaagtgtcatgaaagtgtgattctacttttgcagaaaaatctaaagatcaatttatatagct

SEQ ID NO: 353204 - DNA, 1604 bp, Homo Sapiens
caggaagggacccagcctcaccctcctggggtggccccgtgttcctcctgcccaccctgccccactgccctaccggggcagcccaggttcccaactgctgcttccacccccttcaccttgactggcttcagttcctctcagcgctcctgcctccaaagcgtgccctgtttcccttccttagcgcttttaagttatttattctgtacttgtggtttggggctctgaggaaaatcctaatcttgtgcctctccccctttgctaggagttgggtgggaagagagggtggcctctgtgccccaggttgtcagtggaggggaaggggtgtcactgcccctctgtgggactgtcatgccagtgtgcccacctgcctggtctacatcctaaagagatgtaccgtcccccctccatgcgggcaccaccactcccaggagccaagctggaggaccgcgacctgggctgggagcagagctgactgacacgggtggaggtgaccctgagccaagttctctggcacttgctggacatgtcccctaccctcttcccaagaggagccatcccacatttgggtagttagtacccaggactggttggactgatcgggttagggaccctagagggttaagggaacaacagagatggggctgcaatgccctgtctggaactccgctctcccgctggggtggttctgattgtggctcatgcctggttgcaaattggtttttaacccacaaattgtgattattttttaaaaagccaaacagattttggcaggagttagaataaatcccggggcctgggcttctctattcttggccctccgtagtctccctccgagaggaggccagagggagaggaggatctcagcaggcctctagccgcttccagatgcagtctggggagtgggctgaaggtgaagggaggaaggctgtgggccactctcccttctgagaggcagctgcagctcaggccctaatacactctttgccctgtggcctctcccttttccccccttctggttggaggagggagaagtgggaagtagcttgggaactggtttgtccacataaacttccccattgttccttggcccgccctcagggcagagccccctgcccaggctgggtaagagatgggcttggtccagcagggaccctgagggaacaaacccttttccttctggggagagagtgcccccccctaccatgtagttgaacaggggctaggagctccccactcccctccctctaacagcaggctgtgtgggtttcaattcccatccttcccaccccggctaggtgtcgtccaccctgtatcctgtgtctgagtgtgtgtgggggggttctgtactaatttccatggccggtggcttttccttccatgcatcactcccccccgcatgcccaggggccacccgcctggcattaccgcatgctggggtcattgggggaggggggtggggctcacgctgtcctgtggtcttgagatttttatttttgcatatgtaatccattctgtacaggtagctaactttgtaaacgctgtgtattccctctgcccccatggctgctggtgtaaataaactgcatctcccgttggtaaaaaaa

SEQ ID NO: 353205 - DNA, 475 bp, Homo Sapiens
  misc_feature (283)..(304): n is a, c, g, or t
  misc_feature (385)..(385): n is a, c, g, or t
  misc_feature (394)..(395): n is a, c, g, or t
  misc_feature (415)..(415): n is a, c, g, or t
gtcattactgtagagtgaaagttcagatagcttcaagacagattgttacctttgctattaatatatatccctatatttatcaccacaggaaataatattttggtaaattttctattataaggtgaagctatttcacatgcgtttttttatagaaattatgaactttgtgaaaatatccatgcaagaattgtccctaagggaaaatataaactaacgaatgctcttacaatcatgaagtcagtacagcttgtggttcatgagtggcagcaaagttgtaaaatgnnnnnnnnnnnnnnnnnnnnnntttaatattttaaacaaataccctttgtgttgaaattagaaatgtataaatattgatatcctgaattttaattctaaaggnaaaagcagnncgccagtgtcttgataaaanatttctcaggtctaggaaattagtcatcaattatattattggagggtttcattgaataag

SEQ ID NO: 353206 - DNA, 370 bp, Homo Sapiens
  misc_feature (170)..(170): n is a, c, g, or t
  misc_feature (193)..(267): n is a, c, g, or t
  misc_feature (335)..(335): n is a, c, g, or t
  misc_feature (357)..(357): n is a, c, g, or t
gcctgatgaggggctgcagcatgcaattcacttcaccagcagtcactaaggtctgatctcttttctaaccatacctggaagatggaatgctggacccagggtatgcatagaaaatgggagttattagaaaagcagctttgcttgctttaacccaggaattgtatttctgnacttttcagacttggactgggcnnnnnnnnnnnnnnnnnnnnnnnnnnnnnnnnnnnnnnnnnnnnnnnnnnnnnnnnnnnnnnnnnnnnnnnnnnngaaggctttgacatatcaatgcaccaggggtcttaccaaactaaattttaagcacttatagctcaagnttctccctctgggatggaacanaacttccacccgc

SEQ ID NO: 353207 - DNA, 556 bp, Homo Sapiens
  misc_feature (73)..(73): n is a, c, g, or t
  misc_feature (90)..(90): n is a, c, g, or t
gcttcagacaacagattatgggacttgccagtctccataattagaaggctttgacatatcaatgcaccagggntcttaccaaactaaatnttaagcacttatagctcaagattctccctctgagatgaaacatacttccaccctgtcatgtgtcagcttcagaagatatcaattgctcaagaaagtgttggacaagcagaaaagcacactgaacatttctggacttgtgaaagagctctgaatatggatctctcagggatattccatccccaccaatgctttaccaatgcgagagctggccaggctgagacatttaatgataacatggaacaatttattcaggaagatagtcaactactcatgtggctttatgattataaaacccactgaaaattgggtcccttgattctcttgatttttcctaagccttactccctaaagtctccaatttgatgaggtatttgatacttgatctctccttgaagtaaaatttggagcaaaatatattggactggaaggcctgagacctcgataagaagaaacatgaaccccagag

SEQ ID NO: 353208 - DNA, 508 bp, Homo Sapiens
gtctaactcacagctaaggtagaaatagcacctgatggcaagagaatgtccagactaatattttcacattggggagtcccatatatgattttaaaaattttaagttcatataaaaagaaaatagagtatttttaagtatacattcacctcagctcaatgtaaagaactactgtgttgatcttgtctcagaaatacagaattatttcacattaaatgtttctgctgacaagatgagttcagggaaaaattatctgaggcagggataaaggaagacatttgttaatttccttttaaaaatggagaatgggaggagtagagaaataggaaaatggtggatggctaaacataaagtaaatcactctaggattacttgctttatcttacagaatatcccattatcaaaacccagaaaatattaaatgaaatatttgaatctcagattcaatttaacaaatgtgatcacaaagacttgcagaggcagagaactaaagacaaaccttttcttttt

SEQ ID NO: 353209 - DNA, 1029 bp, Homo Sapiens
  misc_feature (24)..(24): n is a, c, g, or t
  misc_feature (860)..(885): n is a, c, g, or t
  misc_feature (992)..(992): n is a, c, g, or t
cacgttggcctactggttcagcanctttttaactgggcgttgtttttatgctgatgtattatgccttctttcatcccaatggacccagattcgggcagtcaccaagttgtgcttgtgaggacccagccgctgccttcactttgcccccagacgtggccacaagcaccctacggtccatctccaacaaccgcagtgttgtcagcgaccgcgatcagaaattcgcagagcgggatgggtgtgtacctgtctttcaagtgaggcccactgccccatccaccccatcatctcgcccaccacggattgaagaatcagtcattaaaattgacttgttcaggaataggtacccagcatgggagagacatgttttggaccgaagcctccgaaaggctattttagcttttgaatgttccccatctcctccaaggctgcagtacaaagatgatgcccttattcaggagcggttggagtacgaaaccactttataaagcaaaaggagttgcaggacccacaacatccaagatgaaggggtgacagcagggctgtggccataatgacacttcatcctagagcagggcagtgagccgtgaagttcctagtgggaccgtcatcaccattatcatttgatcctgtcggctgggggcggctggtctccttccaaagcagctgcacccgagagtctctgactccacctgaaagaatgacgctggcttaataggactctccattgctaccaaactcctcctgcacggtcttgggtgcacccaccagagggtactactattatggaaaaattttgcctccaatcattagggtgtcttgatggcgttaactgatctttccataaaaatagattcagtcannnnnnnnnnnnnnnnnnnnnnnnnntaagttacaccagtcctctgtcaaaaaagcttaggtgacttttcttgatgcaaagctctgattcccacaggaatataaaaacaaagaaagagggaaacatccctcgngaaaaaaatagtattgcttagaaaagaaccattttct

SEQ ID NO: 353210 - DNA, 459 bp, Homo Sapiens
  misc_feature (385)..(385): n is a, c, g, or t
  misc_feature (388)..(388): n is a, c, g, or t
  misc_feature (392)..(395): n is a, c, g, or t
  misc_feature (401)..(401): n is a, c, g, or t
  misc_feature (445)..(447): n is a, c, g, or t
aaaaagagaactcacctcgcttttcccaccctgtgcccctctggtactggcgaatgcctctccctccccccacatgcacgcacgcacacaccccagtggtggggttcctcgagatggcatccccatcagggtccatgtggtggggacagtgccacagcctgtggtccccatctgagagggcgcggtggtggccaccactcccacaagacctccacaactcttggctggaccctgtgtttgaccagccccggacacgtctccactgacgacggacagaggagagacaccactgggagccaccctgccctcctgctattgtggaggccaacaaagttttgaaccgaaaaccaaaaaaagaaacaaaccaaagatttaaccatttaanaanaaannnnaaaccnacagacaactccgctacctttttatatgttggaaaaaaagtgannnaaaattaaaaat

SEQ ID NO: 353211 - DNA, 447 bp, Homo Sapiens
  misc_feature (19)..(19): n is a, c, g, or t
  misc_feature (21)..(21): n is a, c, g, or t
  misc_feature (159)..(159): n is a, c, g, or t
  misc_feature (304)..(304): n is a, c, g, or t
aattaactaagtatctgtnanccatcaaataggctcagataaaataatgagccctcaacaagctggaatataataacattaggactttggagttcagtgggcagttagatgcactaatggcactgtctgtgctgggaagacatatattttatttggaanttttgtgtggaggtgattgcacattatatgaatagctgtgctaaatgcatgaaggttttctgccagcataggaggcgattaaggccccctctgccagataacagctcactggagggaagtaatggtggcaaagtaaaatctgaanacagatgatttcccatttaatagtccattgactctcctcctacagccactgtggtgatggtgctgctctttattttcatttcacaaagaagcacaaggtattctgagattttttaggtcatacattttctttcaaaaagaaag

SEQ ID NO: 353212 - DNA, 875 bp, Homo Sapiens
  misc_feature (849)..(849): n is a, c, g, or t
  misc_feature (857)..(857): n is a, c, g, or t
aaaatgttgaaccaattgtgaattacttatgtattattcatttctcatggggagagtaatgctgttgaagaacattacattgtaaactgccttcatttttggctctttgtttatgttcaggtttagtttacaaacccatttaagtatggaatgatttatatggggtcaggtgctccacaaaatagacctatgagaccaaaaatgacctaggctatttagacgacagcatgaaacttccacgttagttctcagtctataaaggcacttaccggtctctggtgtggtatgaccaatagaaacaccttatagtttgctttggacctcattttggaaaaataatctgcctttctaattgttctgcataggttaaaatgataaatttacattctttgaacctataccagattgtggtgtccgagtgaccggcacactgtctgacacacagtcagtgtgcacgtatttgtctgagtgaatgaggagacctgagaaaccggtgacgtggcacagggaagccagctggcccaggattccgtacatggccgcaagcagactaacgcgttgacgctaatttaatgtattttacctcacactaaggtcatgcttgataaagacgttaaactcaacttgtaaaatggtagcccagtgctatgcaaggagtggggtgctcattagtgttgaatgaacacatttgtaatactacatgtaattccatctgactgctttgttaaattttcagttaggaacgtagatactgtaaagtccacacacacattaaatcttgttttccccgaaagtatgggcctccaaaaatacttgttggggaaaaccctgttcaccactgttttggangtttcccnttttcctttggacttgga

SEQ ID NO: 353213 - DNA, 1021 bp, Homo Sapiens
  misc_feature (3)..(3): n is a, c, g, or t
  misc_feature (42)..(42): n is a, c, g, or t
  misc_feature (498)..(513): n is a, c, g, or t
agnttattttaatgaaacatgtacagccagatagcattttgnaactttagctctgtaagcattaaatggcaaagtccgctatgaacctgtggtaaattcatgcaagtagatataatggtgcatggatataagaaattctaatgaccctaatgtactaaaggcgacaatctcttttgtgcccatattattgtaaacttatgcacatcgctcatgacactgagtattcactcttcagactgcttgtttcatagcttatcccagaggattaaagataaactgggtctcaaactttgattctgtgtctgcaatatttcctctctcataagtgactccactattgtaacttcatggttggaaaatatgagggttgatatatgtcttacttgtttaaatctgtcgcagaatataccaaagctaaataataactatgctttcattttagccgatctccagaatgacagtattaacatcaaacattgtattgatttagaattctcnnnnnnnnnnnnnnnngtacatagcacagactattttttttaaagacgtaagaatcagattaacaggatcatacttgtaaactttttttggttcacttggctatcaaatatgaaattatagaagtatcataggggtcattgtaacatcttttagagaaaatggctatcagtgtgaactgtcataattacgtggtaatagcacccttagtaaaacttgcaaaatgaaactaataaatcgttatcaataatgacaatgagggggaaagtattatacttgttgactgtgttttgttttttaaaatggtctccacaagcgctccaattttttttagagggggatattacttatatagaaatatctttttaccacgccttttaaaaaacatttttatggctggaaaaggccttaaaaaaataaccgtattttccttttaggaaccaaaaaaatttttttggaaacttttggccccttgggggccaaaacggaaaaacaaattttccttaaccaaaaaaaccaaaggggg

SEQ ID NO: 353214 - DNA, 499 bp, Homo Sapiens
  misc_feature (48)..(140): n is a, c, g, or t
aattttttcttttaatatagatagggtctcactatattgcccagctcnnnnnnnnnnnnnnnnnnnnnnnnnnnnnnnnnnnnnnnnnnnnnnnnnnnnnnnnnnnnnnnnnnnnnnnnnnnnnnnnnnnnnnnnnnnnnttaaagaacaaacgtgctatcatcgatacatactgttaggttgtctttttttaaaaaacctaatgtaatttgttcatctttttatatctgtaaatatagctcaacacagttatattctttttgtgaatgtattatatctacaatttaccttttttcttagattttacatgcattttcccaaatctttgtgtttgcctatctgtaaaggtaatacattctgattacaaaaaatgaaaatgttacatagaaatgtaccgttatccatctaccagataactattattaataatgtgtatttatttttccaggaattaaaaaacatctatcatataagtattgcaaataaaacttaaaaagca

SEQ ID NO: 353215 - DNA, 925 bp, Homo Sapiens
  misc_feature (612)..(612): n is a, c, g, or t
caagaatatgaggaagtcttcttccttcgcgccttcttcttccttacgctccaggcagcctgacagagccgctcgaaggctctgctggccgcggctagccggtttacccattccactggacccagccaccacccactcctgctgtctggtaaactttcctcctgtttctggggccatgtctggcatgaagagtttttactgaatagttttcattgatcgcaggccagttctctcttctcacccctttattgaagtgacagtgaaaatctaagtgagaaagcactgttacaggggctgaaaaggctacaggagaccagagccattgacttttatttttaaaatgaagatctcttttacttgaaggaacttaagaattttggcattcaaataggggctggaagacttgaaagcagtagaaatttcaccacaggtgataggaacaggatgatcacgaaatgaatatctcctgacttgcacacctagtgagcagagccaggaaggacctccttcaccttagcatttggaacaggctgcaaagttcattcttcctcatagcagcccctgcattcagtttggtttagttgttttatgtggtttctagcctgatttttnttttcagggtgcagcagaagtctcaggtagctgagaagttcatggaatcttcttatttgctacacctttcactactgcttgtgatatagtgcagggttgggatgtgcagacatttctcaagtgcactgtgtacctacacagcatgctgcaatttggctactgaagtcaagagaaactggtttgaacaactactgagtgtaacataggaagcgcatttcatttgataacaggaacacagttttgtgctaataacatgcttcgccacttcccacaccacaccatcccccccatcttccacacacctgctcacatc

SEQ ID NO: 353216 - DNA, 2440 bp, Homo Sapiens
  misc_feature (1592)..(1592): n is a, c, g, or t
  misc_feature (1776)..(1851): n is a, c, g, or t
  misc_feature (1858)..(1932): n is a, c, g, or t
  misc_feature (2165)..(2165): n is a, c, g, or t
  misc_feature (2169)..(2169): n is a, c, g, or t
  misc_feature (2173)..(2173): n is a, c, g, or t
  misc_feature (2181)..(2181): n is a, c, g, or t
  misc_feature (2367)..(2367): n is a, c, g, or t
  misc_feature (2399)..(2399): n is a, c, g, or t
  misc_feature (2403)..(2403): n is a, c, g, or t
  misc_feature (2408)..(2408): n is a, c, g, or t
  misc_feature (2416)..(2416): n is a, c, g, or t
  misc_feature (2418)..(2419): n is a, c, g, or t
gcgtggtcgcggccgaggtacgcgggagtcacatccgtttgactttggttgtgacatcttcctttcaggatgatggaattagatgcagtctgtctttgagtgagactggtcaccatcagaggagttttttctaagtgacgtgactagaagttgaaatctacttccctgctaaagggcacaggggtggtgtacaaagaaagctaccttcccagagcaagcaggctgcattttagctatggaagtgacctgctgtgacactgtgctctcttctgtgggcttaatggttcctttgctatgaagtggcaaattacatgtagagtgtctccttccttttcagagaacagttaatcaaggcaaatcagcaagcccccaaagtgctgtaatttaacatcatgattaccaccttcgaagctatatattttgcatactttaaaatcacctaacttggactgcttgaattacattggcttttagaaccgaaattgtaactatgtattgtatttcatgggaggtatattttatgagctttttggctttcttttttcccacagcaactgccaatgaaggatgaatcccctttttaaaaagttgttgttgttgttgtttatttgattttgagttaggagggataatagagaagtccatttaaaaattatttttagaagctaaagaaagtaattatgcttcctgtgaattgtcttttactggcatctttgttttcctctttgatgttagtaaatttggtgtaatacgtggggcttccatatttcaaagtggaagctttcttctctgaagtcgatatatggttttgaattactagagctttggtcagtatttccttccctatatgtcacagagggcaccactgagaactgcgtgcataggacctcaaaatacaaaattagcagggcctcacagtcagcttcctcatggctagtttttcccccttatattacaatttttgttttataagtcatttttttcctgatatttccaccacttttcagagtcatctacaaaatttttctttcctcaagaaaagagttccttttgccttattccttatgccttccccactggtattgagggttttgataataaattggtaggaaaaaaaagtacctcctagaaggaagccttccccaccatttccaggtgccaactgctaagcagatatattccaaaaatggtaactgtcatgtgcacactgttggttatttttaataagcctcttcctactagaacattttattttccttgttcaccatacaatcatgtactctttaacagaaattgcttttaaaaaatatctggaactatctttaaaaaaactttattaataatcatgtatttttactgatcacattttgaaatgcctaaaagactttattgttctaattatccagatgtacctttgtaaaatagctcttttatgaattagctgataaggctgtatgtttctggaacaaaatattggtcatctaaaaactttctgttttctggggtctgggaaaatagaaaataagatttcaaatattaaataagcttaaaggaaccaagcatgtgactttttatttgtattctggttgatntgtcttgtccaagttatattagaaaagttgaggagtcgaggagcctgtaattaattttcctgtcagtgactgtcagacatcttcctgcttattagagcatccctagcaacaaggctaaaccttcatgacagtgctggcaggtgggcttgccctagcatgtggggcaggtttgttgtttttttannnnnnnnnnnnnnnnnnnnnnnnnnnnnnnnnnnnnnnnnnnnnnnnnnnnnnnnnnnnnnnnnnnnnnnnnnnnattgatnnnnnnnnnnnnnnnnnnnnnnnnnnnnnnnnnnnnnnnnnnnnnnnnnnnnnnnnnnnnnnnnnnnnnnnnnnnaggccagcttttatgacgcacctgaagataactttggttataaccctaccctaaatgaagcatatgcctctattttccctgcccccagtgctgggcttcttcacataccaacatttctgtgcttttaccaacagcattttagctcagaaggctcgctaactttgggcatttgctgtattttggttttgaaatacttgtaattggacttattcttggaataatattttagttcncagncatncaagggcncatttggctgacggagctaataagcgtaataaaacgcttagtagtttataccatcttttagttaaacattttaaagattaagactattcaaatgtactttgcggaaattaacctgtttgtatgcctggctttgtttacaaacatatatctttatctatatatatagatacagatacagatacatanctggggaacaaagaaatacctgtaccattccnactnctctntgataccncnncctaggaatggagacaataaa

SEQ ID NO: 353217 - DNA, 356 bp, Homo Sapiens
  misc_feature (25)..(25): n is a, c, g, or t
agtggactacaataaagattacatncaccagactttaaataattgcaatccactgaaataacagcatttactaatctcagcgaatgctcaatttattgagcattacacctgaccaaatgtcttaattcaacctttactcaatcctgaatcatctgtataaattgaaataacagttgtcatacaaactttaagtaattctttcactggtaccagatgataattctgtgacatgccaatagattaacagatgagggaattaatttattatcttttttcacttaaccaaaaattttttgttagcctaggcattctgctagattttagttacaaatggaagcaaggcagacatagtctca

SEQ ID NO: 353218 - DNA, 536 bp, Homo Sapiens
agagggctgtaactgcaaggaacaacgattgagtgttcaagactgcctttattagctttacttacaagataatacattggttcacctttctatgcacaataaaagaagaattgggtctcaattttagaagttaagcttttttcagtacctcttaatgaaatatttttaggcttttgcatacttaatttgagagggacatctcccttatccggatagctgggtgggattcttatccctgtgcagtagcaagtgctgactgggcaggaggtaaaaagagattagttttgtggacccaatgagggactccttttaaatgtaagttttcaatgatttgtataaggtacctactgcattacgtctaacacagttgtataattttaccagtaaaatctttatatgtttgaatagattaatggcgaggataaatagaggcattgtttttgctactttgcatatcattggccaatcaatgattgattgatttgtatatccttttacattaccgcttcttgctgtggtagtttctgtaccaaaaa

SEQ ID NO: 353219 - DNA, 383 bp, Homo Sapiens
  misc_feature (178)..(240): n is a, c, g, or t
ctcaagcagtcctcctgtagctgggataacagatgcgtccagctggaatgtatagttttaaaaagctctcaggtaattgtgtaaaagcacacatagaagataatgacctagaagcctggtaatgtacctgtgtaatgacactagagttagaaaaagattgttctgcacttgatgtccnnnnnnnnnnnnnnnnnnnnnnnnnnnnnnnnnnnnnnnnnnnnnnnnnnnnnnnnnnnnnnnttctgccttgaatggtttccttggtatgctagaaagcaccattagtgtacctaacacccaaaccctcaaaactcccctcttgccatctctctgcctcctccttccctgtatcagctaaaggagaggttcagagattaggcggg

SEQ ID NO: 353220 - DNA, 841 bp, Homo Sapiens
cacttaaccaatgagctcagcatctttttcccctacctgcttcattaccccctcttccatctatagactttgtcatttttgtctttaggaaaagatctgaagggatggtaaagccccgctgctgaaacccagttagagaaacctgtctcaggacacacttgccatctagggctagcttgaaagagcctgaggactgcctttaactgaatttgaattcagcattgtcctttcttcttagtatttgctgcataattgagagcagttcacatcgatttcctggtaggcgtctgcattccctgttgtgttcctgcttctccttcagtagctgcacaacttgcgcagatcgacacactgttgtcacttcattctccccgtctgagaaggatcttgtgttcagttagagtcgtggaaaaatccctgatccttcaaggtcagtcagacagttggcaacattataattaaaaataagaaattaagactttaaattaaacatttggtagagtcatcataaaacaccagaccacttagactcaggctgaaccatactctttctattcttatttttcatccttgttcctcacggttcagtgaacaggctcatatcatgacagaatggacttttaaaagttagtacttaaggaaacttctttaggtggaagaaagtaaagttcttattgtcagtgaactttattagcaccagaaatctctattgatgcttttaatgcattgcctgccttcaggttttcttcttaccccacccctcaataagatttggtgaattgtaattctagtaaaacatgtcataccattggttttcctaaattatcaactttctttcatt

SEQ ID NO: 353221 - DNA, 499 bp, Homo Sapiens
  misc_feature (53)..(61): n is a, c, g, or t
  misc_feature (106)..(121): n is a, c, g, or t
gggtgctccgataagggaatgctagaaaatagatgagaagtactgaaagaccnnnnnnnnnaattgattagaaaagtaagtctctagggtctttgaatgctggaannnnnnnnnnnnnnnngtctttcccatctgtggcagctaaaacaaaaatcactcaaaatattcaggtttacatgttagctctctctcatagggagctgccatacctcacagttcaaagtgtattctatagatcagtaacattatactgacatgtaattgcaatttactatgcagcaaaaatgattcaagaagaaaaataacctacagtgtctgtatacctttgtatacacaattgcttaagttactctgcttttaacatttgtacttggataaaatgcttatgtctgtataggaatgtcacagtgcaagatgctgctagcccaggcacaaagtattaaaattattttgtgaagattggtggttgtattaaaactgctgtgccattatacctcca

SEQ ID NO: 353222 - DNA, 1155 bp, Homo Sapiens
  misc_feature (533)..(569): n is a, c, g, or t
  misc_feature (676)..(676): n is a, c, g, or t
gcttcccgtatccagcagccaccgtcgcggccgcctaccgaggggcgcacctgcgaggccgcggtcgcaccgtgtacaacaccttcagggccgcggcgcccccgcccccgatcccggcctacggcggtgttgtttaccaggatggattttatggtgcagacatttatggtggttatgctgcataccgctacgcccagcctacccctgccactgccgctgcctacagtgacagttacggacgagtttatgctgccgacccctaccaccacgcacttgctccagcccccacctacggcgttggtgccatgaatgcttttgcacctttgactgatgccaagactaggagccatgctgatgatgtgggtctcgttctttcttcattgcaggctagtatataccgagggggatacaaccgttttgctccatactaaatgacaaaaccataaaaaccttccaatgtggggagaaaggaagctttccgaggcctgagtattgcaatacatgcagtagtacatcatatttagcaagctctnnnnnnnnnnnnnnnnnnnnnnnnnnnnnnnnnnnnngtaagcgttttttatatcatataggccagcaagagtgatgggaagcaagaatgagggacaaatagaaggggacagggaattgaggaaatctgaaacttattttagantgggcaattcaaaaattaggagtttaaatgctgaggctgggctggagatggagatgatatggaaatcattaatggaggagatgagagccataagagaaaaattagggagcatgaagttgaggcattcgtatgagatatcgttactgggggcagatcatctcatataatgaaaaataatgttgaaattctacgcattctgcacttgcatcatgaacttcttcatgagtttacatcatgtgattcaaatgtcttatttttatcgcatctttaatcttctgcatcttatgtcgttcgctgtgccaaatctgtctatttcctctgctgatacacgtggggctctcgctgctcgatgctctatctctcgcaagtttcgcactttgcctcagaggtcaagctcccatgtccgcagtcgtcccccaaattttgcgcatgcgacacttctcaagagtccttcacgaaatttccccaaggaacccacc

SEQ ID NO: 353223 - DNA, 422 bp, Homo Sapiens
  misc_feature (9)..(9): n is a, c, g, or t
  misc_feature (25)..(25): n is a, c, g, or t
  misc_feature (284)..(284): n is a, c, g, or t
  misc_feature (293)..(293): n is a, c, g, or t
  misc_feature (330)..(330): n is a, c, g, or t
  misc_feature (384)..(384): n is a, c, g, or t
ggtccagtnccgctgatacacaggnccattcaggtctattagacacacagcccataatcctctgaggtaagtgcctcaccatcgccataaagggcaactcagtacaaagtagtgtgtgagaaggtatacaacagcagaatcatgagagggaaaggtaggttcatggcatttggcttcatgaaactaaatacgataagacatagatgaagcagggaagctacaaaaagcctctttcaagatgtaggtacacgggtctcaatttctttctgcctctttcctgcacnagttaactntcagagtaaatatgctatcatttgcacagcaattcanagaaaacgagtttatcttttaaagtttattctttggatcagtcctggagaaganacatccaaaacatcctgccacataatcaccaataattt

SEQ ID NO: 353224 - DNA, 663 bp, Homo Sapiens
  misc_feature (43)..(43): n is a, c, g, or t
  misc_feature (48)..(48): n is a, c, g, or t
  misc_feature (72)..(72): n is a, c, g, or t
  misc_feature (398)..(435): n is a, c, g, or t
gaaacccatctacagagccccttcctgggtcccctcggacccnagtgntgtaacccgttacccaaatgtttnaccaaaccaggggcccgcccccacgccttagatgtgtttactcgcattcacaggccacctgttggtttgagtttcatgtgtctccttccctggcctaggttgacttgagcacacaactcgatctttcttcccctccatcaaggcagtgtgtgaggactgtgtgggaatgacatttcttgtacataattagcacagcacctagagtatgaacttgtactattgttctgtaaagagggtgaaatagagcttattgtaaagtgtcgggagaagtatagtattgtatttgtaacaatatcgttctttgtatacacaaaactcaatgatcnnnnnnnnnnnnnnnnnnnnnnnnnnnnnnnnnnnnnnctacacgtgagcctggaatgtggacaccgcacacccactgaatgtacttccttgacagtctggtcactggtccctccctccctccctcctccgtcccgtggccacagtcatccagtttggggttgtgatgtatttactgtgctatctatcttcctttatttaactgaacgctaatgtctgtataagagttgctgcaacaataaacaagaacttcacctcttggaagac

SEQ ID NO: 353225 - DNA, 213 bp, Homo Sapiens
  misc_feature (58)..(58): n is a, c, g, or t
  misc_feature (64)..(64): n is a, c, g, or t
  misc_feature (69)..(69): n is a, c, g, or t
  misc_feature (92)..(92): n is a, c, g, or t
  misc_feature (97)..(97): n is a, c, g, or t
tctggcctagaaaggctgtggcttatgttgggattgatgatggaatctgccagaacantttcancttantcttcttgacttttggatttttntcttntctttttttctggaaatatttcggaaataaagtgacttcatttttcagcataaaagtatattctaaccacagggtaacacatcgtttttaacatgaaaataaacatttaaacattc

SEQ ID NO: 353226 - DNA, 1104 bp, Homo Sapiens
gattaccataactatcgtggtggatatgaagatccatactatggttatgaagattttcaagttggagctagaggaaggggtggtagaggagcaaggggtgctgctccatccagaggtcgtggggctgctcctccccgcggtagagccggttattcacagagaggaggtcctggatcagcaagaggcgttcgaggtgcgagaggaggtgcccaacaacaaagaggccgcgggcagggaaaaggggtcgaggccggtcctgacctgttacaatgaagactgacttgctatgtgggattacaccagaagcttgcagtggagtaatggtaaggaaatcaagcaaccttaaatatgtcggctgtataggagcatattctattgcagaagaccttcctatgaagatcatggaatcaaatacgggacattgaactaatacttggactttgatatgaatttctttaacaattttctctgcagtgcaagttattaaactaaagctactctattttcaaaatgtgttccaacagaaatccttcataactcctagcatggtatcttaataaagaataaagttcttttaaaaatctgctctaagtagatttttccccttttttaaattaaggatcccaacagtggtattttgaaatattctcttgaatttgtgcatttaaattttattgcagtggtatagatgaatgccactgatggtatccttaaattttatttctgctcaccaaggttaatcatgattgtctatatcttttttatagtgatcacttttgaattgtgttcagatatgcagtttcaggtgtaatcatcagagctggttagtcaggcattccagatagtggttcttttcagaacctttttaaaagggttggttaactacctcagtagcagaggattgaactataccctgtctgtactgtacatagaaaatccttgcttttgtcgtattttgtggctgaaaaagcagccttgcttcttcagatattgtagttatttggatgtataatagtttagcaagatgttacttttgtaagacatcagatgttcaaaaaagtgcatccgaacttgtactaaatactgcagtgtccctttataaaa

SEQ ID NO: 353227 - DNA, 1140 bp, Homo Sapiens
  misc_feature (960)..(961): n is a, c, g, or t
  misc_feature (1000)..(1000): n is a, c, g, or t
aaaaaaacagaggcttttgctttcttgaatatgaagatcacaaaacagctgcccaggcaaggcgtaggttaatgagtggtaaagtcaaggtctgggggaatgttggaactgtcgaatgggctgatcctatagaagatcctgatcctgaggttatggcaaaggtaaaagtgctgtttgtacgcaaccttgccaatactgtaacagaagagattttagaaaaggcatttagtcagtttgggaaactggaacgagtgaagaagttaaaagattatgcgttcattcattttgatgagcgagatggtgctgtcaaggctatggaagaaatgaatggcaaagacttggagggagaaaatattgaaattgtttttgccaagccaccagatcagaaaaggaaagaaagaaaagctcagaggcaagcagcaaaaaatcaaatgtatgacgattactactattatggcccacctcatatgccccctccaacaagaggtcgagggcgtgcaggcagaggtggttatggatatcctacagattattatggatatgaagattattatgattattatggatatgattaccataactatcgcggaggatatgaagatccatactatggttatgaagattttcaagttggagctagaggaaggggtggtagaggagcaaggggtgctgctccatccagaggtcgtggggctgctcctccccgcggtagagccggttattcacagagaggaggtcctggatcagcaagaggcgttcgaggtgcgagaggaggtgcccaacaacaaagaggccgcggggtacgtggtgcgaggggtggccgcggtggaaatgtaggaggaaagcgcaaagctgatgggtacaaccagccagattccaagcggcgccagaccaataatcagaactggggctcccaacccattgctcagcaccggctcccaaggtggtgatcattctggnntactatggttacaaatctgaaaaccaggagttttatcanggatacttttggcccacaagtggaagtagaaacagtagggcctctgtaaaaatggaaaactggaaaggttgatccagaaactcaccctaaatcctgacggggggcccctataatttggggccttcgggcaggatttcccc

SEQ ID NO: 353228 - DNA, 445 bp, Homo Sapiens
  misc_feature (20)..(20): n is a, c, g, or t
  misc_feature (355)..(391): n is a, c, g, or t
ataaacatttaatgtaaaancaaatgttcttttaaactgaattttttttacatctactgtaccattcaaatgctttatcatcttacaggatttcttcaaaatctgttatcaagggtacatatagaaaagcactttttttataaatagaaacaaagggattttttcagcttttacgatgacataaaaagtttactcaacagaagtaattttattactatttggggtgggaatcaccaactttttgtgcaaacaatgctagccttcttttaagcattaagagcataactgcttaagaaatgacataagcaataattccgctctcgacgaattcgagctcggccgatttggcctgatnnnnnnnnnnnnnnnnnnnnnnnnnnnnnnnnnnnnncgccccaccgcggtgagctccagttcgcccatagtggtctatcatcatctcctt

SEQ ID NO: 353229 - DNA, 413 bp, Homo Sapiens
  misc_feature (10)..(10): n is a, c, g, or t
  misc_feature (13)..(13): n is a, c, g, or t
  misc_feature (56)..(56): n is a, c, g, or t
  misc_feature (64)..(64): n is a, c, g, or t
  misc_feature (74)..(74): n is a, c, g, or t
  misc_feature (93)..(93): n is a, c, g, or t
  misc_feature (103)..(103): n is a, c, g, or t
  misc_feature (124)..(125): n is a, c, g, or t
  misc_feature (148)..(148): n is a, c, g, or t
  misc_feature (159)..(159): n is a, c, g, or t
  misc_feature (177)..(177): n is a, c, g, or t
  misc_feature (181)..(181): n is a, c, g, or t
  misc_feature (188)..(188): n is a, c, g, or t
  misc_feature (197)..(197): n is a, c, g, or t
  misc_feature (200)..(200): n is a, c, g, or t
  misc_feature (205)..(206): n is a, c, g, or t
  misc_feature (222)..(222): n is a, c, g, or t
  misc_feature (228)..(228): n is a, c, g, or t
  misc_feature (236)..(236): n is a, c, g, or t
  misc_feature (289)..(289): n is a, c, g, or t
  misc_feature (333)..(333): n is a, c, g, or t
  misc_feature (340)..(340): n is a, c, g, or t
  misc_feature (386)..(386): n is a, c, g, or t
tttactagantcnattttaaattggggggttgggactgggtgatttcgacagtatnctttcagnccttaaaatntgttgattctatggaatancctagaaagnacagaccaagaatgatttgcnncagatatgacctacaattaatanttggaaattgncacaattttacaggtatncaangaacaanccattatanggnagtgnnaatatctggaaaaatngaatgncaattaantaactatgcacttgcttttctataaaaagcaaaaagagagagagagattttgntctgcaaggtggtcatgtctatcaatatgttccctaaaacaccngcagaanacattcactcatccattccagagcagatagagagaagcacagaagnaaatctagaggcaatatgacaaaaaac

SEQ ID NO: 353230 - DNA, 343 bp, Homo Sapiens
actattttaaaatctttattcaatcagatccatgcttatttacattacctttcatttagaattaaaatatatcaatctgtagtttaaatcatactttcagccctttacaaaatatgtgattaaagttttcatggtttaaaatggacctagaatatggaaaatgggattcactttaatgaaaatgaaaaattttgatacactagaacataaatgtatacgtactaaacatacagtattaaaacaagataaaacatctacagttttcttttttcttctattttctaaatattataaatcatatacttttaataagcattcaaataaaactctcaataaatgccaa

SEQ ID NO: 353231 - DNA, 651 bp, Homo Sapiens
  misc_feature (354)..(571): n is a, c, g, or t
aaaaaacaaactcttatttaatttttagttaaaattaaaacactagtacttcagaatatagatacaagtacaccatcttgaagaatttggagtttttcagggcaattcaaatgacctcattttttgttctttttgtattccagacagtgtttctgtcattggatctctgattggtagtgttaataaatattctttcagtgtgagccagattcataaaattaattttcttcattttagtagtaaaaagtagtctaatagctttttggtcagcttgatttttgtgtgtgtgtaacattcaagggcagaatgacaggacagataagcaataagaaatgtatagaattagaaaatatnnnnnnnnnnnnnnnnnnnnnnnnnnnnnnnnnnnnnnnnnnnnnnnnnnnnnnnnnnnnnnnnnnnnnnnnnnnnnnnnnnnnnnnnnnnnnnnnnnnnnnnnnnnnnnnnnnnnnnnnnnnnnnnnnnnnnnnnnnnnnnnnnnnnnnnnnnnnnnnnnnnnnnnnnnnnnnnnnnnnnnnnnnnnnnnnnnnnnnnnnnnnnnnnnnnnnnnnnnaaatggtcggtcctctttcccccaaaaaacctaattggaactgtaactccccctgtaaatcaaaactgggggttgaccga

SEQ ID NO: 353232 - DNA, 685 bp, Homo Sapiens
  misc_feature (266)..(280): n is a, c, g, or t
  misc_feature (612)..(612): n is a, c, g, or t
ccgctggcctcccagcttaggcccaggtgccaggtgtcatggggtctcctgcccatcttcccaaggatgccattgctgtcttcatcgtcttcccccgtgtgagacactggttgtctggtactcggcgacagtgtaccagacgcgcaccctatgtgaggtgctttaaaaaacctgtcctcaggaagcgcagtctggtggaagagatgagcgctgaacaaatcactaaataacacaaaacaacaatgtaagcagcactttcttgtgtnnnnnnnnnnnnnnngcacgtcctgtcgatgaattttgagtctctctgccttgcctgtcccgactccctttcgcgcaccgtggcatgagaatctttcctcacgctgttcgttgcggtattgctgagcattgatgttgatttgaaggaaaagccgtggttggacccagctgtgtgtttcactcacgtgcaattgagtagctgttgccaggctgtccatgcctgttgtgactaccggttggggtcagatttggggtgaagaatgagtaagtttctgcatgctttgtctctacctgaggacactttctacaacaagccaagtattaatctctccagccctgcagattttnacctggacttgttcagccccatgcgtagactcccgctgcaggcctttggtttgggttcaattgcatgcagccc

SEQ ID NO: 353233 - DNA, 1582 bp, Homo Sapiens
  misc_feature (457)..(457): n is a, c, g, or t
agcaggcggtaccccgggtatcgggatatcgtcgacccacgcgtcgcatgcctggtgtgactaccggttggggtcagatctggggtgaagaatgagtaagtttctgcatgcttcgtctctacctgagacacttctacaacaagccaagtataatctctccagccctgcagatttacacctgacttgttcagccccatgcgtagactcccgctgcaggcctctggcctgatggctcactgcatgcagcccctggcgtgcaatactagtgctccacggcgcgatgtgcttctagcccttgcactgcacctaggctcagggttcaaacggccagcccgaaaagcctgcctgccttctttctggaaacagcacgtccccggccgtgtgcctgcccctttctctactgagctagtccccaaaccaaaggcaagccccctcgggcctcgggggatggggccgngcacacccctgactccgccctgtgtctctgccccatacccctgccgtggggccgacctgggggatgcagacatccggctccgtattcctgcctatcggggccaggatgcaaaaacaatttttgcgtaaaagatgtcacactgatctgctggagtggggtggacacatgaattcagttttatcatgaacactcgccactggctgcttgttaattcagggataatggtggcattcttacaaactgctcgggaaatagaatgacgggaacacttttagggagcccaggaagttaccagggacattggtgtcgccggcccaggcaacagcagcgtacgcttttcaaagatcattgagttgtcttagaatttgaagctgtgtaatgacaatgtcacctggagttcgtctccatttcttaactttttgttgcacaagtatttggacagaagtcgaactgtgaatgagatactgaaatgcactaaattgtattacattaaactggagttacttgatacaatgaagaaatgcatctgatctacttgtatttattgtctcagaattgtacgttgtgacaatcaaatgttacttgcctaaatgccaggaaattcaactggccttttaatcagcaagatcgccagcaagtactgtaactgtaaaggaaaatctctctctctggagaacccacacaaaccattgacctgagtgcgcatgacagccactggcttctttttctatgattgaaaatctgccatcgctgactgttggccagtttcaaagggacccattgtatacagggtgcaaatgtattatacggatgtttccttttgtacacttcatttttacaagttttgctactcacaagctttatgtagtggaggatagaggtatttttggtctttagaagcttgtcggggtgagggctgctaacttacacttcagaggcctgtgtcccaaaggcctggctgcgtttgccgtgctgtgcgaggacctgtgtacacaggcaggtgtgcgcctgcccgagcgcgagtagctcttgtgtagtggtgaaatgctgcaggcatctgtttattaaaattgctgctgtgaaagacagggataaaatatccacaatataagagaaagcgacaaa

SEQ ID NO: 353234 - DNA, 1162 bp, Homo Sapiens
  misc_feature (73)..(86): n is a, c, g, or t
gcagtagggagcaaaactattcttctcaagcatcctttacaccatactttacttctggtatggtttattaacnnnnnnnnnnnnnnaaagtgaaaaactgtgttgggggggagacactactcctacttatcttgctcataaagccttttctggtgggatattaaggccctggtgtcttacagaaaccatcacgtatgtcgcagcagcatttcacccctgaagtctctaaactctgagcctgaaaagatttgtatttaatacacataacattttttagttcattctgcctttcctatttgttccagtttttgcttggttttagtttggaggggaacttaagtacacagatccttatctctccccatcccctagcctcacaaaacacagttgagagtcttttaagtacctgagctctcgaagctacccagaactgaactagactcccctaccttagactggtaccctcaaacacaggactgaagcttaattgggaatttggctttatggagaaaagaatctttttcaaagtttgtgtcggaaggggagggtgaggtttgcccactgtctctgcaggaaggctccggcttaatctaggaagtagattccagctgcacgatgaggaacacattagcttttgggatcaaaccaggaatatgaatctgtaattattaagctcattgccaacccacaagatatgtttctgaaaacctgtagtttcttaatttaagtccatccccttcattaacgctacagttgtgactcacactgatcccaaacttttaagtgctaaatattaacatttagcattaactgtcttgtcaagcgaaaggccttctctacaacctagtccatctcacttctggtgctacctgagttggacagaattctagctcatggttgctaggaaagctaggcctctgatcatagaagcagatagcttcagtcccagtctaggcctagataaatgactcttattaccacaacccttattattttccaatttcctttctcacatactgtacacaggtagtattttcaatgtgaatccaaagcttgtctggttctctgaaaataattttttcccctttaggttctttacattgtgataatgctgtatttaaagagaatatttaaatgtaatattaaagaaatattcaaaaga

SEQ ID NO: 353235 - DNA, 316 bp, Homo Sapiens
  misc_feature (294)..(294): n is a, c, g, or t
gtaataatatcagctataagagtttactgttaattaggaaagccttacaaatttttggaagaaccttcacatctttaacattacaatatatttaataatggttcttttattgcttctagtatcaagattattgagaagtcaaatgaagttatgctgacgttatgattcaaaaattatcttccaaacatttaacgattataatttaagataaatacacttaaagaaagcaaaccttttataatatgactttcaatatacagccttacttaattcagtctgattccattacatttngtcattttgtattggtcctaaa

SEQ ID NO: 353236 - DNA, 677 bp, Homo Sapiens
  misc_feature (124)..(124): n is a, c, g, or t
  misc_feature (642)..(642): n is a, c, g, or t
  misc_feature (648)..(648): n is a, c, g, or t
  misc_feature (667)..(667): n is a, c, g, or t
  misc_feature (676)..(676): n is a, c, g, or t
aacttgaatttaagcttcaactatgtctcttactagtttgtgatttggcatgttatttaccctgtcttggcttcatttttcttatctataaaaataaagccatacccttccaggtttataccanggttattatgaggattacataaaataattggtgtaaatatgctttgtaaactataaagtactacacaaatgcaaagtaaaatacattaaccatatttctagcatttatataatttaaattatgtgtcagggtatagttctttcccatttaaattatgtggaatctttagtagtaaaaaagcctaagagtggagcttttgaccactcttgagacactgctacccatgggaaattactcaataataaggtaccagtgctgaatttactcatttaaactaccctaaatactgcctgcattcaaaaacaagtcatgaattaagccacaattgtcaggagaagaagtccaaataaataatttttaattatgatacattacttattacagtaaaaattggcattttccccttcaaaagcagaagcaccagtcttagaatgtatagtatgaatagtattttaagtgaaatataacataatataatgtggaaacattattttactatagaacatactttctaaaantaaagnaatttcacacactgaattnttagatggna

SEQ ID NO: 353237 - DNA, 1313 bp, Homo Sapiens
gcctgggtggcgaattcggcacgagggttttgttcagggatcaccacatgagtggctggagctacaaacgtgtggagaaatcggatctcaagtacccactgatccatggacagggtaggcaggctcggttactaggaacactggctgtctcccggggcctgggagaccatcagctcagagtcctggacacaaacatccagctcaagcccttcttgctctctgtgccacaggtgactgtgctggatgtggaccagctggagctacaggaggatgatgtggttgtcatggcaactgatggactctgggatgtactgtccaacgagcaggtggcatggctggtgcggagcttcctccctgggaaccaagaggacccacacaggttctcaaagctggcccagatgctgatacacagcacacagggaaaggaagacagtctcacagaggaagggcaggtgtcctacgatgacgtctctgtgttcgtgattcccttgcacagtcagggccaagagagcagtgaccactgaggattcagacactgtatcccagaactgctctagtgcccgggtgtggtctgggcatccctccagtgtgaccaagagcaaatcctgcctgccctatccctagccaccgcccagtgctctcactatccacctcaacacacatccatctcaagaggaacatttataccaggcagtcagagctggaagtgtatggagagcccagcccaccaggtcctgccttttgcggtgataaccttctctggcagagtgactttacaacttaactaggaaacccatgtgaggctcctcagacaggatcttgaacagcccaaagtatcattctcagataggggcaccaagctaagggtattagccaaagatgccaggatgggtagctagcccatgtttagatccaggtctccaattcatggttatcagggcatgtgttcaacaacccccaaagtccacgcaggtggcttgtagaaacctttgggcagcctcatgtctgctaaaacagccatcttcaagacagcccctgaaaagagaccagttcaggtcctgccctgctgttctttgctggagatgaggaacaggtgctggggctaaagtttggggtagagcacaagggacaagaggaactcttggagttggctgggtgagagggctctccatttgctacctgtagtagcctgcctcttaactggttgcttctccctagttccagccctgccctggtctgatgccccaacactgcccttgctttgttttccctgtcacctccctattattaaatgttttctacagaagaaaaaa

SEQ ID NO: 353238 - DNA, 1275 bp, Homo Sapiens
  misc_feature (906)..(943): n is a, c, g, or t
gggaggctgagcgcgggctctcaaggaaagtagtcgcggaatctcagttagcggtggagaggcagtatgtccggttcaatggcgactgcggaagctagcggcagcgatgggaaagggcaggaagtcgagacctcagtcacctattaccggttggaggaggtggcaaagcgcaactccttgaaggaactgtggcttgtgatccatgggcgagtctacgatgtcacccgcttcctcaacgagcaccctggaggagaagaggttctgctggaacaagctggtgtagatgcaagtgaaagctttgaagatgtaggacactcttctgatgccagagaaatgctaaagcagtactacattggtgatatccatccgagtgaccttaaacctgaaagtggtagcaaggacccttcaaaaaatgatacatgcaaaagttgctgggcatattggattttacccatcataggcgctgttctcttaggtttcctgtaccgctactacacatcggaaagcaaatcctcctgaggaggccttgctgaagttagaaagtgcatccactttggggcgaaaactagagacttgcttgggggctgcagaagtgccctctcctcgaatcctgccagttgcattcttcccccttggagccaagacgattggccagacatcacctcagatctgagaccagcgtcttccatctctcagagccttactcccaaagtacctgctcactgttccgtgttgaacaattgccggtgtttcctctcttcactggtttccatgagtacccttatatttcacaactttctgttcataagttatagtgacattgctctttggtaaaaatgcctgctttccaatactttgattgcatattagacattcttaacagggcggcagtctagtgttgaaagnnnnnnnnnnnnnnnnnnnnnnnnnnnnnnnnnnnnnnaaaaaatctgatttacggcctaggcggcgccggctccggccctgcaaatcctggaacattgggaaaggccaccgccggcaacacacccttcgagcgccccaatttaacccccacccgacttaggagtaagagtaaacgctatcacccgccaaccagtgaaccacaacacaagccactgtgcctcttaagctgctaaggaaaactatctacacaattatatcatctactacagcccacatgttactatattatccagccgcgcctccccacacacattatactacctcaactcgtaatcacactggtaacacaatattaaattacccgatggt

SEQ ID NO: 353239 - DNA, 853 bp, Homo Sapiens
  misc_feature (798)..(806): n is a, c, g, or t
tatgggccctggttacggaagccgaggaaggctgagcgcgggctctcaaggaaagtagtcgcggaatctcagttagcggtggagaggcagtatgtccggttcaatggcgactgcggaagctagcggcagcgatgggaaagggcaggaagtcgagacctcagtcacctattaccggttggaggaggtggcaaagcgcaactccttgaaggaactgtggcttgtgatccatgggcgagtctacgatgtcacccgcttcctcaacgagcaccctggaggagaagaggttctgctggaacaagctggtgtagatgcaagtgaaagctttgaagatgtaggacactcttctgatgccagagaaatgctaaagcagtactacattggtgatatccatccgagtgaccttaaacctgaaagtggtagcaaggacccttcaaaaaatgatacatgcaaaagttgctgggcatattggattttacccatcataggcgctgttctcttaggtttcctgtaccgctactacacatcggaaagcaaatcctcctgaggaggccttgctgaagttagaaagtgcatccactttggggcgaaaactagagacttgcttgggggctgcagaagtgccctctcctcgaatcctgccagttgcattctttccccctttggaggccaagacgattggcccagacatcacctccagatctgagaaccagcggtcttccattctctccagaacccttaactccccaaagaaccctgctccactgtttcccgtgttgaaacaaatggccgggggttttnnnnnnnnnttcccctggttttccccaggagagtacccctttaaatattttccccc

SEQ ID NO: 353240 - DNA, 2363 bp, Homo Sapiens
  misc_feature (372)..(372): n is a, c, g, or t
  misc_feature (1082)..(1296): n is a, c, g, or t
  misc_feature (1405)..(1415): n is a, c, g, or t
  misc_feature (1949)..(1949): n is a, c, g, or t
  misc_feature (1953)..(1953): n is a, c, g, or t
caagtaactaaaacagcatctacatgtagagtgttgtggagagctgagaccagggtaaagtcaagtgcagcatcagtactgcgagacccaccagcccctggagagggtcagccgagaatctggtagtgaagcctgtctagggtcccggcaccctcaccctcagccacctgcagagaggccagggccccagagactagcctggttctgaagtgggcaggggtgctgccagagccctctgccccttatgttgagaccctgctttcaggacaggccagccgttggccaccatgtcacattctgagtgagtgtcacaggtccctaacaataattttctgatctggagcatatcagcagaatgcttagcctcaaggngcctggaagctgtaatgtttgatttatgatgagaactatccgaggccacccttggcctctaaataagctgctctagggagccgcctactttttgatgagaaattagaagagtacctaatgttgaaaacatgacatgcgctcttgggatctgctgttctctccagggctccagaacctgatacctgttaccaaagctaggaaagagctttatcacaagccttcactgtcctggcatgagaactggctgccaggctcagtgtaccccattaactgtgaatgaatctgagcttggtttcctttattgcttcctctgcaatatgattgctgaaacacattttaaaaattcagaagcttgtcactcctgttaatgggaggatcagtcacacatgtgtagtacaaggcggactttgtgtttgtttttggtgttaatttttagcattgtgtgtgttgcttccccaccctgaggagaggacaccatggcttactactcaggacaagtatgccccgctcagggtgtgatttcaggtggcttccaaacttgtacgcagtttaaagatggtggggacagactttgcctctacctagtgaaccccacttaaagaataaggagcatttgaatctcttggaaaaggccatgaagaataaagcagtcaaaaagaagtcctccatgttggtgccaaggacttgcgaggggaaataaaaatgttatnnnnnnnnnnnnnnnnnnnnnnnnnnnnnnnnnnnnnnnnnnnnnnnnnnnnnnnnnnnnnnnnnnnnnnnnnnnnnnnnnnnnnnnnnnnnnnnnnnnnnnnnnnnnnnnnnnnnnnnnnnnnnnnnnnnnnnnnnnnnnnnnnnnnnnnnnnnnnnnnnnnnnnnnnnnnnnnnnnnnnnnnnnnnnnnnnnnnnnnnnnnnnnnnnnnnnnntgttactcatcctctctgaaagcaaaaaggaaaccctaacagctctgaactctggttttatttttcttgctgtatttgggtgaacattgtatgattaggcataatgttnnnnnnnnnnntttttttttggtagaaatgcaatcaccagtaaagaggtacgaaaaagctagcctctctcagagaccggggaggcagagtactactagaggaagtgaagttctgatggaatcatgcctgtcaaatgaggtcttgaagcggatgcccaaataaaagagtatattttatctaaatcttaagtgggtaacattttatgcagtttaaatgaatggaatattttcctcttgtttagttgtatctgtttgtatttttctttgatgaatgattggtcatgaggcctcttgccacactccagaaatacgtgtgcggctgcttttaagaactatgtgtctggtcacttatttctctaaaattatctcattgcctggcaatcagtcttctcttgtatacttgtcctagcacattatgtacatgggaaatgtaaacaaatgtgaaggaggaccagaaaaattagttaatatttaaaaaaatgtattgtgcattttggcttcacatgtttaactttttttaagaaaaaagttgcatgaatggaaaanaaantctgtatacagtatctgtaaaaactatcttatctgtttcaattccttgctcatatcccatataatctagaactaaatatggtgtgtggccatatttaaacacctgagagtcaagcagttgagactttgatttgaagcacctcatccttctttcaatgcgaacactatcatatggcattcttactgaggattttgtctaaccatatgttgccatgaattaactctgccgcctttcttaaggatcaaaaccagtttgatttgggaatcttcccctttccaaatgaaatagagatgcagtacttaactttccttggtgtttgtagatattgccttgtgtattccacttaaaaccgtaatctagtttgtaaaagagatggtgacgcatgtaaataaagcatcagtgacactcta

SEQ ID NO: 353241 - DNA, 463 bp, Homo Sapiens
tttttagtgtcactgatgctttatttacatgcgtcaccatctcttttacaaactagattacggttttaagtggaatacacaaggcaatatctacaaacaccaaggaaagttaagtactgcatctctatttcatttggaaaggggaagattcccaaatcaaactggttttgatccttaagaaaggcggcagagttaattcatggcaacatatggttagacaaaatcctcagtaagaatgccatatgatagtgttcgcattgaaagaaggatgaggtgcttcaaatcaaagtctcaactgcttgactctcacgtgtttaaatatggccacacaccatatttagttctagattatatgggatatgagcaaggaattgaaacagataagacagtgtttacagatactgtatacagaatttgttttccattcatgcaactcttttcttaaaaaagttaaacatgtgaa

SEQ ID NO: 353242 - DNA, 831 bp, Homo Sapiens
  misc_feature (83)..(83): n is a, c, g, or t
  misc_feature (89)..(89): n is a, c, g, or t
  misc_feature (102)..(102): n is a, c, g, or t
attcggtacgagcaacttatgaaacttctgagttggtgggacactgttgattaataatgtactgtatgaattaagtgatgctntaactntgattgtacattntaaagttaaaatgtgggcattatgtcagcaaacttaagggcattatgtcagcaagctaaaacattttttttcctgggcttttaatgtatctctttacatgatctgagagaggattcaagttgatagaaatagctgaggggaaaagggggaacatcttgggatgaagcttgtccttatggtgatggtttaattacagattaaaaaattagaaggaaatttcagtggattaagtgtatagctttcatatctacatttcaagaaattaccattgtaacttgataagagatgatttattttatgtaaacatctttgcaaagcaaggtgtagcagctcagctagatttattactgtgcacgaaagtaaatacctatctcaattattctttttcttttccaatataaagtttgctgaatgtacaagaagagtttatcacttaggatatagaatttttttaggggttgggggaggggatctgttaggaaactgttacctataaacaaagattgactggattcgatccaaaagataaaacttgaagctattctggaactaacatggaaaaatgaaatggctattgtttaaaaaaatgatagaaatacattgttgatgggatatgagttaagtttattttctacaaactgtaattgatgaggacatggataatatcttcatgtttctgagaagtaatctgtatgtggggggaggggataataaatatttctaaccaac

SEQ ID NO: 353243 - DNA, 1068 bp, Homo Sapiens
  misc_feature (86)..(86): n is a, c, g, or t
  misc_feature (951)..(952): n is a, c, g, or t
cttccaaaagcaaaaagaagcctcgaaagtgaaatgtatctggaaggtctgggcagatcacacattgcttcccccagtccttgtcntgacagaatgcccctaccatcacccactgagtctaggcacagcctctccatccctcctgtctccagccctccggagcagaaagtgggtctttatcgaagacaaactgaacttcaagacaaaagtgaattttcagatgtggacaagctagcttttaaggataatgaggagtttgaatcatcttttgaatctgcagggaacatgccaaggcagttggaaatgggcgggctttctcctgccggggatatgtctcatgtggacgctgctgcagctgctgtgcccctctcatatcagcaaccaagtgtagatcagaaacaaattgaagaacaaaaggaagaagaaaaaatacgggaacagcaagtgaaagaacgaaggcagagagaagaaagaaggcagagtaacctacaagaagttttagaaagggaacgaagagaactagaaaaactgtatcaggaaaggaagatgattgaagaatcactgaagattaaaataaaaaaggaattagaaatggaaaatgaattagaaatgagtaatcaagaaataaaagacaaatctgctcacagtgaaaatcctttagagaaatacatgaaaatcatccagcaggagcaagaccaggagtcggcagataagagctcaaaaaagatggtccaagaaggctccctagtggacacgctgcaatctagtgacaaagtcgaaagtttaacaggcttttctcatgaagaactagacgactcttggtaaccatgtttgctgcccagcttctaacttacataccgtgagaagttacgtaacatttactcctttgtaaatgtttccctatcatcagacaaaactcaataaaaatgtgtgtaatccaatgtgggtttnnttttccataattaattttgataccatagtgtgtgaaccaagaataatctagtcacgtgaaacctcttctccagtcatagtatttctcattcattataataaaagtaactggctttt

SEQ ID NO: 353244 - DNA, 1177 bp, Homo Sapiens
  misc_feature (181)..(192): n is a, c, g, or t
  misc_feature (663)..(689): n is a, c, g, or t
ggaccggtccggaattctcgggatttgtaaagtgaataacttcatttctaattgtttaatttttaaaattctgatttttatatattgagtttaagcaaggcattcttacacgaggaagtgaagtaaattttagttcagacataaaatttcacttattaggaatatgtaacatgctaaaacnnnnnnnnnnnnaaagagtactgagtcacaacatgttttagagcatccaagtaccatataatccaactatcatggtaaggccagaaatcttctaacctaccagagcctagatgagacaccgaattaacattaaaatttcagtaactgactgtccctcatgtccatggcctaccatcccttctgaccctggcttccagggacctatgtcttttaatactcactgtcacattgggcaaagttgcttctaatccttatttcccatgtgcacaagtctttttgtattccagcttcctgataacactgcttactgtggaatattcatttgacatctgtctcttttcatttcttttaactaccatgcccttgatatatcttttgcacctgctgaacttcatttctgtatcacctgacctctggatgccaaaacgtttattctgctttgtctgttgtagaatttttagataaagctattaatggcaatannnnnnnnnnnnnnnnnnnnnnnnnnnactgtcactagggcaataaaatttatactcaaccatataataacattttttaactactaaaggagtagtttttattttaaagtcttagcaatttctattacaacttttcttagacttaacacttatgataaatgactaacatagtaacagaatctttatgaaatatgaccttttctgaaaatacatacttttacatttctactttattgagacctattagatgtaagtgctagtagaatataagataaaagaggctgagaattaccatacaagggtattacaactgtaaaacaatttatctttggttcattggtctgtcaataattgttaccaaagagataaaaataaaagcagaatgtatatcatcccatctgaaaaacactaattattgacatgtgcatctgtgcaataaacttaaaatgattattaaataatcaaatatatctacattgtttatattattgaataaagtatattttccgaaatgt

SEQ ID NO: 353245 - DNA, 593 bp, Homo Sapiens
tctgcctgtggacacgtgagcttcccgggctcagctgggctttatcacacatcccgtgaacactcattgaagtcagcctgtttgcgccatgtgggcatcagccactgctgtcttgggaggacacttatcctgttctcttatttccccttcatcctatttttaacttaaactgctcagatgtttgaaacttctgtcctctttggatgagatcagtgtccacaagtggccgacatggaacatgctgagcagtggctcctctgaatgttcactttattagtcatgtatattttaaatgctaacatttgatgaatgtaagtttccacattgttgctgtttctgcatttaaacataattgggaacaactgacattctctagtcgactgccagggccttagactccacatgtccatttttgttcaggtatagctttttatagcaagggctgcatctagcttcttttattagaagtgtgtgtgctaaattccttattaatgtgtaatcagtttacattgttttgtatagtgaaggtgtattttcagtgctacccgctagctgattttaactttaggaataaaattagttttaaaagcttt

SEQ ID NO: 353246 - DNA, 505 bp, Homo Sapiens
  misc_feature (22)..(22): n is a, c, g, or t
  misc_feature (34)..(34): n is a, c, g, or t
  misc_feature (87)..(87): n is a, c, g, or t
  misc_feature (106)..(106): n is a, c, g, or t
acaggggggaaaccttaacccngtccccctaaancccccctccaacccaattttcaaccttaaaacggccccagaagtttgaaaacntccggtccccctttgggangcagaaccagtgtcccacaagtggcccgaacatggaacatgctgagcagtggcctccctctgaatgttcactttattagtcatgtatattttaaatgcctaacatttgatgaatgtaagtttcccacattgttgctgtttcctgcatttaaacataattgggaacaactgacattctctagtcgaactgccagggccttagactccacatgtccatttttgttcaggtatagctttttatagcaagggctgcatctagcttcttttattagaagtgtgtgtgctaaattccttattaatgtgtaatcagtttacattgttttgtatagtgaaggtgtattttcagtgctacccgctagctgattttaactttaggaataaaattagttttaaaagcttt

SEQ ID NO: 353247 - DNA, 907 bp, Homo Sapiens
  misc_feature (787)..(787): n is a, c, g, or t
cggtccggaattcctcgggatgccacgccaacagtcagaggtcgcgcaggcgctggtaccccgttggtccgcgcgttgctgcgttgtgaggggtgtcagctcagtgcatcccaggcagctcttagtgtggagcagtgaactgtgtgtggttccttctacttggggatcatgcagagagcttcgcgtctgaagagagagctgcacatgttagccacagagccacccccaggcatcacatgttggcaagataaagaccaaatggatgacctgcgagctcaaatattaggtggagccaacacaccttatgagaaaggtgtttttaagctagaagttatcattcctgagaggtacccatttgaacctcctcagatccgatttctcactccaatttatcatccaaacattgattctgctggaaggatttgtctggatgttctcaaattgccaccaaaaggtgcttggagaccatccctcaacatcgcaactgtgttgacctctattcagctgctcatgtcagaacccaaccctgatgacccgctcatggctgacatagtaaatatccccattttcctctgcaacacatatcctaccttgtctataccgctaactctccctgtgtgaggatagctgcagcagctctaaaccactgcaaatcatgtttttctccattaactcttttctttgatttcatctcagtcctcagaatttaaatataataagccagccttcctcaagaatgccagacagtggacagagaagcatgcaagacagaaacaaaaggctgatngagaagagatgcttgataatctaccagaggctggtgactccagagtacacaactcaacaccgaaaaaggaaggccagtcagctagtaggcatagaaaagaatttcatcctgatgttttag

SEQ ID NO: 353248 - DNA, 795 bp, Homo Sapiens; identical to SEQ ID NO: 82499

SEQ ID NO: 353249 - DNA, 1526 bp, Homo Sapiens
  misc_feature (804)..(812): n is a, c, g, or t
  misc_feature (913)..(1017): n is a, c, g, or t
  misc_feature (1161)..(1186): n is a, c, g, or t
  misc_feature (1372)..(1380): n is a, c, g, or t
agcggagtcagaggtcgcgcaggcgctggtaccccgttggtccgcgcgttgctgcgttgtgaggggtgtcagctcagtgcatcccaggcagctcttagtgtggagcagtgaactgtgtgtggttccttctacttggggatcatgcagagagcttcacgtctgaagagagagctgcacatgttagccacagagccacccccaggcatcacatgttggcaagataaagaccaaatggatgacctgcgagctcaaatattaggtggagccaacacaccttatgagaaaggtgtttttaagctagaagttatcattcctgagaggtacccatttgaacctcctcagatccgatttctcactccaatttatcatccaaacattgattctgctggaaggatttgtctggatgttctcaaattgccaccaaaaggtgcttggagaccatccctcaacatcgcaactgtgttgacctctattcagctgctcatgtcagaacccaaccctgatgacccgctcatggctgacatatcctcagaatttaaatataataagccagccttcctcaagaatgccagacagtggacagagaagcatgcaagacagaaacaaaaggctgatgaggaagagatgcttgataatctaccagaggctggtgactccagagtacacaactcaacacagaaaaggaaggccagtcagctagtaggcatagaaaagaaatttcatcctgatgtttaggggacttgtcctggttcatcttagttaatgtgttctttgccaaggtgatctaagttgcctaccttgaannnnnnnnnaaatatatttgatgacataatttttgtgtagtttatttatcttgtacatatgtattttgaaatcttttaaacctgaaaaataaatagtcatttaatgttgnnnnnnnnnnnnnnnnnnnnnnnnnnnnnnnnnnnnnnnnnnnnnnnnnnnnnnnnnnnnnnnnnnnnnnnnnnnnnnnnnnnnnnnnnnnnnnnnnnnnnnnnnttgggggggccccctccgccccccgagaaattttcaaaacttttggttggggccgccgcggccccagaagggaaagggaaaccgggggccataagtggttccctagggaaaacccggggccaagaaacaagggggttgggattnnnnnnnnnnnnnnnnnnnnnnnnnngggggggaaaacccaggggtgtttttgagaacaaaaccccacagggggtgcggttcctgggagggccctttctctgggggattcttttccaacagggggagttcccaaaggcggagtctctataatttaacaaaattaaaaccccccccgcgccccgggggcgcttatatttggggaaagaaagcnnnnnnnnnacaatttctccattaaagccactttttgtggccgaaaattgtggggaaaccccttctcccaaaacggcgggtgtgtgggaaaaaccctcggaactcccgcacggggcggataattacacacaccccttggggcgcgcttggtagag

SEQ ID NO: 353250 - DNA, 1102 bp, Homo Sapiens
caaggccacaaacctgttcaacacacacaaagtggacaaatggcgttcagcagcgcgcatggaacatagcgaatccgaatggatccggatgaaacctgtaccaggtgcagctatttcgagctcttgttcccatccatagagcatgacagcatcgattctcattgaggagaaaccttgggcagctccggccaggccttgtaggaaaaggccccgcccgatggttccagctgtcaacggccactgtgtgtggctgctctgagtgaggacaaaattaaacaagaaaaactggttccatgtacgtgtgaacttgaaaacttgcagactcaggggggtccctgatgcagtgcttcagatgaagaatgtggacttgaaaatcacagactgggctagtccagtgtctatatattaaacgttgttctctttcttttaataaagtttaggtaacatctcctgaaaagcttgtagcacaaaggctcagcatggggatggtgtctatgacttacggaggaaaaaagttgctattgcccgttaaaggcactagagttagtgttttatccctaaataatttcaatgtttaaaaacatgcagcttccctctccccttttttatttttgaaagaatacatttggtcataaagtgaaacccgtattagcaagtacgtggcaatgttcattccaatcagatgcagctttctcctccgtctggtctcctgtttgcaattgcttccctcatctcagtagggaaaaaattgagtgggagtactgagatgtgtgggtttttgccattggacaaagaatgaggttagaagactgcagcttggagtctctctaggttttcaactatttcttcacaatttgaacacttgacggttgtcccttttaatttatttgaagtgctatttttttaaataaaggttcatctgtccatgcagtcctcttggattctctgaatgtagtaactatgaagctatgccaaaggtaggcagaaaatgggcttgggagccagacactccagggatcagtagttcctacccatagtctttgtgtgcttgctaaatggtgtacatttcttgttaaccccgttattaaaacttgatcagccc

SEQ ID NO: 353251 - DNA, 959 bp, Homo Sapiens
  misc_feature (422)..(440): n is a, c, g, or t
  misc_feature (604)..(685): n is a, c, g, or t
ggaattcccgggatccgcattgatgtccagcagctggcctgtgatccctacttgttgcctcacatccgaaagtcagtctctacaagtagccctgctggagctgctattgcatcaacctctggggcgtccaataacagttcttctaattgagactgactccaaggccacaaactgttcaacacacacaaagtggacaaatggcgttcagcagcgggtttggaacatagcgaatccgaatggatctgatgaaacctgtaccaggtgcttttattttcttgcttttttcccatccatagagcatgacagcatcgattctcattgaggagaaaccttgggcagctccggccaggccttgtaggaaaaggccccgcccgaggttcccagcgtcaacggccactgtgtgtggctgctctgagtgaggnnnnnnnnnnnnnnnnnnnctggttccatgtactgtgaacttgaaaacttgcagactcaggggggtccctgatgcagtgcttcagatgaagaatgtggacttgaaaatacagactgggctagtccagtgtctatatttaaacttgttcttttcttttaataaagtttaggtaacatctcctgnnnnnnnnnnnnnnnnnnnnnnnnnnnnnnnnnnnnnnnnnnnnnnnnnnnnnnnnnnnnnnnnnnnnnnnnnnnnnnnnnncccaccctcttccgcgggccgccatcttcttctattttccccacacacgagccccctctattataccacatccccccacaccacggagttccgcaaacaaataattacgctccacccagtagagatcctgattcataatattattcaccccactccccccttcacatttacaaaagaacattcgtcttactcacaagaaaacaatagtatcaaatcttgtagtaaacccttgcgggcgcggaaaaccttactcttccaccggccgaggtgtgac

SEQ ID NO: 353252 - DNA, 719 bp, Homo Sapiens
gcggatcttggcatcggaactggcccatccagtttgagaagacagcaggcggagaggagaggggcagaccagcttctcttgacctccccaaatctggacgcctgagggggcatcccgccccgcctcctcacagcttagggagtggcttgcattcaaaagttgtcggtttctgttccttgaaattggggtgggggtaggggatggttatcatatgttgtttgggggccccaggacccagcccttccaggcccagcttccgaacctgagtgccaaattgctggctttcccttctaccctctccactcctccagtgtccgagttggagagtgctctgcagatggagccagctgccttccaggctttatattctgctgagaagccaaagctggaagatgagcatctcgttttcttctgtcagatgggcaagcggggcctacaggccacgcagctggcccggagtcttggatacactgggtacggggaggtgtggctgctagctgggaggtgatggggactgcctgtcattcctgtcagtctctcacgcttctttgtctccacagggctcgcaactacgctggagcctatagagaatggttggagaaagagagttaggcaggaggcagcttactgattgccaccccctggccccttaatggccaccttaactaagggtgtgaacgggctgacttggtgaattaaacaactccttatagtgttgt

SEQ ID NO: 353253 - DNA, 1159 bp, Homo Sapiens
  misc_feature (581)..(750): n is a, c, g, or t
  misc_feature (758)..(774): n is a, c, g, or t
  misc_feature (812)..(893): n is a, c, g, or t
  misc_feature (1072)..(1080): n is a, c, g, or t
ggcctgggtggcgaattccgcacgagggttgcaggcgccgagagggccggccagggccgcactccggagactcgcggttgctacgcgcaccatggctggagcgcccacggtctcgcttcctgaactccgttcactcctagcctccggacgggcccggctcttcgacgtgcgctctcgcgaggaggcggcagctgggaccatcccaggggcgctcaacatcccggtgtccgagttggagagtgctctgcagatggagccagctgccttccaggctttatattctgctgagaagccaaagctggaagatgagcatctcgttttcttctgtcagatgggcaagcggggcctccaggccacgcagctggcccggagtcttggatacactggggctcgcaactacgctggagcctatagagaatggttggagaaagagagttaggcaggaggcagcttactgattgccaccccctggccccttaatggccaccttaactaagggtgtgaacgggctgacttggtgaattgggcaactccttatagtgttgtgcacacaaaagcatcaaataaagaacatttaatcnnnnnnnnnnnnnnnnnnnnnnnnnnnnnnnnnnnnnnnnnnnnnnnnnnnnnnnnnnnnnnnnnnnnnnnnnnnnnnnnnnnnnnnnnnnnnnnnnnnnnnnnnnnnnnnnnnnnnnnnnnnnnnnnnnnnnnnnnnnnnnnnnnnnnnnnnnnnnnnnnnnnnnnnnncctggcgnnnnnnnnnnnnnnnnnaaaaattttttaaaacttttttggggggcggggccccnnnnnnnnnnnnnnnnnnnnnnnnnnnnnnnnnnnnnnnnnnnnnnnnnnnnnnnnnnnnnnnnnnnnnnnnnnnnnnnnnncccccgggtgaaaaaggggggtgtataaaacaacaaaggggtgcgtccggtgcttttttgtgttttcacaaaagagggtccccccggatccttttttttatttatgccccccccgcggtgagatattaggagagagtgggggggaatattaaaaaaacccctctcccgccgaggggcannnnnnnnnacacagtggtggtgtaaataatttttcacccccgcggggaacaaacacccccgggtgcgcggggggcaaaaaataatat

SEQ ID NO: 353254 - DNA, 380 bp, Homo Sapiens
  misc_feature (13)..(13): n is a, c, g, or t
  misc_feature (88)..(88): n is a, c, g, or t
  misc_feature (167)..(167): n is a, c, g, or t
  misc_feature (249)..(249): n is a, c, g, or t
tttagtattgaantttataatggaacagaacattggtaggtaacaagatgcaagaggatgtcaatacaagattgtctgcctgtttttnctttgtaatttgtaattacagtttttgtaacttgtgattatgtttttaactaaatttaccaccagatacaaacaatacntcttacacagagttatcctttatttatatcattaagacgtgaatgaaacatcatcctaacttacttccccaagatattgagnaggtcatatctgtttttctttatcattcatttctttttctaaaagttgttactgatatgcttttgatttcctatgactctattatgttgtacagaacatcttttcaatttattaaaaaaatagcttaactg

SEQ ID NO: 353255 - DNA, 865 bp, Homo Sapiens
tccccgtacgcccaaaaatactcatgctaagcaaaggaagagaaagacaaagccagtttttgttgcttttctaaagcaacaaataattctccaaagaaggggatgaaaatgctagttcctttaagcacttactgactgtaaagttggtccctgcttaaattcatacccatagttttgagtcggtatgacaccactgcagtgtgagcaaggtgaatccgtgtgccatgcatggaccaccttgggataccgcagcaccatcaacatccgccttgctgatggaagccacacacgctgcccagcccacagcagtcgcacgcagccgatgggctcggactcttagctggcaggctaggacacacagtgaacattaatgtactgtgaatcgttcctgataagtgaataaaacattgtgaccaaacaatcagcttattcacttatcaggaatcgactgttctgctaatttgctgttgttgtttttcatctctgttgtagttcactatttttgctgtgttctgttttctcctctcatgcttgggcaaatcactgggaatattatcttcatgtgaccatgaaacgtttctattgagtgaaaatgatatcttaacaaaatctatgcacttgctatcaggaacacaatactggatgtgtcttatatatattgaactatatagtactcgatttcttaaataaagcttaagaaaggactctgttgtgtgtaaagttaatgtgattatttttcaaagcagtgtttctaaggggtatttttgttcttttaagtcttgagtgatacaggatatttttcattaaaattatatcactgggcttatggactaatatttcataaagtggtcttggcaaaaaaagg

SEQ ID NO: 353256 - DNA, 424 bp, Homo Sapiens
  misc_feature (1)..(1): n is a, c, g, or t
nggcacgagaaaactattgcttgctgcctagaagccagggcgtggtttctagttccagttttgcttctagcaagtggacccatcaatagacccatctgagcctgtttcctcatcagttagatgtggggactcaatcacacgctcttcaagtccggctcccatatttcctaatcgcaagccaaatttaatgtaccttgttccacaataattttttattaaaaaaatcctattacaaaataagacatactttaactattgtcatttgcctctttcacatcatgaatttgctttatgtgctggaaaaaacatcacatagctatcacagggcctggacctctaaaattttgcaaaaacaaaaggttctaagatgatttcaggaaataatgtgaacatgtaataaaatggaaatgaaatatggaatcct

SEQ ID NO: 353257 - DNA, 1177 bp, Homo Sapiens
  misc_feature (500)..(500): n is a, c, g, or t
  misc_feature (505)..(505): n is a, c, g, or t
ttcaaaaaaattctatatgcgcactataaatgtttctctgtttgccatttctggtaactatcatgaacacagacagttaactctttcataactgaattggatagctttattttacagaagtatggcaagtttacaaagcaatatctaaatctaattatcattagttgcatttggactaaatgtgatgatatacttttgcaattgattctgtaaataaaaggattacactaaaatatttgtattaaaagaagaaaagataacattttacctttagataactgcacttgtacctcactagagttaatcccaccccaatcagattgaggaaataaattggggaatgtggaaagagtccaaaagaggtcagaatttggagaggtactggccttctggacaacatttagaccctctacaattattttcattaagctgattcctacatcctgaatattcatgttttctcatctacagatatttgtcttcccccaaactaaaagaangaagnctacccttcactctcttttctactcagttactcttttgtgctatgttagaaacttgaaatatattggtgatgtggggattttgtccctgactgcccactgtacaggacaagagagtacagcgtttcacttggaattcaggactcctggttttgaggtagaggatgatcactgcagtacttggtttggaattgccacaggggtagctaaaccaaaggagggttatatctgcaagggaggtgtaagaaggcaaaataaggaaaaggaggaatgggttttctatttgttcagtttcatcaactaatttatacacttaatacaacttcagtgtccaattgctattaagaaatttttagttgggctgagctggttctcttgtgaaattgtgctggttatctttaagcttatcagttatttgtccaattaaacacttttcaccagtatttagtccgagttgtacagacgatgtatttggattttgtcatggttcatctacagactcaaaacataatcattttaaagtaccttgggagtgtgtagagtaacttctataatagctttatgatcctgatgatgttttttaaacacaataaagttggatcttccatgttacaatcacagaattaaaaccagtatttaaagtggaaaagtattaaaatattatggacaaataa

SEQ ID NO: 353258 - DNA, 656 bp, Homo Sapiens
aacattggtaacggctacaccacttggtcgagggacccgggaagggctctgtagatggtttcatctgtgtgcgggaggtgttggtgcccacagggtgaggggggcagaggagcgatgggggaggtagtaggttactctgggactccctgaaggcggtgttgatgggcaatgttcagaaagcaaacccgtgcacagggacccggcacccctgccatgcactcctaggagcctgctctggcgagggaaggtgtcgctggagaagtgggctccaggcattggtctttgggggtttcttcctctcatgaacccaaggctgatggtggctccctgaaatgctcacactggagaaaaggcaggatgggttctggtgcagcagccacgaccagcacggggacctcacagcgtttgggaagccaaccccaaacatgagccaccagcattacatggggtatttagatatttacatgtataactatatatactgggatgacagaagggaagaccaccacttctcttgggactttcaaaaaatctagcgacttgcttttaagactgtggctgctgaggtgaccatacctaggctcactcccttgccccagtggtagtgggaaaaagaacccacttcagctgggtggacctgtaccgagctccagcaa

SEQ ID NO: 353259 - DNA, 428 bp, Homo Sapiens
  misc_feature (11)..(11): n is a, c, g, or t
  misc_feature (293)..(293): n is a, c, g, or t
tgtgcctcagntcttcccctcaatggaatgagaaatgacagcacccgccacagccaagagatgaaatctgagcacttaccacgggcactttatggacataaaatacctctcgctgtgggacagataaccagggcaccagagtagtggtgaagagatgtgaggcttaagaggagtcacaggcttcagagtacaagttcccctctgcctcccagctggacagtgcctagaagccaaggagttgagaatctcctgatccacaccctatccttacttcaccaccaggcctcttggcnccaggcaagagcttagaggatgtcaggagaggtgggggtaagaatcttcagcaaaactgtcactctaagtagagccagcagttacgggtctgataaaaacagtactgaactaaagtaaagcccaagctggtgagc

SEQ ID NO: 353260 - DNA, 118 bp, Homo Sapiens
ctgctctcccatctttgagtgctatgtttactaagagtctattaggttcattcccaggcttgtttatgctcactgtatttcttattgtcattatgtaccttaatgtaatgtgagtcag

SEQ ID NO: 353261 - DNA, 382 bp, Homo Sapiens
  misc_feature (6)..(6): n is a, c, g, or t
aattanatatctatctctctgcaaaatagatgacaatgtgcccatatctacttaggctaataacctatattatatataccattttccagtttccatggtgtacatacttgtaccatgggtaatttcaagttaccaaatcctcataattggaaggagatatgtacacctgggtcttaggaggtagtactagctagtgccagcacatcacagatctaagtgaatggtggtgaatttcccataatgtgtaaaataatatgaaaatgtcagtgcaaaaaagttgaacttaggactaagaacttttagtaatataagttaaaggtttcccagtgttctcaattaaaatcttaatacatgatacccttttattttcatagcacttttt

SEQ ID NO: 353262 - DNA, 476 bp, Homo Sapiens
  misc_feature (3)..(3): n is a, c, g, or t
  misc_feature (9)..(9): n is a, c, g, or t
  misc_feature (22)..(22): n is a, c, g, or t
ttnctcccnccccaggcactanaccatgacaggaatagatccccccccagaggaaattctcaggcaggttggatgtaaacaacagcagggtaagggggtggaacacgtggaggggagctcagcagaggcaggagaggctgccagaggagggggggctaagggaggtgggggagctgctggaaaagggaaccagcaaagtaggcaccttgagggctccagaaagcctgtcaatgtttatttcatacacaccctaaagacagtaaagcagattagaaattaaaagttaaggtggtgaccctattgtgctgatgagtcaaatgggccagaagaaggggaaagctaacggtactcctggtgccaaaactaaaattcaaaaggcggtgactggacagcagagcactgggcagattctcatctccagttttcccagagaagtcaattctgaattcagaaaataggaaaactggctgggtgtg

SEQ ID NO: 353263 - DNA, 375 bp, Homo Sapiens
  misc_feature (12)..(12): n is a, c, g, or t
  misc_feature (31)..(31): n is a, c, g, or t
  misc_feature (374)..(374): n is a, c, g, or t
ccacattctccntgatcccgagtggtttganacagctctggaggtacccagagcgggttaggagaacttcctgagcataaggtcagagacggtgccacctcctggacgtcaggaggcatcaggctggtcccccctgggtagtgacaactctgcagtctggagcactggcgaatatccccaaaatcaaagccaacttgagtatgggcacttcaggactgccatgcttgagggaggaggtggctggaaagaacaccttttgcaaggagggaggcgatattggtcaagaactcaggctgtgttcttgggcagacctggttcagatcttggcccaagcaccaagatgtcctgggtgagggccctggactcagagcttna

SEQ ID NO: 353264 - DNA, 639 bp, Homo Sapiens
gcaggccactgtcagcaaagcctggagaagtggggccggaggctccgcccccatcatgtgcctgccaccccttcccagtcatccctttactcttacagtagcacataagacccctgtctaatggggggagacaaatgtgtagacccttagccaccttggccagggctgactccttaaatttctggatgatgatgattgttatttaatagccagaggctcatataattggcctctttggaagaggcctcatggcctccttactctcaccaaagcaatttttccctcaggggggctcccatcttcttacacagagaggcagctgaggcaggacagtggggctaactgtagaccaggcgagggcacgggctgctggggtggccctgcttccccagtgtacatattgtatctgtgtaacattttgtatattccaggggtagggccgccccctgtatcatacctagcagaggttggagctggcacatggggaggaggttctaataattatttggggctgggaaacttatttattgatagcataggacagaggaaggaggcggggatggggtcgtggcgccctggtgatgcgactcctgtttattttgctttttatttcggaataaatggatttaaaaataacac

SEQ ID NO: 353265 - DNA, 408 bp, Homo Sapiens
  misc_feature (99)..(99): n is a, c, g, or t
  misc_feature (370)..(370): n is a, c, g, or t
  misc_feature (375)..(375): n is a, c, g, or t
  misc_feature (398)..(398): n is a, c, g, or t
ccgcgaataattataagaacctcttcctcatatgccagctgcaacctccgctaggtacgatacagaatgttacacagctacagtatgtacacggggganggggggccaccccagcagcctgtgccctggcctggtctacagttaactccactgtcccgcctcagctgcctctctgagtaagaagatgggagcccccctgagggaaaagttgctttggtgagagtaagaaggccgtcagacctcctccaaacaaaccaactccaccaacctctggctcttaaataacaaacatcatcatccagaaatgtaaggactcagccttggtcaaggtggtaaagggtctgtttgtctccctccattagacaggggnttgtnttgctaccctaatggtaaagggntgacttgggg

SEQ ID NO: 353266 - DNA, 288 bp, Homo Sapiens
  misc_feature (68)..(68): n is a, c, g, or t
  misc_feature (76)..(76): n is a, c, g, or t
  misc_feature (271)..(271): n is a, c, g, or t
  misc_feature (283)..(283): n is a, c, g, or t
gaatcacctcctgggttcaagcgattctcctgcctcagcatcctgagtacaggcactacaggcacgtnagcaaganaagctgacagattcaaatgttcacaaacatttatgttctattttgatagatacataaactatgtttctcattcttatatactttatattagggcatgggattaaagtcaaaatagtggaaaattagtagaaataacatatcttatatccaattaagtctccaaaatcccaacatgcactcttctgtatacgtttntcagtatgcttnactgg

SEQ ID NO: 353267 - DNA, 293 bp, Homo Sapiens
  misc_feature (2)..(2): n is a, c, g, or t
  misc_feature (265)..(265): n is a, c, g, or t
  misc_feature (289)..(289): n is a, c, g, or t
anaaaattagcaagtggatagcaataaatcaatttttaaaaatcagacaaaagaaaacactgtccttgtaatgcttgcatttaaaaggaaataaaaacttatgaaagagaatctttattttatttaagcagttctagattatacaaaatgttgaaacatctcaatttggtctctgaggctagcataatccttattccagaaaattgttcatcaaagatagctatagaccagtctcacttacgaacaaatgtaatttgttgaactnggtcatgttgaaaaacatgaccanttaa

SEQ ID NO: 353268 - DNA, 386 bp, Homo Sapiens
  misc_feature (44)..(44): n is a, c, g, or t
gtaactttaaaatatcctaaaccaaaatatctatttccattttncttcttaagtaaaataacaacacctcattagtgtgtagaagctattctaatccattaaaattttatttttatatttatttaaatatctactgtacatgacaaaatatatttctgtggctgccttttataattattttccaagtagacataatctatttaaaacatatttttctagtgacaaagaaatacgattttatcctgatatatagtttttaaatactaggctatttcttttcatactgcctgattggtttaataaacatgatgtgacaaatattaagtatatatcattttatcatgttgtaactgatccaaaataataaaagaaataattataccttt

SEQ ID NO: 353269 - DNA, 1043 bp, Homo Sapiens
  misc_feature (752)..(761): n is a, c, g, or t
tttaaatggtgtgaaaatcgatgacaacagtcctcttacagatagcttgctgtattctgtatagcttactctacctgcagacagaaaatgaaagaaaaaaatggacttgcctagaataatatattgaatgccttttgatttagccagagtctctgatgattagctttcactgatagagtatgtcttttcagcctgtaattctttgggccccaaagaatgacaaaggaggcactcgttctcttttcttgctgtatgcctagaaagtggttgagggattcttgatgccctaaaaccatcttgtaagctaaatggtcttgcatccagaaaggccagattttacctaccaagaaaaaaagatatttttccagagagttaggtatatcataattttccatttcaagtcctgtttataagtctagtcattctgcaacgtgacatatcccccaaaatgaagttaccttccaagttggacacgtcccgtagttgggcatatgtctaactaaaagtttctgacttgtagtaaattcagcttaaatataagttgaaatttgggaaataatttccaagctcttggaaggggtaacagtgaaccgccctccatgggctccacatcttttcctttggcttccaaagtcaggtcccgcccaccctgcctaaggaactgcagagaggtggcaaatcagcaaaaaggacaccaggctctttcttggccacttgtaggaagatccctttacaattttgactaaggagannnnnnnnnncacagttgagttagtttgtgaaaataaagaactctgtagctcaccaaggtggagaaacgcaattcagaaaagtaatttctccaaggtcacttctttttttatgtcttgccatcactttaaaggactagccccactcccccatgtgtatacacaaggaaattgcagaccaattagttgtcttggcctgactctaatgccttttgcaagtagctttccagaagtaaaagtcccagtgatgtattcccatagaaatatttttcagttgtttatgtcgtttactac

SEQ ID NO: 353270 - DNA, 405 bp, Homo Sapiens
  misc_feature (30)..(30): n is a, c, g, or t
  misc_feature (166)..(166): n is a, c, g, or t
  misc_feature (171)..(171): n is a, c, g, or t
ccgccctttggaaatatattaacagaaagnctttaataacaggccgtttccccccggaacaggtattaattcctgagtaagaattttccagtgacctacataaggatttgtgtaaccttatgaaggaagagtcccatttcctaatcaaataattcacctgttttanctagncttatagtgatcctgatttcagaattttccctgtattcttttttacatacatcagaaaaagaaatgtttactatatttttggtcccatttatgattgtattaagcatttgactataaggaaaactaacaattaaatcaattagaaaagcaacataaaattaaatgatatttaggaaatcagttatatgtgagcttgggtatttcaaatgtcacaaataaaaagcatataaccat

SEQ ID NO: 353271 - DNA, 453 bp, Homo Sapiens
  misc_feature (196)..(210): n is a, c, g, or t
  misc_feature (361)..(361): n is a, c, g, or t
aaaaaaagagagagagacagtaaggccatctatagataattaaatatttctctatctaacctggggcaaactcatagtacttgaataaggccaaaaacaaatagaaaattactgtttaagctttcattctgctattgcaaacatttggaaacctctgcaactctttcaactaacatatttgtccttagcggttttnnnnnnnnnnnnnnnaagtctgatatatggaatgtttggtgaaccttcctatcaacactgagactggaaactcaaagtacagtccaaatacattgtgttcaatcaccttcaagagccatttttctttttgggtgggaggtgggcagatgggttgagggtgggaagnaaatactattatgcagggtgttttgggaggggggagggtaacataaagagcagtgtacaggcaagttttgttattaaaattgtgtatactgt

SEQ ID NO: 353272 - DNA, 565 bp, Homo Sapiens
aaggtcagattgcctcaggtttagaaagaggctgagaaatcaaatcttgaacacaatcaacttacatattttaaaggaatctgcctcaaatgagaaaatatgctagttatctagatagaggaaagagatatttacttttttaaaaattaaaatagttatgaaatctggcagaaaaggtaaagcctagaagaaactatgaaagctattctcatgttaccaaattctatctgcgcatatgtttttgtataacatttcggtgacagtgggagtcggttccctttcccaacctgcagagactatcttccaatacagaatctgtctatttatgcttgtgtttacaaactgtatttgttgggtttgggtttttgttttctttggtggcatttttcaggtcactttgcttctataacaaaggtaattgttttcaaataatttgtcttcaccttttcctgtatttgtacatagtgattcagtattagagaaaagtgcattgtttctgtcatatttccaatctgtgttggtgctcatttgagaaaataaaagttttcaaatattaactcttaac

SEQ ID NO: 353273 - DNA, 622 bp, Homo Sapiens
gggggaactcggaatttatcaccattcagaactgcaggttgtccttgtgagtggcatctgatgtgggggaagtcttggactgagccccttaacttgtggagtctgcactaatttagactgcactaactaacttgcactgcactaacttggactgcactaacttgtggagtctgcactaacttggagaagttagtgtcagaattgaattatagaacacccagttgttcagaattgaattgtagaacacccaattggtgtgggagaattagagaatttatttgtgtcagaaaatactccagaacaaccaccccatattatgattagctcttttcctttctttggctctgagcttaattgtacattaagcaaacctaagtagaaaagaaactgaatatgttaaatatattaacaacatatttggacttgcttaactaagattatagagatgatcagtttataaaaccaccctcaacttaaataaatttgaactcgaaattgcaaaagcagtctagaggctttgctagtatccttcaaccaatttctagtaaaaatatcctatataaccataattatccaaaccagaaaaacaacactggtaggatactataaagtactaatctta

SEQ ID NO: 353274 - DNA, 1060 bp, Homo Sapiens
tgtgcatttactagaaaaaaggaattggttgtttagggcacactgttatatgggaattaaaatatgtttaggcaggggtgtgtaaaaaggttaagtttttgtttctcctgcttggaacttattttgaattactggcttgtcacctttttttctatttaatcaaataagatacatgatattgaaagaataaagcagcatttttagtttttactaccttaggctttattgctttgaaaacaacattggccttttgtatctcacaattctggtctagattcagttatgaatgtaggcattagttaaaattaacaagatgcagagtattaatttcttaagacaacaaagtgatttctgtaagtttgagccctatgtggaaagcattgtggaatcttaaccttttcgtacacactcttgtgggacgtatcatataaatgtcagcactaagtaatgtcttgtttgtggctgaatatttttcgtagatgtttttgaagttgacatgacttacgtgcatttaaatatatattgccatccttagtttgtaattaagatttggaatatggttgtggatttctgagcatgtgcagactggtctagctagttcaggaactggtgcatgtatttttcaaagataaagaaagtgtactgcgaaaatatgcaggaagattaattttgtggcagttttctaaaactgacaaccaaggtgggaccaaagtttatgtgcctttagtcttaatttaccttgcattgtaatattcagttttaataaatcttcaaaatattttgtatttaggaatagatctgactttaataaaaacatggctcagaatctacaggtcaaattaatttgaacagttcttgtcaatccgaattgttgattctgtttaaatgaccaatactttttgaaattgatgtacttagtttcaagattcatagattctgttatctatgtagacagaatggtcatgtatattttctattagttgagtttttacatctttagaaatgtaaaattcagtatagtttgaaagcggcacaattaaaaattaattttctaacaaag

SEQ ID NO: 353275 - DNA, 1092 bp, Homo Sapiens
  misc_feature (970)..(970): n is a, c, g, or t
  misc_feature (980)..(980): n is a, c, g, or t
  misc_feature (994)..(994): n is a, c, g, or t
  misc_feature (1004)..(1004): n is a, c, g, or t
  misc_feature (1027)..(1027): n is a, c, g, or t
  misc_feature (1043)..(1043): n is a, c, g, or t
  misc_feature (1045)..(1046): n is a, c, g, or t
  misc_feature (1056)..(1056): n is a, c, g, or t
  misc_feature (1064)..(1064): n is a, c, g, or t
  misc_feature (1068)..(1068): n is a, c, g, or t
  misc_feature (1073)..(1075): n is a, c, g, or t
  misc_feature (1077)..(1077): n is a, c, g, or t
agcggattttctgtggtccaactaccctcggcgatcccaggcttggcggggcaccgcctggcctctcccgttcctttaggctgccgccgctgcctgccgccatggcagagttgggcctaaatgagcaccatcaaaatgaagttattaattatatgcgttttgctcgttcaaagagaggcttgagactcaaaactgtagattcctgcttccaagacctcaaggagagcaggctggtggaggacaccttcaccatagatgaagtctctgaagtcctcaatggattacaagctgtggttcatagtgaggtggaatctgagctcatcaacactgcctataccaatgtgttacttctgcgacagctgtttgcacaagctgagaagtggtatcttaagctacagacagacatctctgaacttgaaaaccgagaattattagaacaagttgcagaatttgaaaaagcagagattacatcttcaaacaaaaagcccatcttagatgtcacaaagccaaaacttgctccacttaatgaaggtggaacagcagaactcctaaacaaggaaattttaagacttcaagaagagaatgagaaattgaagtcaaggttgaagaccattgaaatacaggctacaaatgcactggatgaaaagtcaaaactagaaaaagcactgcaagatttacagcttgatcaaggaaatcaaaaggattttataaaggcccaagacttaagtaacttagaaaacactgtcgctgccttaaagagtgagtttcagaagacacttaatgacaagacagaaaaccagaagtcactggaggagaatctggcgacaacaaagcacaatctactcagggttcaggagcagctgcacatggctgaaaaggaattagaaaagaaatttcagcaaacagcagcttatcgaaacatgaaagagattcttaccaagaagaatgaccaaatcaaagatctgagggnaagactgggncaatatgaacctgnagattaaaantggagatttctctggagctaccncatgcaacatacagcngnncccccagggngtttttgnaagnttttnnntnccccccctttttttt

SEQ ID NO: 353276 - DNA, 302 bp, Homo Sapiens
  misc_feature (8)..(8): n is a, c, g, or t
  misc_feature (40)..(40): n is a, c, g, or t
  misc_feature (251)..(251): n is a, c, g, or t
  misc_feature (302)..(302): n is a, c, g, or t
ctcgtgcncttgaatcagctattactgatgcaggtaaggnaccatcagtcaacttctggttactatcaccttcataaaaaagaatggatgatgttcaggaattaccttggaaggattaaccaggaattaacacagaatgggatgttcttttaggaccctaatgctctaaaagataaaattacaacctatttttctttatatgatagcataagtaaaatttggggctgttaatatgttggaaagtgcttaanattacatgtttttataatagggatgcaggcattccaaaataaatgaataan

SEQ ID NO: 353277 - DNA, 406 bp, Homo Sapiens
gggctgagactctgtctggatttgcctgcagagtttggataaaaaatggcaggttgggtaaccctccctgttcatcccatgttagctccaaagcatttcccaccctccatctaccccttccagaagcaaaaacaaaccatgactgaggcaggcatggagttgggcgttaggggcaggcagagggcctttgctacactgctgacagctatagggagccccaggtaatggcatgagatagctggtgttagggctatctcaggcaatatggccacacctgggtctttatgcatgaagataatgtaaaggtttttattaaaaaatatatatatgtataaataaatgatctagatattttcctctttttctgaagctactttcttaaaaaataaataaaatgtttatagca

SEQ ID NO: 353278 - DNA, 468 bp, Homo Sapiens
  misc_feature (142)..(142): n is a, c, g, or t
  misc_feature (199)..(199): n is a, c, g, or t
  misc_feature (234)..(234): n is a, c, g, or t
  misc_feature (377)..(377): n is a, c, g, or t
  misc_feature (466)..(466): n is a, c, g, or t
gaaggacaaatcacacaccggggctctgaagtcaggaatgtttgttcgcttattccaagagcaaagtgctttatttagatttaagtagaagaaatgttttcttcacagaaaggaaaagtcatattggcattgcatgtttgcnttaaaagattttcattaatttgttcattcaacaaatatttattgggaactaactgtnagctctgagcccagaatctcacacttacagaagtngaggaaatgatttgtctgatataagcctcaagcctaagaaatttctagaattatcaaatcccggtttaggtggcacctattgattaagtgtgatttttcagcccagttccaatcgatatttagaaacacaagcagagtgaggngggtagtagagttgtagattataaatcatagaattaaagaaccttagaaataaagtagctcatttcctgtactttaaaagcaagagagnca

SEQ ID NO: 353279 - DNA, 301 bp, Homo Sapiens
cctattatatttaatgctgcaaatagtctgtgaaagtaattttaatcgtaaggcaatattttaggactcattagtcctcacacaacaaccttatctccactgtacagagtgaaaactgggggagcagaaatgtattaaataactgcccaaggacactcagataatagacagaggagcctccaggccctctggctcacagtcttcaagattaattatactctacagtaggaagtgggatagatccgatgcaaatttcacttaatcaggaggtcaaaatgattgatcactgagcaatcaggca

SEQ ID NO: 353280 - DNA, 431 bp, Homo Sapiens
tcacacagttggcaggaggattcagtgaactaagccatgcagattgcacaagaaacactgtgaggcacagggaaagtggtccatgagtatctactattactgctattattatgactccagtcagaggagacagcacgggtttgggcacaagcacaagaacaccaggtttaaaggatgttgagcagcacaacttgccagaggtgaagcctgtaaagtaggaaacttacttcacaaatctggggaatttgggaaggttctttattgcaggactaagcttccactctgcctttaggcaagaaggaaccagtggagattttaagcaggtaagtcataacttgacattttgatgaaactgagatagctctagctgtagtatggaaaagaagatgggaaaatcagccaggagcctcctgcaggagcttggtgttgag

SEQ ID NO: 353281 - DNA, 1846 bp, Homo Sapiens
ggtccggaattcccgggatccatcattgcgctgaggaaccgtctgctctctgcttcccacctctccgagctcttctgcccctgcatccccatgttcgacctggaaggctcgctcgacgaaactggactcgggccttctgttgggttcgacactctccgaggaattctgatatcccagggaaaggaggcggctttccggaaagtagtacaagcaactatggtacgcgatcgtcagcatggccccgtcgtggagctgaaccgcatccaggtcaaacgatcaaggagcaaaggcgggctggccggccccgacggcaccaagtctgtctttgggcagatgtgtgctaagatgagctcgtttggtcccgacagcctcctccttcctcaccgtgtctggaaagtcaagtttgtgggtgaatctgtggatgactgtgggggcggctacagcgagtccatagctgagatctgtgaggagctgcagaacggactcacgcccctgctgatcgtgacacccaacgggagggatgagtctggggccaaccgagactgctacctgctcagcccggccgccagagcacccgtgcacagcagcatgttccgcttcctgggtgtgttgctgggcattgccatccgaaccgggagtcccctgagcctcaaccttgccgagcctgtctggaagcagctggctgggatgagcctcaccatcgcggacctcagtgaggttgataaggattttattcctggactcatgtacatccgagacaatgaagccacctcagaggagtttgaagccatgagcctgcccttcacagtgccaagtgccagtggccaggacattcagttgaggctccaagcacacacacatcaccctggaacaaccgcgcggagtacgtgcggctggcgataaactatagactccatgaatttgatgagcaggtggctgctgttcgggaaggaatggcccgcgttgtgcctgttcccctcctctctctgttcaccggctacgaactggagacgatggtgtgtggcagccctgacatcccgctgcaccttctcaagtcggtggccacctataaaggcatcgagccttccgcatcgctgatccagtggttctgggaggtgatggagtccttctccaacacagagcgctctcttttccttcgcttcgtctggggccggacgaggctgcccaggaccatcgccgacttccggggccgagacttcgtcatccaggtgttggataaatacaaccctccagaccacttcctccctgagtcctacacctgtttcttcttgctgaagctgcccaggtattcctgcaagcaggtgctggaggagaagctcaagtacgccatccacttctgcaagtccatagacacagatgactacgctcgcatcgcacttacaggagagccagccgccgacgacagcagcgacgattcagataacgaggatgtcgactcctttgcttcggactctacacaagattatttaacaggacactaagatggggaaacgtcctcgtgagatgagagcctgagccaggcagcagagcactcgctgctgtgtagactgtaggctgcctggtgtgtctgatgagaagcgtccgtcctcgagccaggcgggaggagggagtggagagactgactggccgtgatgggaatgacagtgagaaggtccgcctgtgcgcgtggaacactgtggacgctcgacttccaagggtcttctcacccgtaatgctgcattacatgtaggactgtgtttactaaagtgtgtaaatgtttatataaataccaaattgcagcatccccaaaatgaataaagcctttttacttgtgggtgcaatcgaa

SEQ ID NO: 353282 - DNA, 260 bp, Homo Sapiens
  misc_feature (254)..(255): n is a, c, g, or t
gtaagttactatcagtttataaaatattatcacatttgtttaaatgtgactttagatacttttatgccaaaaataaactcacatgagcacatgacagtctgagctctataatcagtgtgcttctgctgtgcagaaatgttagaaacgtattgtctaaatatctttgataattaaaatgtttaatatttaatgaaatttgttgttacttgttttaaatcttttttcttttaataaagatttaaataagatataannttttt

SEQ ID NO: 353283 - DNA, 317 bp, Homo Sapiens
  misc_feature (218)..(218): n is a, c, g, or t
  misc_feature (220)..(220): n is a, c, g, or t
  misc_feature (235)..(241): n is a, c, g, or t
  misc_feature (280)..(280): n is a, c, g, or t
  misc_feature (300)..(300): n is a, c, g, or t
  misc_feature (304)..(304): n is a, c, g, or t
  misc_feature (308)..(308): n is a, c, g, or t
ctctttccctccctccctctctttctctcccagtttctttcccaactttttattttggaaaatttcaaacttgctggttgggagaattataaaacaaatttcaaacttgctggttgggagaattgtaaaacaaacactttatgtcctctgcctaaattcaccatttgttctacatttgcaacatttgctttattccctcttctaattatatatataantnatacatattatatannnnnnntgaaccatttaaaagaccaaacatcttgacactttaccnctaaatatttcaccacccgncccnaagnataaggaca

SEQ ID NO: 353284 - DNA, 522 bp, Homo Sapiens
  misc_feature (45)..(45): n is a, c, g, or t
  misc_feature (49)..(49): n is a, c, g, or t
caaggcagagcagtcaattgattataagtatttatttctttttcntctnggagcccagattaaaaagagttattttagatttaaaaatttcctgaaatagttgaaaaattatttttgaggagaaaattgtatccaagaaacccagaatgtaaggatacttgatttttatatccagataattctttcatgcactgaatggaagacagtatatctgtatattaatttttgtttagattttgaatcatttaacccttatcctttttccttgtaataagactatttaatgtttttctcttgtgtttcccatctttatcaatgcattcgtgttggtcttgatgtatactacctgttcctagtgttatttttacacatcatctcacagtaataatatcagcaattcttgctgcattgaacatattaaatacacatgtaaaatgaaaaagtaagcagtaggtaaaatcttgttactctgctttgcattctgcctaactcactgcatttgaaaatacatgtcaaattctt

SEQ ID NO: 353285 - DNA, 148 bp, Homo Sapiens
agaaaacagtctttctgtgtatacctacggatgagggtattatttaaactgccaacaatatccaagacatggtcaataacctaatcataaatactttagaaagagtgaccaggacatgtatagaaatgtctgcttacctgtagacttt

SEQ ID NO: 353286 - DNA, 296 bp, Homo Sapiens
cgagcccacccctgcctgagcggagtcctagcatccccttgggagcagcagcgtcagtggacccagtgctgagaaaagcccccacatcccggaaaacccactttcctttcacgacccacatctcaatcctgaacatctaggctggaacctgcacacctccccctcagctccgtcgtgaatgggacaacaatctcgtgccctcgttttatggtgcagcttctctagtatttctggggctggggggcggggctggaggggaaggagtgtccacgcatcaataaagatttaacgaactg

SEQ ID NO: 353287 - DNA, 415 bp, Homo Sapiens
  misc_feature (35)..(35): n is a, c, g, or t
  misc_feature (53)..(53): n is a, c, g, or t
ccaaacctacctaacctggcccctaaaacagttanctgtacccccttaacccngcccttcaaaagttgcatatagttacagtagtgtataaattaaatattgtggaaaaacagtcttgtatttttctgtatgtgtgtatatatatataattatgtacttctggcaattctatctgtatttaaagatgtgacaatcttgacaccaattttaagaatagctgtgagaccgaattaaagataatccctaccaagtgaaaattgatgtgtgttaagagggtacagaattatcaactgatttggtcagttgcttccaatgctggttgatttccctcattgtgtaaacattgacaggtatgtgacaaatgggaaaaaaaatccaaataataaagtgacatattggtgttcagcaatataaa

SEQ ID NO: 353288 - DNA, 1349 bp, Homo Sapiens
  misc_feature (451)..(509): n is a, c, g, or t
  misc_feature (1129)..(1144): n is a, c, g, or t
ggcctgggtggcgaattcggcacgagggaagaagaggaggaggagagcgaggacgagctgccgcaggacatctcactggcggctggcggcgagtcacccgcgctgggcccggagaccctggagccgccggccaagctggcgcggactgacgcgcgcggcctcttcgtgcaggcgctgccctccagctaagcccttggcctccccgccccacccgcccccgccacccctccacgccagggtccctcaaagcttctgtggcttcgtggtcactgctccagcctcagccagggcagggagggggactccgagacagggaagaccggggccctcctcccttatggggccggcacaatcagtgggctgggcggagccgcagctgcaaactctgacacaaaagacgtgccttaaggaacccgccgcgtgcccaggtgccccgcggggcatccagctnnnnnnnnnnnnnnnnnnnnnnnnnnnnnnnnnnnnnnnnnnnnnnnnnnnnnnnnnnnaccaccccagggggcaggcaggcaggccccctcccgtgcgaaactgttaacttattcagctcgctggctttgcacagcctgtcctgggcccagccctgagccccgggccggcgcaggtgggcgtcacctggggactccccactgtcagcagcagccccgggacaccctacccccagcaaccccactgcttccccttcttggtattaagtgcaattaaagccgtgggtgtcgcatcttctccagcgctgggccctcccttgcccccaagctcaagaagggggcactgcccggcccggctgtgaggagggcggcagggggcacggcctccagcttccaaagagcagcgagccgcggagccggggagtgcccacagaccccagcccccgcgcccccgccctccgccgctggtttgtaatggaaccttttctgtgcccctatcttcccggagaccacgcttctcctccgtgccgtgcgacccccaccccatgactattgtgcgattcgtgagcgccgcccgagcggagttggtaacttgttgggtttttttccaaccatcatggccttatctgttccagttttctcagtgttttcagcctgtgagatagatgtttatggcaagnnnnnnnnnnnnnnnntggaaatctgacctattgtataaaaatcactattttgtgtgctccgcgtgctatagcttttggggcggccctgcccagtccccgtgcccacggggctccctctcccggtggtgaaagtgtccacacgtgtggtagtctagtgtgccgagctgttttctacctttttgtagtctttcttaaaacaataaattccgctgtgataaaa

SEQ ID NO: 353289 - DNA, 389 bp, Homo Sapiens
ctttcctaaaaatgcaacagataatgctgctagattgttattttgtttgcacttttttttgattggcattttaaaatcggtatttaaactgaagacattgtcatgttttattaatttaacaaagttgaaagtgactgctctgtacatcatgaccttaacaatgttaatgctgtaagtgaaagttcactgtcgtctgtatactaaatttattggtgtttctaacttaaaagtaagactgcagattatcccccaccagccttagtccaggggtgtggctctgtccgggtgcagtatgcagtcatgtggaaccttgctttctagtcctgggaaaaaaagatgtctctaattactggcttcaataaacacgaatccagactgcttaaaaaaaa

SEQ ID NO: 353290 - DNA, 832 bp, Homo Sapiens
gaagaaacagcactggtttgtttatgttactaactttcaccacccgttttcagtaggtaaagtaagactgatcattgaacagaaaaggttatttctgtgatgaggttgagggggtagtggaaagcatgtattgctagtaagccccaggtacagctatgtgagagagagtcacctggacagggaagtcccccaaatggtggccagaagagcagaaaacggggtggggaaaaattctaccctcacagttttgccataggggatagctatgcttttacgggacattttagcgtttaaaaatattttcaatattgtctctttattcaataccacccagctgtagttttttcacactctgatgactctcttatccactcttttacctctcccagctgttctattacatacagcattcacctgtattagtctatagaattataatcatctgtgtgtttctaatgctcattttcaaaaatatgtatggtttattcgatttttcctattaaaattttaagggctgggaaatttggcttctactgtaaatccttataatgttccacacattgtaaatatgcaataaaaatgttaacaactataatggcagcaggttttggtatgtatttctttgatatattgtcactttggacaataagtttgatttctgttaataaaagttgttcataaaatctagggagaattaagtcacactggtctctataagataatctgatgaattctgcatctttgaatcaatttgagttattttttgtaaaggtttaaattgtttctaacagtgttacctaaaacctttcattaaatcaaaaatgtaacttgt

SEQ ID NO: 353291 - DNA, 421 bp, Homo Sapiens
  misc_feature (5)..(5): n is a, c, g, or t
  misc_feature (64)..(64): n is a, c, g, or t
  misc_feature (90)..(90): n is a, c, g, or t
  misc_feature (397)..(397): n is a, c, g, or t
ttatncaagaattattatctaacatactggtgttttaagaaaaagaacactggatttctgtgtnacatatactggtaacttgtgggaggnagtcacttttagtaagtaaaggatatgtgaaagatgaataagaataagatagcttcaatatttttatcaatggacatcattaatttctccaaatactgatttttttaatttcactatgtcagattttaaactcataaatcaacttagatattgcattacttaatagttatctgctactatatttatctcctttacaaatagatcatgagcttcttgaggacagaagttttgtccaatgatttgcctagcacttagtgcaatgtcttggacatagttggtacttagtaaagtttatggacaaataatntcaggtacatcatatgtaagcaat

SEQ ID NO: 353292 - DNA, 303 bp, Homo Sapiens
ggccacatcatttacttgagaggtgatcccaggaaccatggggacagtgacacaaggaagacaggaagccaatgaagggtatgatgacgagtgggtgcctggcagtgagtggacaggcaaggctcagcctgctggggccccctgagagactgcagaactctccccagattgtcccagtgaagagcaagggagtggggttactgatccaccaacttgcctctgttggttgagggttgctctcaacccagggcatcaactccctggtactttgggctgccttgtgagggctgagcacgctcctgc

SEQ ID NO: 353293 - DNA, 301 bp, Homo Sapiens
  misc_feature (10)..(10): n is a, c, g, or t
  misc_feature (14)..(14): n is a, c, g, or t
  misc_feature (19)..(20): n is a, c, g, or t
  misc_feature (27)..(27): n is a, c, g, or t
  misc_feature (93)..(93): n is a, c, g, or t
gtcccagatnagtntacanncctaatnagtttacatgtaaaacagccacacgtggctggtggccaccagtgtgacgcccagctctggatgacnacacctgctacaagagatgacttttctagagaagagtagaaacacagcggcagaaacacagctctgcacttccgagggcctcccactccttctgatgagactgcagaggaagtctgtttggccaagcatgctattaacacgttttcctgcttgttttgttttttaacagagcaaacaggtctgtttctattaaaatttaaaaagcgtt

SEQ ID NO: 353294 - DNA, 352 bp, Homo Sapiens
  misc_feature (26)..(26): n is a, c, g, or t
  misc_feature (29)..(29): n is a, c, g, or t
  misc_feature (68)..(72): n is a, c, g, or t
  misc_feature (74)..(74): n is a, c, g, or t
tatacaatttctgagttttataattnctnggtacttgttttttcttgctggtaaatagctttttttannnnnantctaatataaaagaaaccatgtttatattttgttagtgatcaatgactttgtttatatggaaatttgtatattgttggcacacattttgttgaggtttacgtgcatgaaggcctgcaataattagcacaatgaaaactgctttttcttacatgttcatttttttgaaagattgtggtgcaaaggcttactctaataagtaaccttctggactatggaatgaatataaatgaatggcactttgagtgttaataaagctaatatttatttccactgtgaa

SEQ ID NO: 353295 - DNA, 466 bp, Homo Sapiens
  misc_feature (27)..(27): n is a, c, g, or t
  misc_feature (34)..(34): n is a, c, g, or t
  misc_feature (39)..(39): n is a, c, g, or t
atgtgtaccgtagtaatgcgggccttnggagacnaaccnacgggcagtatgtcagccaccaaagaaaaggctgtcacccgcccattgttgtaattgtgggtatttaatagttgtatgtatgtaaatgccatccagtgtgtagattgccatatcagtgtatggtacatgtacatcaaaattatttttgtccttaatcagtgtgatatgaaaagcaagtacaacctcataggactgattatataatgaagttgttgagagtatatatagtggtattgttttattaaacttaaactcaaataatattttgattaaaatttttaataagactttatgctagaaaattctttgagctttgaatcaccagggcaaaaatgactttcaactaaccttgtgaatcttttgcagtgtactgtgtgcaataccaagggcatagctccctgtaatttgggaaatacagaaagaaaag

SEQ ID NO: 353296 - DNA, 1237 bp, Homo Sapiens
aaaattgacgttaaagaagtttctccattgtcttactaacaaaaccttttgggtttcattaattgtccttgaaattgagttcctttggcatttttccttgcagtcatcagttaagcatgttgcatcctgaattcacagaagtttagctttgcaggtttgaatctctgtaatttaactcccgtggacttggtcgagttttcagcaggttgggagccacctctcttcatttcagcagtgagtcatcccttgacttttcaaatgacagaattttttccaattgtaaaattagcactgtaaaacaaagaaccaaagtgggcatcctaaggagttgttaaacctggaagtctagtttatgagggattgtccaagttgggagtttaaataggtatctcgcttttgtctcaaagcatctaagttattctgacagaaaatggtaagtcagctttgcaggcagatgcgcctctgggcctcctaccttgctccacagctttctggccatcttgtctcccagggccatgccactgcttctgccacatgtcaggcaaatttctttccaccagtcttatagcatcttacatgatcaaatcatcacagaataaccccgtgatagattattgatagcaatagagaggggcggctttgtcactgatttttctctcagattccttttccatctctcatccataaaggaaggactgaaatccaaaggcattctcctttggtacctacagtatccagaacccacgtgggcagccttctgcttatgacaataattggcccattgcatgcagagagaatgtcttcatagagagaatgtcattaaatacttgaatctgcatgacagtttgacttgaatgcaacagcaggaaaattttgcaagttacataattgtatatacagtaggttttcttaagtctcttcggttcatcctttgtaatttgtgtgtgtatctgtagtattgcaggcttttggagactattcttacaggcagtatgtcagtcatcaaagaaaatgctgtcacctgccattgttgtatttgtgggtatttatagttgtatgtatgtaaatgcatcagtgtgtagattgcatatcagtgtatggtacatgtacatcaaaattatttttgtccttaatcagtgtgatatgaaaagcaagtacaacctcataggactgattatataatgaagttgttgagagtctatatagtggtattgttttattaaacttaaactcaaat

SEQ ID NO: 353297 - DNA, 248 bp, Homo Sapiens
  misc_feature (17)..(17): n is a, c, g, or t
  misc_feature (42)..(42): n is a, c, g, or t
  misc_feature (50)..(51): n is a, c, g, or t
  misc_feature (61)..(63): n is a, c, g, or t
  misc_feature (72)..(72): n is a, c, g, or t
  misc_feature (105)..(105): n is a, c, g, or t
  misc_feature (225)..(227): n is a, c, g, or t
ggaatggccaacatganaggttatgttggcaattactctganagattttnnaaagtatttnnnaactttgtntgaagtggtccctcccctcttcctctgcttttntttaagtttgaagccagaaggccctccccaccttgctttattggttgtaattgtattgtaattggtatgactaaaccataactgtgctgggaagaagttgtgccatgaaggtctttaatnnnttttaataaaaacatttaaat

SEQ ID NO: 353298 - DNA, 1212 bp, Homo Sapiens
  misc_feature (42)..(78): n is a, c, g, or t
  misc_feature (1035)..(1036): n is a, c, g, or t
  misc_feature (1039)..(1040): n is a, c, g, or t
  misc_feature (1042)..(1052): n is a, c, g, or t
  misc_feature (1054)..(1054): n is a, c, g, or t
  misc_feature (1057)..(1060): n is a, c, g, or t
tgatctatgggcgaactggagctccaccgcggtggcggccgnnnnnnnnnnnnnnnnnnnnnnnnnnnnnnnnnnnnnatcaggccaaatcggccgagctcgaattcgtcgagagcgggtgggagcgagcgcgcccgggaactcggtggagcgagcgcgcccgggaactcggtggaggccgcggtggcggggtggggcggggctgagggcagggcggggcctgtgggagtcgtggcgcaaagagctcggggtaggagcgcgcgcccggaaactcagcggtggccgcggcgaaggggcggggctgaggggtgggacggggccttgtgggaggcgtggcgcgaagatttcagagttggagcgcgcgcgaccccggactccacggaggccgcggcgagcaggcggagctgcgggtcgggacgctctgcgtggggcggggcgcaagggaggtttcgagcccggaaggtccggcgcccagagctaacgggagtcccaggttaaacactttaagatgagaaaaattgatctctgtctgagctctgaagggtccgaagtgattttagctacatcaagtgatgaaaaacacccacctgaaaatatcattgatgggaatccagaaacgttttggaccaccacaggaatgtttccccaggaattcattatttgtttccacaaacatgtaaggattgaaaggcttgtaatccaaagttactttgtacagaccttgaagattgaaaaaagcacgtctaaagagccagttgattttgagcaatggattgaaaaagatttggtacacacagaggggcagcttcaaaatgaagaaattgtggcacatgatggctccgctacttacttgagattcattattgtatcagcctttgatcattttgcatctgtgcatagcgtttctgcagaaggaacagtagtctcaaatctttcctcataatgataacaaaatgctcttgcatgattttttaacaatatatttaaacaggaagttgtcactgatatactttattaaaaggatttttaaccccnnccnncnnnnnnnnnnnanaannnnccttggtcggcggccccggccccccaaaaagttttcaaaaacattcgttgtgcgccggcgggcccaataggaaaggggaacatggtccaataccggttttcctaaggaaaaccctgggcctggacttagggccttggaattcccccccaaat

SEQ ID NO: 353299 - DNA, 594 bp, Homo Sapiens
gggacctggaggcggggccaggcccagggcaggcgacccgagggccgagggtttggaactcgcagaggttaaacactttaagatgagaaaaattgatctctgtctgagctctgaagggtccgaagtgattttagctacatcaagtgatgaaaaacacccacctgaaaatatcattgatgggaatccagaaacgttttggaccaccacaggaatgtttccccaggaattcattatttgtttccacaaacatgtaaggattgaaaggcttgtaatccaaagttactttgtacagaccttggaagattgaaaaaaagcacgtctataagagcccagttgattttgagcaatggattgaaaaagatttggtacacacagaggggcagcttcaaaatgaagaaattgtggcacatgatggctccgctacttacttgagattcattattgtatcagcctttgatcattttgcatctgtgcatagcgtttctgcagaaggaacagtagtctcaaatctttcctcataatgataacaaaatgctcttgcatgattttttaacaatatatttaaacaggaagttgtcactgatatactttatt

SEQ ID NO: 353300 - DNA, 1657 bp, Homo Sapiens
atagatgcagtacagctatcaaacagtactgttgcacgtcgaattaaggatctagctgctgacattgaagaagagcttgtttgtagactgaaaatttgcgatgggttttcactgcaactagatgaatcagctgatgtttcaggacttgctgtgctgcttgtgtttgttcgttataggtttaataagtctattgaggaagacctactcctgtgtgaatctttgcaaagtaatgctaccggtgaagaaatattcaactgtatcaacagttttatgcagaaacatgaaattgaatgggaaaaatgtgttgatgtttgtagtgatgcttctagggcagtggatgggaaaattgccgaagctgtcaccttaataaaatatgtggctcccgaaagcaccagtagtcactgcctattatacagacatgcactggcagttaaaataatgcctacatctctaaaaaatgtgctagaccaggcagtacaaatcatcaattatattaaagctcgaccacatcaatccagactattaaaaattttatgtgaggaaatgggtgctcagcacacagcacttcttctaaatacagaggtgaggtggctttctcgaggtaaagttcttgtaagactttttgaacttcgtcgtgaacttttggttttcatggattctgcttttcgactatctgattgtttaacaaattcatcttggctgctaagacttgcatatcttgcagatatttttactaaattaaatgaagttaatttgtcaatgcaaggaaaaaatgtgaccgtttttacagtatttgataaaatgtcgtcattgttaagaaaattggaattttgggcctcatctgtagaagaagaaaactttgattgttttcctacactcagtgattttttgactgaaattaattctacagttgataaagatatttgcagtgccattgtgcagcacctaaggggtttgcgcgctactctgttaaaatactttcctgtaacaaatgacaataatgcttgggttagaaatccatttacagttactgttaaaccagcttcattagtagcacgggactatgagagcctgattgatttaacatctgattctcaagtgaagcaaaattttagtgaactttcactaaatgatttttggagtagcctaattcaggaatacccaagcattgcaaggcgtgcagtgcgtgtacttcttccttttgctacaatgcacctgtgtgaaacggggttttcatattacgctgcaacaaaaacaaaatataggaaaagacttgatgctgcacctcatatgcgaatccgacttagcaatattacacctaatattaagcggatatgtgataaaaagacacaaaaacactgttctcattaaaattggaggagtttgcatgtctcatgataaccaaatgtaagatgaaaataaaagatgatttacttcaaaaaacagcacacaacgactaaaaacaagggggggcggggctcaaaaagtattcccccgaggggggccccaaagattaggggatcacccagttctggtgcacacaaggggcccccaaaaagggaacccgaaatataaacactaagacaggcaccacaggtacacaaggtctctacgcgggaaaaagggctgagtggagaactccggggagagacatgtg

SEQ ID NO: 353301 - DNA, 1026 bp, Homo Sapiens
  misc_feature (571)..(571): n is a, c, g, or t
gcaaagcatttatgacaaagacctcaatagcacagtgacaaatatagagaaatgggacttaattaaactaaaaagcttctgtacagcaaaagtaattacagagtgaagagacaacctgcagaatggaagaaaatatttgcaaactattcacctgacaaggaacgaacatccagaattgacaaggaaatcaaaccaaataaccccacaaataatcccattaaaaagtgagcaaaagacatgagacatttttcaaaagaagacatacaaatggccaacaggcacatgaaaaaatgctcaacatcactaaccatgagagaaatgcaagtcaaaaccacaatgagatatcatcttataccagtcagaattgctattattaaaaagacccccagtcatgacgacgttgtacgacggccagcagcaagaaggcaggacgccagctggactattgtagaggatcctcggcggttcctcgtcgtcataatactctcatctcccactagtggcaccgcaggactaccaatctagatattagattgttgctattttattaaacagaagagtcttagttctnttaaacaagctttctgaattagaatgaggcccataaagcatcacattgcattacattgatatctctttattgcgccaatccataatggctaaaaatgtgctattaaattgtatgtaaatttcaaagccaaaacgattactatgagaataggatggcttgctgccctccaatttgcggaagcacaaaagtctctgaattagcaaatggaacttcagccccatttgtttctatactttattctgcgagcttaaaaataaagtaaggtgtattgaccagaaagctactttgtgagaccctcaaaagttttgttttcattcttaagcccgttgattttgaaacttattccaataagaactcagaataaacatatcttaatttatatctgcgtagccaattgcaaagcattactaaaagccatattttttcctgggaaaaatcccaatgcaactccaaaa

SEQ ID NO: 353302 - DNA, 1142 bp, Homo Sapiens
  misc_feature (13)..(13): n is a, c, g, or t
  misc_feature (37)..(37): n is a, c, g, or t
  misc_feature (39)..(39): n is a, c, g, or t
  misc_feature (59)..(59): n is a, c, g, or t
  misc_feature (62)..(62): n is a, c, g, or t
  misc_feature (66)..(66): n is a, c, g, or t
  misc_feature (68)..(68): n is a, c, g, or t
  misc_feature (72)..(72): n is a, c, g, or t
  misc_feature (74)..(74): n is a, c, g, or t
  misc_feature (76)..(76): n is a, c, g, or t
  misc_feature (80)..(80): n is a, c, g, or t
  misc_feature (87)..(87): n is a, c, g, or t
  misc_feature (90)..(90): n is a, c, g, or t
  misc_feature (94)..(94): n is a, c, g, or t
tggggtgggccanaatatagccgaaaatatgcggggngntttgtgtaaaacaaggcttnttnggancntgcngngnatcnggatatnccncttnttttaagaaaatggttctgtgaaaagtgaatgatatgtatttttccaaatgcttcatggttaggagtcttcaagttccatgttccccagatttgagatatactaaagaaagaaattcaaaagtagctatttggggcccacaaaaataactattattttagccttagagccttacacttgtttcatgaagagaaaggacttgcataaccaaaataaacaaagcaagacaaattaaaaatatgtgggggagagatcagtgaaaagtggttttcttaatgcagccctgctggtccccattaacaattgcttgaaattcacatggatgtaaaattataattgtcaggatcttattcagatgatcttttaaggtttaactggttttgcttttgtttatctatatgtcaaaatacttgtaaattgggaacaaacttctctcagcttcttgaagttgttcaactatccttgccactggaagaccaaacaaggttttcactgctttttcttttacataatatgctgagaattatttcttatgctttttactacaaacaaaattactcacctggattaaagattaaggccttaatctgtttagattatctttaatctccatgaaatcgtgaaataagacaagaatagtgtttcagctgtaggccattttacagctaattgcccataaattgtagcatttattgacctgaagtactaagctaattgtcttgactactcaaagcccctgaattgttgtcaactttcccctttgtgttgtgtagccctaacgtcatttagcttgttgtctgatgcctccagtaggacacctccgatggagctttgatttctgagcagcgaaagctcccttcctaagatgcatctcgcataggctgcctatgatgaaggaccgtgcacctccactccaacagagtgctgagtttaaaagttgacctgtgtttgtaatttcactttcatcttgcttaataaatatctgctggattctttcattcacttttttacatttggatttatgtttttaataaaaggggtgttacact

SEQ ID NO: 353303 - DNA, 456 bp, Homo Sapiens
  misc_feature (31)..(31): n is a, c, g, or t
  misc_feature (61)..(61): n is a, c, g, or t
  misc_feature (68)..(68): n is a, c, g, or t
  misc_feature (271)..(271): n is a, c, g, or t
agggccctaaaacggtttaagaataaccttnaaacccccccaggaaaaccgggaaaataangacaagnaatagtgtttcaagctgtagggcccattttaaccagcctaattgcccccataaattgtaagacatttaattgaccctgaaagtacctaagcctaattgtccttgaactactcaaagcccctgaattgttgtcaactttccccctttgtgttgtgtagccctaacgtcatttagcttgttgtctgatgccctccagtaggacancctccgatggagctttgatttctgagcagcgaaagctcccttcctaagatgcatctcgcataggctgcctatgatgaaggaccgtgcacctccactccaacagagtgctgagtttaaaagttgacctgtgtttgtaatttcactttcatcttgcttaataaatatctgactggattctttcattc

SEQ ID NO: 353304 - DNA, 662 bp, Homo Sapiens
ctaagggtacaagaacaatttagtaaataacttcttcaacttaagataaaaagtaggatatatttataatgaaattttcaagtattatttcaaaattaaccctgtacaaatgatatattttggaaattccaatatttgctagagaatattttttaaataccaaacatctttgtggttaatgctaccttaaccttaccaattaaccttctaaaagtatattacaacagaacacaaatagcttaaaacacaccatactgttttctccacaaaacagacaccagacaccgacatgagcacatctggcctggccagtgactcagaacctcatttcagaccagtacatctgcagaggaggccacgcggacccattctctctctcctaactcatataataaatattattttagattttcttagcaaactaggggacaacttacacaccccacctctcccagtcagcccagtgtctgcagggtttcaggatttggggtaggaaacagaagatctcacacatgtcgtgctgattttaaataaggcatctgtctctgagacacctgggagagcacagccaccttcctcacggtgcctgcctgtctcttccggaagtcgcctctgcttgccacatgatgctggtgtaaccacaaaagatccaggacttctcg

SEQ ID NO: 353305 - DNA, 945 bp, Homo Sapiens
gacaattaccttccagtaaatatttgaaaatatattgaaagtaaacctgaatgtatttttcgtcacaagaaaatattaagagttattgttgcagttctgatgagctgcaggttttttgaactcacttctggaggtgcagagccactaaacgcactttcggggcctagttttgctcgaatatgaatttagataggtatcaagctgtaactaagacaatatttgataaatgttggatgacatttaatttaatggagcatgtacttatttgcatttgctggcagttcaggcatagttaaagtgagagttctcctatatttcataataagtgggtctgccaaaacccatgtattaaataaattgtccaagtgaaactcgactaactttggcctttgtgtatttcctgaaggtaatattgttaactgttaataaatacttctgacactacatttaaatgtttgcagattctgcaaactaattgctcattgtaatgttgaaataatttggatatttcacattgaaatgaaaagcctttctctggagcattttagatttgcattttaaatgcatgaaatgtaattgatttatttgtaatattttaaatggtattaataaactcagataaaagactaggccagttgaatttgtattttttcccctttttaaactatggacgtgcatgtttatcttcagttaattgtctaatgttgaaaccaaatgatatccttgtttgtggtgaatatttaaataattgacctttaagatgttagatggaaagatctatttggcaaagctgtgttttctctggttgaccaagatgaaagattgatagtgtctaaggaatgtaattgatgttatttacccgtgagatttagctcatagcatcaggatttactgacctcttaaaatttgtactaagtcacaattcaaagaaatttcaccattctc

SEQ ID NO: 353306 - DNA, 914 bp, Homo Sapiens
  misc_feature (411)..(473): n is a, c, g, or t
atttataagaaagggataaaggtaatagagccttctgccccccatccaccaaatttacacaataaaatgacatgttcgaatgtgaaaggtcataatagctttcccatcatgaatcagaaagatgtggacagcttgatgttttagacaaccactgaactagatgactgttgtactgtagctcagtcatttaaaaaatatataaatactaccttgtagtgtcccatactgtgttttttacatggtagattcttatttaagtgctaactggttattttctttggctggtttattgtactgttatacagaatgtaagttgtacagtgaaataagttattaaagcatgtgtaaacattgttatatatcttttctcctaaatggagaattttgaataaaatatatttgaaattttgnnnnnnnnnnnnnnnnnnnnnnnnnnnnnnnnnnnnnnnnnnnnnnnnnnnnnnnnnnnnnnngcgcggccctcctcataccacactcccacacaaaggccaccaaaccaccacaccccacccaaactatttcttctaaaacaatacgaaatcaccacataatattagaatatatctcaaatcaatatacaacacaaacatattcacaaaacaatgcataaactacaacaactataaccatcctataaaaacactctgcaacacaactatacaaaactattttatcatagcgagcacacaacaaatcgcagatttactaatggctgaccaccaatactttgtggaacccaaactacattaaacatcagaccacgacatatataaaacagctctctatcagggactcaataatatacaacaatgtcactcagagaggatacaaaagaggcgtccaacaaccacatagagctattatattgaattgactaggttgtcgcgacagcc

SEQ ID NO: 353307 - DNA, 894 bp, Homo Sapiens
  misc_feature (254)..(254): n is a, c, g, or t
tacacagtgcaaggactttattataaaggttggatgtagttttccttagaaatttaggtgagagattttggccttttttattggataaattgggccagaaaggcagggtagatttcgaagcactggttctgttgaagttaagtttattaagcctgggaacattaaaagctaatttataaaagcaatactttttaatatgaaaacttactgcaaagtttgtttatacttttgcctaaaaaggaaattggatgggnatactgtggaaaatcataaaaaaccagtataattgaactttgaagttatagaaaatcagagaggggtaagtttatagggcattttgttctgatggttcaaccagaggtctgggaaatagcactgttggcccaaacagaacaggcttttagaagataaaagcgacaagaaggaatctggtgaattttagtcatcccagctttttagtcttaaccacagttctcactctcttaaatggtacctcaaaaagctggagcctctctgccatgattatgcttctacaaatttcttttataaagagactcaaagctaatgatagcttaaaagaaaagttaatgccttctcattggaaatgtataatcaaataagtagttaagggcttttggtattaaagatattctgaagctctgaaatgctagaaaaaaatttggaatggagtatatgcctgaaaaggttttggattcagaaagaaaaaggatggttagtttaatcagtgattctttttaaactcttcaaatatcatgaacaagatactaaattgtacctaaggatttgtatttctttacaatttgttctaaatatctgtttaatgactagttgatatttgtgcatgttatttaataaagagttatatttttatag

SEQ ID NO: 353308 - DNA, 357 bp, Homo Sapiens
  misc_feature (31)..(32): n is a, c, g, or t
  misc_feature (39)..(39): n is a, c, g, or t
tatcttatttcttttttcaattttaaaggcnncctgctnttttacccttgtatattatcagtgaaaaggatcaacagttaatttgagccaagaaataaaagaaattctgcatttgtcactaagacaatttatggtagacagataaatacacagattacagtgtaaagtctccatttaacctgtttataaaagatacaaggccacactaaactactcagtgggatttatatattccatccacttgaaacaataaacagtaatgtatccaagaagattatgtgtcctaccctgtctcatggaaaaattaattatatggttgaaatgtaaaagaaagtaagcataaaaatcgagtaatgt

SEQ ID NO: 353309 - DNA, 896 bp, Homo Sapiens
  misc_feature (514)..(514): n is a, c, g, or t
  misc_feature (624)..(703): n is a, c, g, or t
  misc_feature (778)..(839): n is a, c, g, or t
gcctcagagggatgggattggggaggaggggatgggcagcggagggttgggggcatggtctgcaggctcatctgtgtccgcctttcactccactaatgctgtctcagtgttttctctctctctctttcgagcttgcactccggtacccgacccggcgccctggcccatcccatgccggggggccagtggaaagaagacaggccgtaccagcccgtgcccggcctgcggcgggggcacccagcaagcccgcccaccgcccgctgcctcacctgcttcgccacagactcttgttcccagccccttggggcctccgtgtttggggtgggggagctgcttagagactgtgcccgtcctcggccccccaccctgaagtgccagcaccaccagcaccagatcctccgccgacacaccgcactgaggacacgccggccgggccgcctcgtctcaagttgtataaagttgtctccgtgtcccctcctccctctgcccccagtgtttcttctgatttttgttncccctttccctccctccctctccgcattcttcccttggttcagcacaggtaaaacggttcccctccctccctgccttcatggatcaccagctcacgtcatgttgccttcnnnnnnnnnnnnnnnnnnnnnnnnnnnnnnnnnnnnnnnnnnnnnnnnnnnnnnnnnnnnnnnnnnnnnnnnnnnnnnnnttctgccatgtaactggaggatgtgctatgagtttgcaaacagctggactgtcaggctgctttttttccagatgnnnnnnnnnnnnnnnnnnnnnnnnnnnnnnnnnnnnnnnnnnnnnnnnnnnnnnnnnnnnnnggagcactgagcaccatttggaagcttgagagaaaccaaaattaaagagagaaagag

SEQ ID NO: 353310 - DNA, 905 bp, Homo Sapiens
  misc_feature (74)..(74): n is a, c, g, or t
tggaaattaacactggaactgacccttttctggcagtgaatgtaagctctagctcccccatctactataaaganatgtcttcgagatgtagaaataaggcatattctgaaaataaaaattatacagtagtaaagataattcagaaagaaaaagctacctgttagaatttccagtctaaatggcacagggtagttacggagaaaaggggatggagaaggagaaactatgactaaagatgagaggtatgaacgagttgtcaggttcctatgggcttaagctaggacaatcaggccctaaactccaaatttggataaaatatctctttgcattcttcttggccacctgcatagtctgacacatacgtatgtacagttagacttgtaggctgcaggagtgccctgcattgttttcttttaattagaaataaaaagtattagtctaaatgtggttctggtgctggtgccctgtatatatgtaacaatataggacccctccaaataggttttgcttctggtgaatcttggtcattgggttagtatatgactgtctataatattttccatttgtattattatattggggaaaacattttttatcattttctattaagaaaatggaaaacttaaatatggtgttaaaaatggaaatatatgtgatatttgcattattaaacccctttgcagatctaaagtctcagggttccactattagtggttaaagtactgaataatgtctgggtctatttccatctgtaaaataagaatatttgtctcacgtgtctgtcatgaatagcaaatgagaaaatgtatataaaagcactttgtaaattgtaaaagtagtacagatgtgagcttctatttgtttagaagcataaatgtgaattatatacagtttgaattttgcat

SEQ ID NO: 353311 - DNA, 744 bp, Homo Sapiens
  misc_feature (29)..(29): n is a, c, g, or t
  misc_feature (57)..(57): n is a, c, g, or t
  misc_feature (65)..(65): n is a, c, g, or t
ataaatgtattagatacttttcacaatcngataacttttaaaaaggtcattttttanctttctantaatgtaagccttaataaaagcaaatcttagtcacaaatttgaggagactgcccaataataagtttacatgtatttgaactgaaaaattgttaaccatgcttttgctccaagatgtgtgaggccattcaggggctgtagggccctggatatacacacaaacaagtgtgtgtatatctggagccccacacattgtaataaacacagctgcatttatttgactatgtgatcccatgtacatgtaaaaacattcaaacaaacacactcagcggatttatttattgtgcaatggggcaattattcaaataaacatgctcaatgcaattatttgaatctcacattgcatgttcatcaatcatagcactaaaaaaagagggggaaaaaacaccaaagaattcacatggggaaaaaatatatatatgaaaaccaccttattatagattttatagggcagctgaggttatggctcccttcttaactgtaactcaactattctgtattcaatgacatttgtttctaatgattaattggttcactcacttgatcatataatagcaaactttataaacctgtattgtgtagagatgtgaaatctctatatttcaagagcagaagagttctttctagacaccttacatcaagggacactggtccaattattatcgcttatataagcactcc

SEQ ID NO: 353312 - DNA, 547 bp, Homo Sapiens
  misc_feature (316)..(329): n is a, c, g, or t
  misc_feature (529)..(530): n is a, c, g, or t
  misc_feature (536)..(536): n is a, c, g, or t
  misc_feature (543)..(543): n is a, c, g, or t
  misc_feature (545)..(545): n is a, c, g, or t
tggaaactgattttgccaagctcttacaaggtggttcatctatcgatggcatccgcatttggtatctttttacacttcaaccaaaaatttattaggtatttttcaatgctaagtcttgccttttattttttaatttcactgccaagtttgcagtggttctaagtgaatctgtgggcattttagcctgtggtcttgccagatctttgcgaattacaatgcatatatgtctatttattcaatatctgtcatataatatctatttggaagaagaaactttctcttgtagtgcctcttgacaaagcacaatttcccgccnnnnnnnnnnnnnngtgaaatgaaaaaacaaattgtgttttattgcggtatcaacaatgtgaataaggattaacatattgtaaatgttcttttttccatgtaaatcaactatctttgttatcactaagtgataattaatttttaacttatgtgcattgttaggctgttagaattttttggttgttaaaataaacgcattcaataaaaaaacaanngacacnaagatantnaa

SEQ ID NO: 353313 - DNA, 382 bp, Homo Sapiens
  misc_feature (39)..(39): n is a, c, g, or t
  misc_feature (78)..(78): n is a, c, g, or t
  misc_feature (178)..(178): n is a, c, g, or t
  misc_feature (181)..(181): n is a, c, g, or t
aaagcccataaagccattattatgtcagcaagcctcganacattcataacatatctaacatatcaataccaaaagtgnaaattctagacacttttggatcttcctcccaagtatggtattagtctaaagaatgacagttgaggtaagttggcagggattcctgttagaactctaaaanctnacttatgaagcaatgagccagtcgagttccccttcagggcttgtttcctaatggatgaaactaaggaattgaattagatgctctgtaaatatccctacagctgtagcattctgggtgcaaaattttcccgagatgcaaaccactaccaccaccaccacaacaaatccagttgttgagggatgatccccttcccagtaaaag

SEQ ID NO: 353314 - DNA, 1849 bp, Homo Sapiens
  misc_feature (476)..(491): n is a, c, g, or t
  misc_feature (720)..(737): n is a, c, g, or t
  misc_feature (924)..(924): n is a, c, g, or t
  misc_feature (931)..(931): n is a, c, g, or t
  misc_feature (1083)..(1083): n is a, c, g, or t
  misc_feature (1180)..(1180): n is a, c, g, or t
  misc_feature (1256)..(1256): n is a, c, g, or t
  misc_feature (1315)..(1315): n is a, c, g, or t
  misc_feature (1338)..(1338): n is a, c, g, or t
  misc_feature (1602)..(1602): n is a, c, g, or t
  misc_feature (1612)..(1612): n is a, c, g, or t
  misc_feature (1774)..(1774): n is a, c, g, or t
gggttttcagagcttccctggtgattgtgataagcctggtttggaaaccattgctggagaactttgtaaagatacagagacccagaccttttgtatttacatttaaatacaaatacaaatcctgggtttctatatgttctgttagcttttcaggtgattctgctacacagacgttgaaaaccactgccctaagaaagagatcagaggccacatatcagagagaaaagggaccaaaccttcggtggtttgttgtgtgtcgttttaatgccaattattttaacttgcacagtcttctgaaaccttgtattaatagttctcttttgtattaccattttcaggtagggttttgatcactatgattctgaagataatagtgaaatagtgaatttcattgatatgaagagataattgattttcattcattggtttgaacacctgcaaaatcacaaataaatgagaactaagtcttgtattcnnnnnnnnnnnnnnnncaaacagaaaaaccaaccatttttgtccaccacaaacgcaaaagaacaagcacgaacaaacaaggaaaagaacacctcccccctccccgagcccggaggcgaacatctagaatttgtcacgttcggccggcggcccccacgaagccggcagaaaaccccttaaaagacggtaacccgccacacaacaggaacgagcgagccgacccccatcaaacctttcacccgtgannnnnnnnnnnnnnnnnntctagtataccccacctcccataaagcaaaccgagatcacaatgaattcccgccccaacgaactaatcgcaccgacgacggttctagacagacgggaccatgcgaggggcgagcaccgacaggcggcccaaccgcgcccgcgacccgccggccgccctacgcggcccgccgcgcacactcaccgctnctacagngttatagcatcgcgcgacgtggcccgcggccgtgcctgtgtcgggcggaggacaactgtgtgtcgggagaacatgtcgtgtgtgagaggtgtcgtactcgctgcacgcacacgctctccacgtcacactcgcacgcctaatgtacgcgcgcnctccctgcctcagaacagatatatgatcgtacgtgcattctatgctacaccatatcgcggtgtctgcggcgcgctatcctctgccgctgtcgacgcnacatctcacagtatagcgtactccttcccgtcgacgactacgatgacctgctatgctcgcacgtcagagcgtactnaacggctgctgaatcctcacgccgcccctcacatcgcacacagcgtaggtatcataaanctcagtctgtgatagtgtgacgntcaggattgtgagatatgtatacgggttgagccgacgttacatcgaggacgaggtgtcgacggaccatcatcgtccgctactgtcgtggctatccggctgcctccggaatatataactatacgctatctgtctcgctgcacatcagaccgacgtcgacacctgaggacgccgcaagcacggctctcgttcaccgatctcgagatgtccccgctgcacaccactccagcccgccagtacagcgacgctgcgcaggacgcgtgtcncgagtggtgntcatcgatgtgcagatcacccacagatcataccacgatatgccccatcatctgatgcgcctaacagtcaccatactaaagctgtgtcaccgaggaatatagatgcaggagtatagatggacgcctagtatgttgcctatgccatagcgcggagaacgagtancacgcccagcggcctgatcgcagcaccataagactggatatgtctagaaatctggaagacatgccatcgccctgg

SEQ ID NO: 353315 - DNA, 475 bp, Homo Sapiens
  misc_feature (219)..(219): n is a, c, g, or t
  misc_feature (225)..(225): n is a, c, g, or t
  misc_feature (277)..(277): n is a, c, g, or t
  misc_feature (411)..(412): n is a, c, g, or t
  misc_feature (439)..(439): n is a, c, g, or t
  misc_feature (448)..(448): n is a, c, g, or t
  misc_feature (471)..(471): n is a, c, g, or t
  misc_feature (473)..(474): n is a, c, g, or t
agaaaatgtgctttgcaaagcaaaaaaggcaaaaattggggatgagttcttcagacaagtaccaaaaatgatttctcgtcatttttaatgtatgcatattcatcatagaaaataattttttgttttattgggaataaaatcatgatacttaaaatctgatacacatttcaatgatcgtattaatccaataggttaaattaacaaattcttaggaaaaanatctcntttatatgaagctatggagaaatctagaaagtaggtaatggtttagattttnagggacctatgaactcagaacaagttcatttagaggtgggaaacctgagattcaaagaggtctgcatggctgccaagattgcagggacagaatccaagcctgggctcactcatgatctgctctcctgtataaanngtcccatgtgcatctatgaccttattntttgaaagnaaattcatattccacggcttgtntnnt

SEQ ID NO: 353316 - DNA, 762 bp, Homo Sapiens
  misc_feature (495)..(517): n is a, c, g, or t
  misc_feature (520)..(520): n is a, c, g, or t
  misc_feature (524)..(527): n is a, c, g, or t
  misc_feature (529)..(530): n is a, c, g, or t
  misc_feature (535)..(535): n is a, c, g, or t
  misc_feature (537)..(537): n is a, c, g, or t
  misc_feature (546)..(573): n is a, c, g, or t
  misc_feature (584)..(593): n is a, c, g, or t
tctaaactataagtttgttcagaggggcttttgcaatgatagcagaaaactgtacaaatgtacagttagttatagaggttcttgttgaaatgaacttaccatctgatgatatgtatgtacagctgtgtacttgagtcttttttagtttacttagaaagactagcagtttgacctgttaaacaggactagttcaagtcaagaaactaaggttgttgtatacacctggaggcatctgttattcagcttatcctttgagtgggtatttggcacaatgaggataaacttatgtgacccacttgaatggctgatctaataatgttgacattatgcattctgtacttagtgaaatgtcagatgaaaataactgatgaataatttttttgtattaaagggatgggaaaagaacacatgaatttgttaataaagcactatgatctgcaaacgatggaatgtttcataaagatctaaagaaataaaggaaactttaaaacgggnnnnnnnnnnnnnnnnnnnnnnnaanaaannnnannttttnanaacgaaatnnnnnnnnnnnnnnnnnnnnnnnnnnnnttttttttggnnnnnnnnnnaaaatttggggggccccctccgggcccctaagaaaattttctaaaaacctttggtttggggcgcgggggccccgcaatggaaaggggaaaaagggggctcccacggggttctccccaagaggaatccgcgggcccaaacccaaagggggttggggtctccccccccaat

SEQ ID NO: 353317 - DNA, 918 bp, Homo Sapiens
ggagacccttaggcactccggactaagatggcggcgacggccaggcggggctggggagctgcggctgttgccgccgggctgcgcaggcggttctgtcatatgttgaagaatccatacaccattaagaaacagcctctgcatcagtttgtacaaagaccacttttcccactacctgcagccttttatcacccagtgagatacatgtttattcaaacacaagataccccaaatccaaacagcttaaagtttataccaggaaaaccagttcttgagacaaggaccatggattttcccaccccagctgcagcatttcgctcccctctggctaggcagttatttaggattgaaggagtaaaaagtgtcttctttggaccagatttcatcactgtcacaaaggaaaatgaagaattagactggaatttactgaaaccagatatttatgcaacaatcatggacttctttgcatctggcttacccctggttactgaggaaacaccttcaggagaagcaggatctgaagaagatgatgaagttgtggcaatgattaaggaattgttagatactagaatacggccaactgtgcaggaagatggaggggatgtaatctacaaaggctttgaagatggcattgtacagctgaaactccagggttcttgtaccagctgccctagttcaatcattactctgaaaaatggaattcagaacatgctgcagttttatattccggaggtagaaggcgtagaacaggttatggatgatgaatcagatgaaaaagaagcaaactcaccttaaaataatctggattttctttgggcataacagtcagacttgttgataatatatatcaagtttttattattaatatgctgaggaacttgaagattaataaaatatgctcttcagagaatgataaaaaaa

SEQ ID NO: 353318 - DNA, 1057 bp, Homo Sapiens
ggtaccggtccggaattcccgggattgggcatataggagattttagtgactgcagtcagctgtctggcattcctttctcagtttgcatctaaaagactacatatgtcaagcttatctccacctgaatttgctgcctgctataaaaacatttcattaatatatcccattcttcctacctccatctctggtttgtcattagtggtattctgaaaagcttaagaaaaaagaatcattgagtagaaagtgaacattttaagttattttcctttttcattggcaattagttaacatgtaaaatcttttccattaaactgtataacttttaataactatatattatatatgggataaaatatatggactgaattgtgagaatataaatgcatcgaaagactctggtgtcatgaaagcacaagaataaggctggagatggtcccagatccaagatgtcccaaaagccttttgtatcagtttctctatttttggtattttgcataatgcatggatccttagttcaaatgagggacaaagtttctcagtcagccccacttcctttctttctaactcctacctttcccttgcagaggaggtagtagagattctggaattgtctatttttatgaattccattattttgtccatggcatctctaatgaaaacaggttctagaataaaggagttgattagtctgaacagtactaattaactacaaaataaacgttagtgatcagcctcttcctctataaacaatgaccaattagacgtttccgtaattccatgtattatgtatagtacactctataaatgtaaatgtaatgcttgtctaaaaagtgcaatttattgtacattgtcccaacaaatgtttacttttataatcgttatgaacttgaattggattagtatcttgtttttatgtgtgaatgaagccttgtgaaataaacaaatgcaactgagaaggtaacaaggtgactgtttttgtgagccagtgatgttttcaatgctttgtgttgcccctttggccccattaagcagtaataaacatttgttctgaagtacc

SEQ ID NO: 353319 - DNA, 550 bp, Homo Sapiens
  misc_feature (455)..(455): n is a, c, g, or t
  misc_feature (458)..(458): n is a, c, g, or t
  misc_feature (470)..(470): n is a, c, g, or t
  misc_feature (474)..(474): n is a, c, g, or t
  misc_feature (494)..(494): n is a, c, g, or t
  misc_feature (511)..(512): n is a, c, g, or t
  misc_feature (520)..(520): n is a, c, g, or t
  misc_feature (546)..(546): n is a, c, g, or t
caggtggcagggtgtagcaccgggcccctagctactgttggggaccccaacacagtaaaaaacttgcacgtgggagccgccctgaggcccaaggccgttgagtgcttggtgtgctccaagatggcgctgatggttctgttctatccgtgccagcaccgcaccgtgtgtgaggagtgcgcgcgcaggatgaaaaagtgcatcaggtgccaggtggtcgtcagcaaaaaattgcgcccagacggttttgaggtggcgagcgccgcccccgcccccggcccgccgggccaggtggtggaggagctgcagagccgctaccggcagatggaggaacgcatcacctgccccatttgcatcgacagccacatccgcctcgtgttccagtgcggccacggggcatgcgccccctgcgggtccgcgctcagcgcctgccccatttgccgccagcccatccgcgnccnatccagatcttncgtntgagccgcgccgtccgccgngcccgagctgccttcgnntgcccccnccccgtgttttataaaaagaaagatntcgg

SEQ ID NO: 353320 - DNA, 551 bp, Homo Sapiens
  misc_feature (129)..(129): n is a, c, g, or t
  misc_feature (519)..(519): n is a, c, g, or t
taaagaatgtatttggctactatatatggtatagacaaagcatcaaactagtgtacaggaaaaaagcctgactatttctatttggaagtaggctgaaaagagaattttcaaaactgttcgtgtcttcanttcattctgtcataactttgctattgtaatatgtgaataccagtttatttaagctgttctcttttatactgtattaatttaatgttcatctgcgtttagtaccatttttgttattaaaactggcatttaccgtttttcacattaacccaccttgcaccttcccccaaacttatctccacttttctatgcattctatcattgatttgacacacttcatagtgagtcatttaaatactctacgtttggttcaattaaccagtaggttacagttattgaaaattaaagtacagtttaaagctcagtctgttacactgaattgattgtgtttgtttttgccaagggtttagatatgcttttaaatattagaaacatctaagacagattacatanttaacctctctcctggtaagttactggaggtt

SEQ ID NO: 353321 - DNA, 1712 bp, Homo Sapiens
  misc_feature (397)..(459): n is a, c, g, or t
  misc_feature (711)..(711): n is a, c, g, or t
atccgcgcgcccgcggccctagtagtggatctcgtaggcgaccggcgggggcacgcggagtcccggccccgccccctgtgccgggccgcagtcagcgggcgcctccgccggaccctcggcgaagagcggcttggagcggttgatgacgaacatctcgtggccgcgctcgtcgcggagctcctctagctgtgcgaacgtacaggggccgtccaagtagtcgttgacgaacagcgctccctcccccggaggcccccgcgccttttttcgcctgcggcgccggcgacagatcatggcgaccaggagcagcgccgtgagcgccagcagcgcgatggccgccgcaatggccgtctgtgtggccacgcccagggcgcggaaggccatgctgcccgcctcgggnnnnnnnnnnnnnnnnnnnnnnnnnnnnnnnnnnnnnnnnnnnnnnnnnnnnnnnnnnnnnnntgccgggacgcgttgaccaggagccggaagggcacgcgggcagcgccgccggcgttggaggcctcgcactcgtacttaccggcgtgcgccagcgtgatgttgctgaggaagagcatgccgctgcccgtgtcggatgccgagtgtccgcccaggcccagcaacccgccttctagctgggcctgggctcgcggccggccctcgcgaggctggggcacctttctccaggtcaccaatggctgcgggtagccgganttgggcaggcaacccgcaggtcctcacccaggttggctgtgagctccagcggctgcacgtggacagagggcggaatgcagatgaggctgctgtgggatacgtccaggagactctggagcgccaggcgcgggggctctgcacacatgatcttcctgtccctggaggtgagcagccgctggccgccctccttgatccaggcacccagccagtgcagggcgcagtcacagcgccatgggttctctgtgaggcgcaggacttgcagactggccaggggctgcagggcctctcggctgatggtgcccagctggttcctgctgaggtccagcagtgctagggaggacagccccgctagagcctggtcctccagcagctcaatgctgttttcttgcaggtgaagctcctgcagtcgcggcaggtgcaagaaggtgaaatccagcagccgcgccagctggttgcccgccaggtagagcacgcgcagctgggccaggcctacgaaggcgccgctgcgcaagccgcgcagccggttgctagtgagcgccagctccagcaggcgcggctgcgcgcggaaggcgccggcctccagggcgcgcaggctgttgttgtgcaggtagagccggcgcagagcggcgagtggcgccagggctcccggctctaggcgggcgatgttgttgtcctgcaggaacagtgtctgcgtccctggcgggattcccagcgggacgacgcgcaaccgcagggcgccacactccaccgtggcgctgtagcagcggcaggctgctgggcagccggcggcgcggagcggcagtagtagcagcagcagcggcagcagtgcgggggccctcagggccatctcccgaggcccggttcctcaccggcccttccgcggttcagccgcagacgcgtgccctcctgacgctcccgcggcgagcggctcccccgccgtgcaggtggcggccgggcccgagcagtcgccgatcccgggaattccggaccggtaccagccc

SEQ ID NO: 353322 - DNA, 1364 bp, Homo Sapiens
  misc_feature (1265)..(1273): n is a, c, g, or t
  misc_feature (1325)..(1325): n is a, c, g, or t
  misc_feature (1334)..(1334): n is a, c, g, or t
ggcgctaccgagggctccgtgggcgtgatcccccacacagcctcattttgcattccagccctctgggcccggtgcaaccacttgaagttcacagccaacctgggttaagaactggcgggttgcctgcaaagcctacgggctacccacaaccattggtgaccctgaaaaaaggtgccccaggcctcgcgaggggccggaccgcgaagcccaggcccagcttataagccgggttactgggcctggggggacactcggcatccgacacgggcagcggcatgctcttcctcagcaacatcacgctggcgcacgccggtaagtacgagtgcgaggcctccaacgccggcggcgctgcccgcgtgcccttccggctcctggtcaacgcgtcccggcagcagccgcagcagcccgcgcaaccgccgcctccggccgcccgccccgccggcagcgagccccggcccgaggcgggcagcatggccttccgcgccctgggcgtggccacacagacggccattgcggcggccatcgcgctgctggcgctcacggcgctgctcctggtcgccatgatctgtcgccggcgccgcaggcgaaaaaaggcgcgggggcctccgggggagggagcgctgttcgtcaacgactacttggacggcccctgtacgttcgcacagctagaggagctccgcgacgagcgcggccacgagatgttcgtcatcaaccgctccaagccgctcttcgccgagggtccggcggaggcgcccgctgactgcggcccggcacagggggcggggccgggactccgcgtgcccccgccggtcgcctacgagatccactgctagggccgcgggcgcgcggatgacgtgggcgccggagattggccggtgcggcctcgcgcatgctccgtcagtaaaggtggaagccgcgcagtgtgcgctgagccgtgtgtggggcgcgagccgggaacgttgcactcgggaatcctggggtagcaatggaaggtggccggggaggccccaacacctcccttgaagctcttccgaaaagacatcaccccaacctccagctctgcgtggggggggtccctcgctggccctggccggtcacagtaggatcttgggcctccgaaaggtgggaagagcaaggactggccggcagtgccgacggggctgccccgcgaagggcggggcgacaggctggatggcagttgttgcccggtggccatgttgggggtgacagcagagataaggataagggtgaccaacgtggacagnnnnnnnnncagccacaaattcaacctcgtgccgaattcgccacccaggctctctcctttnggcgggtanagatattttaagggtgaggggtaaaagagg

SEQ ID NO: 353323 - DNA, 1961 bp, Homo Sapiens
tcggaaggccagggcgggcgagcccccgaggcccgagggagagggaagagcgccgggcccgggtcgcggaggcgggcgccgccggaacgcgaagcgcggggctactgcgggcaggcgcgagttcgcgcagcaccgcccccggcgtgacctgctggtcgcttccggcgcgggaggagaatgtggccgccttgcgggacgctccggaccctggccttggcgcggtcgcggggagcccgggcctgcagcggggatgggggcgtttcctacacgcagggccagagtccggagccgcggacccgcgagtatttctactacgtggaccaccagggccagcttttcctggatgattccaaaatgaagaatttcatcacctgcttcaaagacccgcagttcctggtcaccttcttctcccgcctgagacccaaccgcagcgggcgctacgaggccgctttccccttcctctcgccctgcggcagagagcgcaacttcctgcgctgcgaggaccggccggtggtcttcacgcacctgctgaccgcggaccacgggcctccgcgcctctcctactgcggcggtggcgaggccctggccgtgcccttcgagccggcgcgcctgctgcccctggccgccaacgggcgcctgtaccacccggcgccagagcgtgcgggcggcgtgggcctggtgcgctccgccctggccttcgagctcagcgcctgcttcgagtacgggcccggcgcgcctgcgctgccctcgcacgtgcgctggcagggccgccgcctcgccctcaccatggacctggccccgctgctgctcgcggctcggtcgccctgagcggggccaagggaaaggcgggaggccgcgggcgcctctcgccccgctcccccgggactccacgccccggaaagcccgcgccacccgcgctcgcggcagcctagtgcgcctgcgcgctcggccccgcccccacccggcgctgtccttggtgctgccgcggcccggccctcccggacaccccgctccccacggcgcgcgccccccgcgcacccgactccggcgccctccggattggcctgcgctcgagacgtcaggcacaggcggcgggcgcggggctctggtgcgcgtgcgcgagcgtcccccgccccctcccagcccggcgactgctcgggcccggacgccaactgcacggcgggggagccgctcgccgcgcggagcttcaggtgaggggacgcccgacccaaggtcaccaggcgtgggggcgctgggggatcggggaccatcccggctctgaccctggtgcgctccgagaagggcgtgggtcctggagggggatggggaacgcgcgagcccacgccctccctgagcccggccgaaaaacaaccggctctcgtgggaagcagaggaggccgtgggggatacaggcaccaggtcgcagcgctgcagaggtgcgcaagggccgcccaaaaaccagcttgggcctcgcactgcgcccgaggcagacacagggcgtcccatcctcttccctccccgctcccgcacagaggggcgcccaggaggcagtgacagtcgtcgcggaatcctgcgtgtgacaccccgcccctgcccagcggattagggagttgtcctctggtaaaaggatttctgggctgcttccagcttggggccctcatccctgccctggcaggcctttctacaccgatctgcatctagtggggggtcagcgtgagcagcagcgccgtgagttctgaggccaagaaccttctccacttgagaagccttcctgggggaggctgagtgggccaggcctggagccacgtaccaacactttatacccaggggaatggatcccaagggcccagataacgcccccaacttcttggggttcacacgcgtcctgagacatctgggaactgcctctgcctgggccaaagctattccattaaaactttattgctgtgcttacttaaaaa

SEQ ID NO: 353324 - DNA, 1632 bp, Homo Sapiens
accccttccttgacccccaagctccttggggcggcaggcccttcaccctcgcccccctcccctttagctctgtgatgcctgcctgttacagatcacttctccgtcggtctctgagaaagcacctgctccttaagtcttcctgcaacaagtgccactgtttttaggaacctgggcgtccacatagacatctcaccagcactgaaacctcacaagtcctctcagccttgcctttggatgccctctcttgggaatgtccccagtcctggtcagctgtctctctcctttgcaattttgtctgcctcccctcagcctaaaagtgtgcagaaccctcaattctgttaagtcaccctgtggagttcctgtcttctgttttccccaggcagggtgcctgagctgtattccccagcacacccactcccgcagccctccagtgtggctgcaggcggtggtgcagccttccagactgctgcccagttgcctgatgtcagagcccctccacacatgagcctgctccctactgccaacaccgtggcccagacagagacgctttccgaggaagaggtacctgtgaggcgcaggacttgcagactggccagggcctgtcagggcctcttcggctgatggtggcccagctggttcctggctgaggtccagcagtgctagggaggacagccccgctagagcctggtcctccagcagctcaatgctgttttcttgcaggtgaagctcctgcagtcgctgaagtaaggacagcagatcgtgaggaaaaagggcgcccgaggttgggggcatgtctctcttcttaccaagctagactgggttgccttttctaactattccagccctacagggcgaggggccataatggagtatcccggccctttagaccccaggcgctcaccggcaggtgcaagaaggtgaaatccagcagccgcgccagctggttgcccgccaggtagagcacgcgcagctgggccaggcctacgaaggcgccgctgcgcaagccgcgcagccggttgctagtgagcgccagctccagcaggcgcggctgcgcgcggaaggcgccggcctccagggcgcgcaggctgttgttgtgcaggtagagccggcgcagagcggcgagtggcgccagggctcccggctctaggcgggcgatgttgttgtcctgcaggaacagtgtctgcaggccggggaaagaggaggcgcttaccccgctgcgggggtcttcctctccctgggggcaccccgtcctcccgcagctccacacggtgcccacctgcgtccctggcgggattcccagcgggacgacgcgcaaccgcagggcgccacactccaccgtggcgctgtagcagcggcaggctgctgggcagccggcggcgcggagcggcagtagtagcagcagcagcggcagcagtgcgggggccctcagggccatctcccgaggcccggttcctcaccggcccttccgcggttcagccgcagacgcgtgccctcctgaaacacaggttggcaggccagtctcggcagtcgagagccagccaatagatggaatggaggcctgcacctgcgtctaacttttgacactataaataggttcaagaaactaataaaacgttctggttttctcctttg

SEQ ID NO: 353325 - DNA, 353 bp, Homo Sapiens
  misc_feature (66)..(129): n is a, c, g, or t
cctggcgggattcccagcgggacgacgcgcaaccgcagggcgccacactccaccgtggcgctgtannnnnnnnnnnnnnnnnnnnnnnnnnnnnnnnnnnnnnnnnnnnnnnnnnnnnnnnnnnnnnnnagtgcgggggccctcagggccatctcccgaggcccggttcctcaccggcccttccgcggttcagccgcagacgcgtgccctcctgaaacacaggttggcaggccagtctcggcagtcgagagccagccaatagatggaatggaggcctgcacctgcgtctaacttttgacactataaataggttcaagaaactaataaaacgttctggttttctcctttgacaa

SEQ ID NO: 353326 - DNA, 951 bp, Homo Sapiens
  misc_feature (16)..(16): n is a, c, g, or t
  misc_feature (97)..(160): n is a, c, g, or t
  misc_feature (385)..(479): n is a, c, g, or t
  misc_feature (562)..(625): n is a, c, g, or t
ccgcagctccacacgngtgcccacctgcgtccctggcgggattcccagcgggacgacgcgcaaccgcagggcgccacactccaccgtggcgctgtannnnnnnnnnnnnnnnnnnnnnnnnnnnnnnnnnnnnnnnnnnnnnnnnnnnnnnnnnnnnnnnagtgcgggggccctcagggccatctcccgaggcccggttcctcaccggcccttccgcggttcagccgcagacgcgtgccctcctgaaacacaggttggcaggccagtctcggcagtcgagagccagccaatagatggaatggaggcctgcacctgcgtctaacttttgacgctataaataggttcaagaaactaataaaacgttctggttttcttctttgacaannnnnnnnnnnnnnnnnnnnnnnnnnnnnnnnnnnnnnnnnnnnnnnnnnnnnnnnnnnnnnnnnnnnnnnnnnnnnnnnnnnnnnnnnnnnnnncccttgtccgccccctccgccccccaaaaagtttttaaaacatttttttgggcccggggccccaaaaggaaaggaaactgggnnnnnnnnnnnnnnnnnnnnnnnnnnnnnnnnnnnnnnnnnnnnnnnnnnnnnnnnnnnnnnnnccccgggggaaacccaacggttttgaacaaaacccaaaggaagtttggaggggctttacgggatctatccaagggggggtccaaagcgaagccccaaataaaaatttaagcccccgcccctgggcctttttattggaaaaaaccgggtgggaacttcacttaaaagatatttctcgcccgcacttgggagaaccccttttcccaaaagggggatgggaagaaaacccttaaaaccccccccacgggggcttattccaaccccctttggtcgccccctttgggaaaataaaatttttccccccactgggggaaaaacacgggggggc

SEQ ID NO: 353327 - DNA, 807 bp, Homo Sapiens
catttcccatggccacgctcagggcgacccgagccgcgagcagcagcggggccaaggtccatggtgagggcgagcagccggccctgccagcgcacgtgcgagggcagcgcagcgcgccggggcccgtactcgaagcaggcgctgagcctcgaagaccaggccggagcgcaaaagaacaacagccgcccgcacgctctggcgccgggtggtacaggcgcccgttggcggccaggggcagcaggcgcgccggctcgaagggcacggccagggcctcgccaccgccgcagtaggagaggcgcggaggcccgtggtccgcggtcagcaggtgcgtgaagaccaccggccggtcctcgcagcgcaggaagttgcgctctctgccgcagggcgagaggaaggggaaagcggcctcgtagcgcccgctgcggttgggtctcaggcgggagaagaaggtgaccaggaactgcgggtctttgaagcaggtgatgaaattcttcattttggaatcatccacggaaaagctctgctccctggtcagccaattctttccgcaccttttccctcttttcaagtttgtaatcagttgtaccacctcctccgcggagactacctggcctgctgcctcccggacatgcacgctgccttttgacagggcttccaaaaaaaggcagggcggcccgggtgtctccctggcagcggcgagaagtcagcgccggggctggggacttgtaggacagagtccgaagctgcacaacgcagcagggacgcggcccatgtaggagcctcggcccggaccgacccaactccccg

SEQ ID NO: 353328 - DNA, 1606 bp, Homo Sapiens
  misc_feature (621)..(630): n is a, c, g, or t
  misc_feature (1228)..(1228): n is a, c, g, or t
  misc_feature (1491)..(1491): n is a, c, g, or t
ctgcgctctccttgccctttccccgctccgccccgctttctaggccggcaccggttcggaattttccagatgggcgagcccccgaggaccgaggcagagggaagagcgccgggcccggctcgcggaggcgggcgccgccggaacgcgaagcggcggggctactgcgggcaggcgcgagttcgcgcagcaccgcccccggcgcgacctgcttggtcgcttcctggcgcgggaggagaacgtggccgccttgcgggacgctccggaccctggccttggcgcggttgcggggagcccgggcctgcagcggcgatgggggcgtttcctacacgtagggccacagtccggagccgtggctctccgcgtatttctactacgtggacccccagggcgcctttctcccggatgaccccccactgaagaacttcctcacttgcttcaaacacccgcacgctgctggtccgccttccttctccccgcttgagaacctaactcgcattgcgcggctcaccgacgccccttcccccccttcatcctccggcccggccggcccaaaaccgccctctctccctgccgccgccgaggaacctcgatgggggacccttcaccctctcgccacttttnnnnnnnnnnttttgttcctctccacctgcttccgcgcaatgggccatgtcacgcttacgcttaggcacccccccggttcacacgacccccatggcttgaaggtcgtctcctctccccctcctcccccccgaaacgcggctagtcttcgaagggatgcctgctgggcctcctcgccccgtggacgcgcgacgtgcatgccaccacgggtctccccgcccgccagcgtggacgcacgtacccgcagccttagccctcccgtactttgacgccgtccatgccccttacactcactcgcccccgcttccctttcctcgctcccgttccgcccccgccccctttccgcgcgcataccaactggagcacgattctaccgcacttgaacgcttgcctacgcacgctactacgcgtgtccggtatgtgcgcgcccctgtcgtgccgtgccgccggccgagcgctaaaatgcctcgttcgcaagacgatgacgtcccgcacccgctgcgcgccttatagccgcctatgtcccgcgcgcgcccggtatccgcttcgcgtcgctcctcttaccgttgtttatgcgtgcttgtacaccgtccgcgtctatagagtctcncccctactctcccccgcgcgactttcactccgcacaccttgtacctcgccccgcgtcgccctacgtactccacccgtgcgtcacgctttttcgccgtgccctgctcgtcttatcacctcttatgtgaaccagagccgctcttgcgcgcactaaaatgattgcccccttatgtttattaccgcggcatgttgggagccggacgttgttccgcgcccgtgtttctgcgcccccccttgcccccgccatatcggcgacggccccgngcgccccttaccctatggcccattttttccactattataaaagcaataagggcggccaccggcggcgccgccggattcgggaggcagcaaaatcacgccgatgtgataattggtg

SEQ ID NO: 353329 - DNA, 598 bp, Homo Sapiens
  misc_feature (2)..(2): n is a, c, g, or t
tnggactccagccgctgttggctgggaatcgaagttagaggtgacttccaaaggccccccgagccggcagtgccccccaccacccctccagcgactctgcggtgccagtgccttgttggcttttccggctacgcaccctgcagtcactgagctctcggtctgacgtctgatgtttgtggtttgtttataacacggggccttacctggggaattcagctggtttgaatatttgtagcccgctcccagaatgtcttattttgtaatgactgaactacatttagtaatagttacacatgtatatggttaatacatatggaaattcaatatattttgtagttaacgtattctgaagtaacggatgtttctcgccaatcgtagtgacttcagctaacgaaatgttcttttgtagtaccacggtcctcggcctaacgaaggacgtgaaccttgtaagaggagagctctgaaacgcggtcacctttgtttagtggaagggaaagtgtgttcccggcatgaggtgcctcggaattagtaaagaattgtgggcaatggattaaccactgtatctaagaatccaccaattaaagcatttgcacagaca

SEQ ID NO: 353330 - DNA, 434 bp, Homo Sapiens
  misc_feature (65)..(65): n is a, c, g, or t
  misc_feature (95)..(95): n is a, c, g, or t
  misc_feature (200)..(200): n is a, c, g, or t
  misc_feature (262)..(262): n is a, c, g, or t
tgttttaaaaacaggggcccttaccccggggtaatccagctggtttgaaataattgtagccccgnccccccagaatgtcctaattttgtaaatgnactgaaactacatttaagtaatagttacacatgtaatatggttaatacatatggaaattccaatatattttgtagttaacgtattcctgaagtaacggatgtttnctcgcccaatcgtagtgacttcagctaacgaaatgttcttttgtagtaccacggtcctcggncctaacgaaggacgtgaaccttgtaagaggagagctctgaaacgcggtcacctttgtttagtggaagggaaagtgtgttcacggcatgaggtgcctcggaattagtaaagaattgtgggcaatggattaaccactgtatctaagaatccaccattaaagcatttgcacagac

SEQ ID NO: 353331 - DNA, 473 bp, Homo Sapiens
  misc_feature (26)..(26): n is a, c, g, or t
aagtccccggatggttttattaaagncccatgctgtgttagaaacatacaagtgatgagaaaaacattaacttgaaacatgcacttactggcattctctaaaataccattatacaagttttcatttaattagaaaaatacccactaaaacaaatcacagttcttcttaaagatttaaaaaaaatgtattggccagaacaaagtccaagagaataaacaaagttctgaattgtatgtcaaaaaaactgtacaaggttgtacataaaactatagcttacaaaagactcaggtatagtaagaattctgaattaagatttccaaagttctatttaccaatatctattaataaaatccttatgaaataattgacttagaaaaagtgaaatgctcatgatttcagagtgtatagaaaatactaaatatcactttccgaaataaagtgtactcaaaacagcacaacatacagtctaaaat

SEQ ID NO: 353332 - DNA, 473 bp, Homo Sapiens
  misc_feature (410)..(429): n is a, c, g, or t
cctctaaatctcaaacgtttatacaaagagacactggaaattgaaccaagaccagtggattcagtgtggagcagctctattcctaaaaaatcagtagaatctaatgacaacaaaagccatcttcacaaaagggaacattgattctttaagctttaaatcaaacatgtggtcagtctacatttgaaaatgtgtaaaagcagcactgtgcatcttttaaagtaataaattaatggagttattgttaaaacagagtattcttttgacaacattaaatatttctgtgagaaagttcacttttccagtggctcaaaaatttgttttaggtcagagattttaagtggtatattaaccaataataaatattttggctgtcatttgtgtcataattatttaacaaaagagcattcatnnnnnnnnnnnnnnnnnnnngagactagctcgtgccaattcctgcagcccgggggatccactag

SEQ ID NO: 353333 - DNA, 991 bp, Homo Sapiens
  misc_feature (282)..(282): n is a, c, g, or t
acttcccgggatatccgtctcaaagaagttgacagtgaacactagtccaggccttactgactttattctcaaagtaccataatctttgttttctatatttggaatcggtgaacacaatggaaagcatagctcttaaggtagaatagagtaacctctgacatttgcgactttaatgcatattttcatgacatatttgtttccctggcagatccctggcttgctactacaaggatgcacctttgatggaaatcaactttctgaaaatccccttgattctaccancgtgccctccctgctcccttgctttatgggctgcattccacaggatgcatgtggtccatattctccggatgagtgcatctctttgcctgtttacacaagtgctgaaagggatcgtgtggttaccaatattgatgttccatgtgggggcaaccaagaccagtggattcagtgtggagcagctctattcctaaaaaatcagtagaatctaatgacaacaaaagccatcttcacaaaagggaacattgattctttaagctttaaatcaaacatgtggtcagtctacatttgaaatgttagttcaaaatattaacatatagttatgttgttgatgtcactgaaattttaatgtgtaaaagcagcactgtgcatcttttaaagtaataaattaatggagttattgttaaaacagagtattcttttgacaacattaaatatttctgtgagaaagttcacttttccagtggctcaaaaatttgttttaggtcagagattttaagctggaatattaaccaataataaatattttgcctggcatttgtgccataataatttaataaaagagccttcctacattttttgcagcccttccccggcctccttttttcctacctggaaaaatggtattatacaggctatcacgacaatggtaaaaaaggttcccccctggaaaatacttaacccatgcgccaactacaataatccccacctt

SEQ ID NO: 353334 - DNA, 457 bp, Homo Sapiens
atcatcatcatcatcagttttcttgttttaaaataggggtttggagtctcttcaaggctttctgttttggaaaagtaaaacttaaaaatctatagccatgtgaattatacttatggagaaaaagagtcttgttttattaacatcagacatctttgttcctactaattattttggagtaatgttcagtatcgggctaatgatcgatggatatcactcatccaattatgatgcatggattagaccacggccttaaactttgtacatagtgttgaataaattcatcttatttgcagtcttattgtcatctagctttgatacacttgccctttcatatgtctcttgtcactattctgtgtaagattataatcccaaataccactatatgtatttttcttcatattctattattgaacagtattaatgcttaatgttaatatataagtaatatatacatttt

SEQ ID NO: 353335 - DNA, 1156 bp, Homo Sapiens
  misc_feature (6)..(6): n is a, c, g, or t
  misc_feature (15)..(15): n is a, c, g, or t
  misc_feature (17)..(17): n is a, c, g, or t
  misc_feature (20)..(20): n is a, c, g, or t
  misc_feature (25)..(25): n is a, c, g, or t
  misc_feature (27)..(27): n is a, c, g, or t
  misc_feature (30)..(30): n is a, c, g, or t
  misc_feature (38)..(38): n is a, c, g, or t
  misc_feature (40)..(40): n is a, c, g, or t
  misc_feature (45)..(45): n is a, c, g, or t
  misc_feature (49)..(49): n is a, c, g, or t
  misc_feature (53)..(53): n is a, c, g, or t
  misc_feature (55)..(55): n is a, c, g, or t
  misc_feature (57)..(57): n is a, c, g, or t
  misc_feature (70)..(70): n is a, c, g, or t
  misc_feature (78)..(79): n is a, c, g, or t
  misc_feature (82)..(82): n is a, c, g, or t
  misc_feature (93)..(93): n is a, c, g, or t
  misc_feature (95)..(95): n is a, c, g, or t
  misc_feature (103)..(103): n is a, c, g, or t
  misc_feature (112)..(112): n is a, c, g, or t
  misc_feature (114)..(114): n is a, c, g, or t
  misc_feature (119)..(119): n is a, c, g, or t
  misc_feature (125)..(125): n is a, c, g, or t
  misc_feature (131)..(131): n is a, c, g, or t
  misc_feature (144)..(144): n is a, c, g, or t
  misc_feature (151)..(151): n is a, c, g, or t
cgtgtnagagcttangncanccctngnccntgcccgangntaggncccnagcnancnacccctcccaatncttcctgnnccngccgccctctncncccccaanccaaccccncntagantgaggnacagcngggcccctgcctncagtgcntgtcggagtggacgctggaaccggacagctgagaaccgtggggctggggcagggggtgtcagctgcacagcgggactctagggagatgggcgagcgagcgtctgctaactggctctggggcctcgaggtgccaggcagcatcaggcccactgggttgccccggccaggcctgcgaggaagggctgaggtggggccggcaggggcgccaggcagccgtgatcacaggtgacgaccgcaccgcggccgtgggactgatgcgggatcccgagggccttcctgcccacatgccccgggagaaaccgaggcccctccctcctcctggaacagcttccggctctcaagcgtcaccccaggggcgtcagttttacggactcaaggtcacctcaggaagaggcagggccaggttttgggataggctttgcctccaggatgggctgctcctgggcctggtgagctactgcccccaacctaccctctagaggggctgggaagggccgttctgggctcacctggcctgggagacccatctggtccctgcgtcctctgcccctcactgctctgtgcagatcctgtcgccctcagctgcctcctcccgagacctaatggtccctgctgggctcgagtctgcaggcccggctgcgtgtgccttggcctcactgtaccagtggttccctctctgcccggattctgagctcagtgtggtgtttggtgcacaggggttggtcaggggccatggccaaggccctgccacgcacgcccatccctcagatccactgtgagcaccaacctgctgcagtctcttgggcccctgctggcagctctgccacgtcaccgcctgcctggctcccacacagccatgcattgtcactctgcctccgggaccccagcttgggagctgtgggtctgccaggtcccacctcctctgtcccccatgccacaacctgggctcctggctacagcagggctccagggactccaaataaatgttcagtgactggcaaaaaa

SEQ ID NO: 353336 - DNA, 497 bp, Homo Sapiens
ctcaaaaccaactgaacttctataaagcatctctggttctttcaaagtttgtgttgtaaggagcaatgtagatgatgctataatactttatatttctgcttataatgacaaccaccagttctttttcacttaagttaggttgagaaattttatttaaaggccactgaagggcccattttcaattgggaaaatttatttacatctgtggtaaactttattttgatgaaaagttgcactagtattttaccaccagatgagaaaaagatgagcagcatttaaaaattaatgtatttaaaataaagtacagagaaagacatgtatataattatcaggctttgttttgaatggaatcttttcccccaattcttaatgtaaagatcttgtgctataacttttaaagccatacaaataagagtgctaaactgtggacttaaaagtaggtgtgtaaatatttttaatcagtattacttggaaaataaaatataacaaacccatag

SEQ ID NO: 353337 - DNA, 299 bp, Homo Sapiens
acaaatactggtcccagggatccagcacagtccgcagaacttccggtgatgatggaaatctctacctgagccactaatcatatgtgactatggaccaattgaaatgtggctattgaaaactgaagttttcattgcattaaaatgaagtataaatgactgtatggcaagtgactaccttactggacaacacagctctagactcatgcccagaaggtccaggtcatgatctggattcttgttagagacacagaccaaaccatgttcaggaccacatattacatcttagctcgtgccgaatt

SEQ ID NO: 353338 - DNA, 730 bp, Homo Sapiens
  misc_feature (418)..(418): n is a, c, g, or t
  misc_feature (420)..(420): n is a, c, g, or t
ccatcactgttgtagaatttcaaatcacaacccgacttaggagagtagagaaacaaagaaatgagtatctagaaaggcaaactgagttggtatatttggaatagctaagaaggacctgactttgagaagtgctagaccagggactaggaacgttgcttagataaaaattatggccgattacactgatgcgaaggagaaaacagtgtaacacagaggagaaagttaacagagatagaatctatgatttaattttgcaaatagtttttttagagaacaacatgcatactataaaagaaatgatactattaagaacaaacctacttgttccaactcttaaagaaatattcatggtttagcatttgcctctaaaccctgttagaaatatgtgaagttagaaataaaggttttttttaaaaanangcttttttggtatgtgaactgtatgctgtgctcagtatgtactgaaacatactatcttttattttctttaatttatatattccattcaaattctatattcttaagttagctaccacaacgttttcttattgtttcaatatggtatgtcccaatgaaatgctgtatatatatgtctaaactgtaaaaattatactgcaaatgttgaagttttgtatttatgagagacattgaaagtatggcttacagtatatcaaacttgtcacacttcaccatttgtatattaatagtaaagatacttttactttaaaaa

SEQ ID NO: 353339 - DNA, 1277 bp, Homo Sapiens
  misc_feature (1275)..(1275): n is a, c, g, or t
gactcatccaggttcccagcgaggcactgactaagcgaggctcagagcttccatatcaaattcctcagctttgttctgtgcccagagggggtgggccccattctgggcccggtgaactttgtcttatatatcaccatctgtatcagaattcctcctcaattgcagttaagtgaaaatacgtggaagtctgcttttccatcctgtattctcccacatcactactggctgtgcggcccccgctgcttgccaagcttgggaatccagagaggggcagtagtagagtgggccagttgggacccacccgcagagctgaagaaacacgccagactaactgatgggattccacaccggagcctctgagcgcacaggcaggcatgccaagggggctgcagggtttgtcctttacttatctgcccctttcctagaaaactcctcgtttctgaaattaggcattatatggttccaggacccagccttcaaaattcctggcaggccagcttcaacattccatggccagccctgcctaagccagacttgggtcccagtccctcagtctctccagtggatatcttctgtggtgcatgctgttgagtccaacccaaaggccaaccgaggcacacaggagttgggactggctgccacaaagctagaaagggacaaaacagcacttgcttccctatggccacatggatagtccctggatatccttgctgtggtagaggtcctctacccattccagccactgatagcagggggattttccttcctaaggagaacagatgtaacagctttgcaaagtaccggcccataggaatcaaatgggtgagatcagctttgggcctgaccccagcaagaccagcatctccagaccccagcctttctcctcaggcctaagagagtcagggaaagagaggagactgtcccagagaccttctcctcgggtcagccagatagtctggatctatggtgtgactcaagctcctccttacccagggggggtaaggccaggcctctagctacttggagttgtctgtaataatcttgaaaggcccaagggcctgtccccatcctgacttaaaggcatctgcttccctgtttcatatcacatgacagagaaacctgttctcatggcatgtaacatccctgtgaagagagcgttgtatatgattttgtattttttaattcattttaatctacaggttggaatctaatttttaaattttattggaactcacattttaaaaagaaataaaatttaaaataataataatattntt

SEQ ID NO: 353340 - DNA, 618 bp, Homo Sapiens
  misc_feature (17)..(17): n is a, c, g, or t
  misc_feature (37)..(37): n is a, c, g, or t
  misc_feature (47)..(47): n is a, c, g, or t
  misc_feature (159)..(195): n is a, c, g, or t
  misc_feature (286)..(313): n is a, c, g, or t
ataataataataataanaataaacctttgacccagtntcttccaagnagtttgatcaaagaatttataggtgttttcaaaacacagtccggagtgtaaagattggaaagccccatggccttgccctgtgtgtatgaagtgtaaatctggttttgtcttnnnnnnnnnnnnnnnnnnnnnnnnnnnnnnnnnnnnnaagatcagacagtgatcactctgaaagattgaagccaagaatttgtaactatggtatttactgtaagctgtagaacactcaataactattnnnnnnnnnnnnnnnnnnnnnnnnnnnngtcttaggtgactagactgagtggttcttggggagggaggcacagaggactgtcctgggccagtgagtcccttgggcgtctccccaagttgatgctaaatttgttctcagtagtcaagaaaaacctatggtacatcttacagctgatctgacaggggtctgccctaagggtctcacagctgctggggagctttaagtggcaacttcagcacccaccctaagtgtgtgatgtgggagcacagtgaggccattcagagttgaaatccattgagccatccgcgcaataaagctgacatctattgtgtg

SEQ ID NO: 353341 - DNA, 1221 bp, Homo Sapiens
  misc_feature (36)..(36): n is a, c, g, or t
  misc_feature (202)..(202): n is a, c, g, or t
  misc_feature (716)..(716): n is a, c, g, or t
ccctcaaaagcctccggttgtggaatcccccatcantttaatctggccttgtttccttcaacttctgcgggtggggtccccaactggccccactaatactaactgcccccttctctggaattccccaagcttggcaaagccaacgggggccgcacagccaagtaagtgatgtgggagaatacaggatggaaaagcagacttnccacgtattttcacttaactgcaattgaggaggaattctgatacagatggtgatatataagacaaagttcacaaggcccagaatggggcccaccccctctgggcacagaacaaagctgaggaatttgatatggaagctctgagcctcgcttagtcagtgcctcgctgggaacctggatgagtcctatctgtatgaggagccaaaacttggtgaccaaggggcctgtccttttatacttcatgtgattcctttctgaaggccatcagaacaaagcaagccctccaaagaaggacccccagatctctgggaacggggtacctcaaacttggaacaattcgggtggccaggggtaaggatgctcagagtctggttctggtcctcacccatgggaaaagcaagcccagggacttcagtctgtacgttttgtaccaactcactggatctggacagtgggcaggctctcagggattaggaaaccaggtgtgcaggcttaccaaggaacatgggtctcccnaatagaaaagatgcctcgtgctgtccttgaaacatgtcttcggtcctgggcattgtgaccccaaagtgttttgtcccaagtgaggcctttagttgcaaaattctcatcctccttgtgctgccagttagatgtgcctctgggtccctccccagggctcattacaggtcctggcccaaagcagttcatacaaatctgctcagctcagagactgggcttcccagctctataaagtacagttagcccctccctccatgcttgccaagagacccagcaggtggcagcagaaagagcagaggatttgaagaatcacttccaagctgtgtgaccttttagcaagtctcaagcctcctgagccttagttttttcatctataaaatggaggactttggcaaccaatgtcaaagtactttgcataccaaaaacgctctggacaggtgtgtgtgtctctgctaaatattcaggaaagaggatatacattttagggtcattgccaggtaagaaagaa

SEQ ID NO: 353342 - DNA, 426 bp, Homo Sapiens
ccccagacccccaaacctttcctccctaaaggcccctaagaaaagtccaggggaaaagaagaggagaactgtcccccagagacccttcctccctcgggtcagcccagatagtctggatcctatggtgtgaactcaagctccctcccttaccccagggggggtaaaggcccaggccttctagcctacttggagttgtctgtaataatccttgtaaaagccaagggcctgtccccatcctgacttaaaggcatctgcttccctgtttcatatcacatgacagagaaacctgttctcatggcatgtaacatccctgtgaagagagcgttgtatatgattttgtattttttaattcattttaatctacaggttggaatctaatttttaaattttattggaactcacattttaaaaagaaattaaatttaa

SEQ ID NO: 353343 - DNA, 403 bp, Homo Sapiens
  misc_feature (4)..(4): n is a, c, g, or t
  misc_feature (16)..(16): n is a, c, g, or t
accncatctagactgnaaagggccagaaggcttacctgaggaagtattgtctcagctgagacagagaggaatggattccagggacctggcaggcaaagaggaaaggggcctggctagggactgtggctgtggggaacatgtggagtgccaaccagcagtttggctgaagtgtgcctccagctcacggctgtcttgcaagaatgcaagaatgagggtctgtgtggccaatttctggcttctcaaaaggaaccagaagtctgggtttttatgtgagatctctcaatgtttaaatgttaaggaaataaataatttaaaaaacatgcctatagaaggaacattaagatctgtgcattttctttgttaactatccttcaattcaaaaaaacaaatctgcaggctggac

SEQ ID NO: 353344 - DNA, 2353 bp, Homo Sapiens
  misc_feature (154)..(164): n is a, c, g, or t
  misc_feature (1976)..(1976): n is a, c, g, or t
  misc_feature (1979)..(1979): n is a, c, g, or t
  misc_feature (2028)..(2028): n is a, c, g, or t
  misc_feature (2215)..(2215): n is a, c, g, or t
  misc_feature (2310)..(2310): n is a, c, g, or t
gtctcgtttctgaaaaccagttgcaaatagttttactcgacgtgtcacactcagaaacacgtttaaatgttgagaaagctaaaaactaagttacgaaggatccatggtgaagttttaagagaatgtttgttgttggtttcattgttccatgttnnnnnnnnnnntcggcctcgtccaacaaccatacctcagctgctaccaccattaacttctggctgccgtgaagaatacttagaattggccccttacaacttttcagaggtccaacatatattctgttccacggcccatgataccaaatgcacatacataaaatggccatttgacttccccaaactacacacctactacagttcatttcatgttgctttcacagagatgccgagtggagcaagatgctgtgaggtgactttgtagtggaatgaagacaatgattgggaaatatgcttttttaatcccaaagtcattttaaagcacaaaaaagaggttgatttttaatctttgtacatacagaatgtaatacattttctttacattaggcatagtcataaaaagcatgtataagttgtttggaaaatgcatttttcatagaatttacaaacactgtgatatcaaacacattctcaaaaactgctaaagtactgacacaaaacctgactcaaaatgtaaatttttcagtagacttaatttctaacttgcatatttaataattcaactgtactcaagttccactcatacttctctaagaactcaaatatagtgacattactctcaagctaattcttttcaaataatcacagggtgcagctttaatctaacaggttctgaatgaatttcagaaccctggcactggaaaatgatacaagacacaagtctgtaaactgctctatagacaacagctcaagacaaattagcctagaaaagatagtgaaacacattctttgttgtgctaatttgacagcctaagcatattttgcgtgaacatatgtaaattatattagaattgctcttgaacgattttgtagtcttacatttgtttgttggttaagtaacactttttatctggcaatgtaaaaaatcttcacagtcttttcaagtagcatcttaatcttttctgggggacaataaattaaatgaagacttaggtggccatgccgactctgggtacaaacgatggccttaaaagtacacttgcacactatacctatttcctataagaaaattgcacttctaactggatttctagttgaagtttatttctttattcactaactaattcaacaatttcacaaaggtacatagggatttctcaggccacactgaggcttgtgacaggcagtgaataatccaaggccatggttcttatgtgaggttatattttacaaaattttgactcacatgtaaccttaggggggagaaaaattatatttcagccacagtgttctcaactcagccctttgataaaataatttctcagcttgttcactgtccttttgaaatgaatctgagttactcttatgataaaattgcatcaaataattacaaaccaaactgaaatgaccagatactgttatatgcaggacaaccatttgcacatgacagaattaataaatacaaactggaggacatttttttagtatctttggatttaaagaaaaattgatttccccaacctgaagataaatggataaattttcacaaggcaaggcatacttttcgtttttaaatcttaatcacattaactttttgtgacatgttccaatgagattgtcacatttataatttgggattctggcacagtattcataaaatgtctgactattcctagttatatcactggtaatctgaaggagatattgaatatcttatgaaagtttatccaactcttctaataaatagggaaattatcataatacacatttgaagttactttctggtctactaattcaatccatttctagcagcagcacgacgancanaaaggtagcttgatttcccaagcttgcaatccaatatagaaagaaaganaatttctccttgcctagtaaaaacctttaagttccaactcacggctaggatgctaaccatcacagagcacgtgccacttggcaatttgtctcctggggtagtcacagatctctttccagtgctctccaccagttccttctgctgctgcacgcaagactaactgcccgattacctcatttcgggaccncctttcagaatccaaaaccaaaaattcaacacttatatcttcaaggccctcacaaggaatatcaaagacaagcagctcattgaacactgcattgngggtgcatttcttcacatgagtcttcttcttggagattctctt

SEQ ID NO: 353345 - DNA, 742 bp, Homo Sapiens
  misc_feature (206)..(217): n is a, c, g, or t
agcaacatgaaatgaactgtagtaggtgtgtagtttggggaagtcaaatggccattttatgtatgtgcatttggtatcatgggccgtggaacagaatatatgttggacctctgaaaagttgtaaggggccaattctaagtattcttcacggcagccagaagttaatggtggtagcagctgaggtatggttgttggacgaggccgannnnnnnnnnnnaacatggaacaatgaaaccaacaacaaacatttttaaaattaaaatggataatttgtaaatagtttttagcttttaaaatttaaagtgtttttgagtgtgaaaagttgagtaaaactatttgcaactggttttcagaaaagagaaaagaaacaacaaaggaattgaaacaggcagggagatcttaatacctaatttcatcatttctgaaaatgtactgttttagaatgtattacaatatcaatgtgaatatcttgaatcctgttacaaatcctgcactgtattaaacatgtaaattaattgtttgtctgattagccaatctcaccacccaaatggggaggtatacatgtttgaagaactgtgtaactcagtaattgatttgttctgatgttgtaactcaatagaagtgttttggaaggaagcatggtgtgtgagacagtgtctgttcttttgtgccagctctgtatgatgtttgtaagaccatgtttgtaagacatgaataaattgctgcttttgcccaaaaaaa

SEQ ID NO: 353346 - DNA, 480 bp, Homo Sapiens
tggacgtctagggtttggtgtgcctgtcttctgccctccctgagcccacagggtaagtaaatgtatcttctacgtgcctctccctctgccttctctaacaagtgcccccggctccagagctcaggggtaggggttctcctgagggtgcaggggatccttctcatctccctggaccctccagggcactctggtccctattccccagctcctaggcagctgagccgggtcccttaggggaggtgaccaggagctttggtgcagggagctcttggtggggcaaagggctggacccctgccaggtctgtggacatggttatatgcccgggagagggggggtgcagggccccagggatggcccccaatcccacctctgtttattctgtaaactgcaacctataaataacctttagcattcctattgtaacaaaattaatttttatgaaataaattatatttcctagtctaataaaatccgggttg

SEQ ID NO: 353347 - DNA, 1126 bp, Homo Sapiens
  misc_feature (145)..(171): n is a, c, g, or t
tgacaagaacgaaactccatctcaaaaaataaaataaaatatatactatcttgctcctcagaaccagtggggaagaagagggaaggcaaagaaagaaactgagcatagtaaacacagcatttttttgtaggctcttatttaaaannnnnnnnnnnnnnnnnnnnnnnnnnnttctgagtaagtattgactgggaaaaagagagaagtcaatcaaaagtatactgtgcaattgagagaggctggcccaagatttaaaacttcctgtgggtaatctaactgtgagtagataggaatcggccatatgacgaaatgagatcaataggaaatgtgctttttgaggaaattttattttagtaccaaatgttgccagtgacaatcttcagttaagaagtaagttattctgacctaaaattcttatctctgccactttggtttaaaaacaaaaacccttatatacatggaatagttatattttaattaagcatttattttagttgttttcatccattcaagcaaaatgaataagcagcatttttcattgcacttaaaaatgtaaaatacctgcatgccactaatctgtaacattttaccagttcagatgcctgtaatgtgtgactttatgtgtgtctgtgttgttttgaagagaataaaggaaataatactttgcaaactgtttaaacaagtgtttaaacttctattggcaacatttattgggctaagcagttattgaaaactccgcatagttttattttccatttgaaacttcaatcaaatcaagactattatattcattagggaattaaagactaatttgctttttaaatgtgaagttgaacactgtgtggaaagtaaatgtgtgatgaagcaaaatgtataaagtatgaaatattatacttttaccctggataattattcaggaccccagttggcccaaataggtgcaatttttaatcctttgaaattagccagccagacctaatgctaaggtaaatgtaaactgttttaattaattaagatctttctgctttcgaaggtataatgtatctatttctgtcaggaatgatatttccaaatgaaaatgtaaagaacattgggaaataataaactttcctttcaaagtaaaagt

SEQ ID NO: 353348 - DNA, 722 bp, Homo Sapiens
ctgtggtccacttacgttccactcagcccggtcagtcctgctttgttcttctccaccgccttggtctcccgtgtgtcttatctagctctggttccttctcgtctccacatttattttgttttcttcctgtgcttgttagtccttgtgcacttggtccttgagctctttttctattaataggtattactagatggatttgttgtctgcctttacatagaacacaacatccttactgtgcatttcctgggtagccaggatgaatcaattattattaacttcccttcgaacattgagcttcctctgttttctgtttctaagaattagattagtattctagaagactaatactactttaaagacagtcaaaacagtcatacgctgccatttcagccctttatttaagagtttgtgacatttatcactcccttgaaagattaaagaacacccaaagcaagtttggggtggaggtggggaaggcaggaagagaaaggtaagtgctataaaaggactcattgttaatttctagaaattggactgagatctgaaagcataagccttaacattttttagataaacggtccctgaaaagaataaaaagtatcagtacttccgttaactagctctagtattgggtcatttgtagtttacattctcctttaagttttaagaccttcagtagttaacaaagcagacagagactggccaggcacagtggctcacac

SEQ ID NO: 353349 - DNA, 840 bp, Homo Sapiens
ggggagagggcctgacgtacagattataagcgccatggctatgcgctagtgttaaattgcttgccggtgttttaagaaagccagatgcctggattggactctcgggtgttctccgagggacaccttcatcatacaaactctgtacttcctggaatcgatacttgtatttttctagtaccaagttacgtgcaccaaattataaaacacttttttataatattttctcactgagactcccagggcttttactatctccagaatgtatttttcctttttccgtaagactcaaaagtaatataaggtctacaaaatctactaaaaagtctctgcaaaaagtagatgaagaggactctcatgaagaaagccatcatgatgagatgagtgagcaggaagaggagcttgaggatgatcctactgtagtcaaaaactataaagacctggaaaaagcagttcagtcttttcggtatgatgttgtcctgaagacggggctagatattgggagaaaatgagcaaactgatttccaaagaagtcaagtgactgcctgcaaatcctatgtgccatatttgaatctaagacacagttgactgtaagatgaaccattgatttaaaaacagcttcttgaggagaaaatgaaatcaccatattacatcaaagtggaagaatgctttctaccaaaggtgaaactccgggctgaaatgaaggaaaaatttatgggaagaaaaaaccagaaacgggtggaaaagttggggagaaaacaattgggaatccttccccatttggggagaagggatataaaggaaagcccggggaaccagaagaacccgttttattgtccggga

SEQ ID NO: 353350 - DNA, 1453 bp, Homo Sapiens
tcttgggatggagaaaagaactgtcatgtatgtatacacacatacctatgtaattttaatataaatagaattatgttctacatgctgttttatttcctcaacagtaaattatggacatgtctgaaatgtgaaataaatttcaaaataaggcttcagaaagtgtagtaagtaatctctgcattattaaaaataagcagggtagggctggtacttggctcccttagcatttgaatgtccaacttggtgttatcactgtatcttccctccatttgtctttgtgattagcatgtaaaatggtattcataaagatcacaacccttgaatatcagatgaagagaaaacttgactccaacatcttaccacaactctggtttcttcctgcagaattcattttcagaggaaaatgatgaatcatccctgtctgtgaaccactgtgctttccttgagggtggcattgtaggttgacaccagcaaagactcagagtgacttgagcattggagatccttctacttggctgctgtattcatgcattatgttggtttgagaatagctagtgtattgatccaagtagtcaaagtgtcttaaaaggacacctatttgtccttttgagccccagctgagtgaatactgatagtggactagaaaagcatagtcaagaaaagtgacccaccttgttacttgaccagcagtctagctgagagatctgattttatgttcgtaactttctgtaaagaaagacacaaggacttttcaaagacagtttatatctttccaaggcaggaaagctttgcatttgcaatcttagtgttgtgtccctttctgattttcaaatacatcacacctgccttcctgttttgggagcaaagatgtaatttcaattccccttgctaccgtccttatttaaattatttccattctaagagatttttgttatttttttaaatgtaatctgagcacttttttgtattctaaaagatagatgatatcagataaatatgttgtacatttgattaaaattatttagataaatattactatgttgacttttaaatagctttatcctatttttcattcattttgcaaatatttgttgtgtgtagtttcttaacgtgtcagaatctattatgtaaaagaacctttccagatttctgaacagtatatgctttgattttataggctttatattatttcagtatgaataaagataaggaatatgaaacagttaactaaaatgtatctgtcgttgctaacttgaaaaatgaagtagaaacagttggaaaatgtttgaattagaagttattcaagtgcacactcttttctaaaagaaagccaatgactataaggcaaaagaagtttgactgcatgtggtattttttgctcttgtatatgctttttgaacaagctatttgataaagcctgaatggaaaaaataaagctgtttctatctgcaaa

SEQ ID NO: 353351 - DNA, 401 bp, Homo Sapiens
  misc_feature (36)..(36): n is a, c, g, or t
cattccattttgccaaatatttggttgtgtgtagtntcctaacgtgtccagaaaccctattatgtaaaaagaacccctttccccagatttcctgaacagtatatgcctttgattttataggctttatattatttcagtatgaataaagataaggaatatgaaacagttaactaaaatgtatctgtcgttgctaacttgaaaaatgaagtagaaacagttggaaaatgtttgaattagaagttattcaagtgcacactcttttctaaaagaaagccaatgactataaggcaaaagaagtttgactgcatgtggtattttttgctcttgtatatgctttttgaacaagctatttgataaagcctgaatggaaaaaataaagctgtttctatctgcaaaaaaaa

SEQ ID NO: 353352 - DNA, 747 bp, Homo Sapiens
tttttaatttttgaaaaccagggtaacctttttctaaagcgccttggaaaactatggcttttaggaaaaggtgcgccctaaatatttttctacccctcaataggttccaaaaaatattttggttccacattaaaaatatttcccttttcatcccattaagggccaataaaaaagccctattcgagccttttttaagctagggggtgcaaagtgcaggttaggggggtttgttttgatttaaaattaaacttcgaaccaaaaaaggagaattcctgcttgcagtcgagtgaatacagggaggggccagagtcgctgcaggaaagaacagttaggagaccaactgcagtcatgcaggcaaaaaggtgctgatggtagcttagattagggtgtggtgagaagtagacacatttaagagatgtttacaaggtaaaaatgacaggacttgatgacaaagtgataggaagatatgtcaagattatttctatgttaccagtttgggaaccagggtgaatggtggtggcattcactgggataagatgccttggttagactgtaggttaacacaaacttattaaaaagggggtataactcccctactgacatgtattgaataaaaacccacaaaagaattcctggtgagtttcttccacatatatttgcctttggtcatacacagtcattcttatatgacttaactaaaaataatgcttcatcacaactagtatatatgggggcatttccaagttc

SEQ ID NO: 353353 - DNA, 2093 bp, Homo Sapiens
  misc_feature (1478)..(1479): n is a, c, g, or t
  misc_feature (1482)..(1482): n is a, c, g, or t
  misc_feature (1946)..(1946): n is a, c, g, or t
  misc_feature (2003)..(2003): n is a, c, g, or t
  misc_feature (2019)..(2019): n is a, c, g, or t
  misc_feature (2038)..(2038): n is a, c, g, or t
  misc_feature (2069)..(2069): n is a, c, g, or t
atcaggccaaatcggccgagctcgaattcgtcgagagcgggtgtggcccctcccctccgcccgtcaccgcctccttgaagctgccgctgtcgctgctgctcgttcgagtcgcagatccttgccagcacattacagaatatttttgttgaaccttcttgagaattcagagaaactgctgagtgaccactgaacgaaaagatctaatcttaaggcttacgcgtgttccatccaccacatcagaacaatgtcgtatgtttttgtaaatgattcttctcagactaacgtgcccttgctgcaagcctgtattgatggggactttaattattccaagcggcttttggaaagtggctttgacccaaatattcgtgacagcaggggcagaacaggccttcaccttgcagcagctcgagggaatgtagacatctgccagttactgcataaattcggtgccgatcttctggccacagattatcaaggaaacacagctcttcacctctgtggccatgtggatactatccaatttttggtttccaatggactcaaaattgatatttgcaatcatcaaggtgctacccctttagttctggcaaagcgcagaggagtaaataaagatgtcatccgattgctggaatctttggaagaacaggaggtgaaaggatttaacagaggaacccactcgaaactggagaccatgcaaacagctgagagtgaaagtgccatggaaagccattcactcctcaatcccaacctgcagcaaggtgaaggagtcctctccagcttccgaaccacgtggcaggagtttgtggaggatctgggcttctggagagtattgctgttgatcttcgtcattgctttgctgtctcttggcattgcctattatgtgagtggggtgctacccttcgtggaaaaccagcctgaactggtgcattaaaggagctcatggaagatgaggcaattaattgcctgtttcctggcttccaatgtttgttctcagtttctcagaatttttcttagcgcaaagcagtgagggcagtacatgttctttttgcatttttaattattgtaatccttttagataatgatgtgttcatttgaactaactacatactatgatcaagtatattgcatcctaacgctacctctgactcaacctgactttgtaggaaagcctacacgtagccttgtttgataaaaacacgggaagtgactagagaatggaagataaaggaagaagctaggaagtccttgctatcaaaaccttatcctaatataggaccaattgaagtattcaaaaagaaaaacagtatcttatatgattagtttttgttggtggttttgttttcatttatttttgcaagagccactttttatttactttctctagggataagagataaaacttgaaggtacttttttcaaatcttgtgtgcaaattagtattgttagcatctatttggcttattttagtatttttaagnnagncacaaaccaaacaaaacttttgaaaatgagctatattttgttcaaagataattgatttgatcttatatttatttgtttttaggataatttttgatctttttgtaaactgctttgcttgttaatatctgtgaaaaataaatgagttcattttgttcactttccaattttcccgagtatcctagtcatcaaagataacagttcatcagaattacagtcagaaaatcctttttctactgaatagttagcagggaaaaataattctgatatttaactgtcataattctgtagtgctattatagtgaaaaactcagttctataaggctaggctgtgttgtcacagttttatcatagttcataattatttcatgtgcaatcctatttggaggccctgttagacttttaacaatcccatccatatctgtaaattctctgatgggcaaggatgggtgggggcatttctgagntaacagtgctgggacagtaatcgtacggggtgtccataaactctttatggaatgggnaatattatggtaaatngaaatctgggccctccaanctatatggcagctttcagcagtatggtttgnagggcccttttggttaatggatcc

SEQ ID NO: 353354 - DNA, 1278 bp, Homo Sapiens
agcgggatttctgctctgcgtcggaaatatcgaagccgagagcaaaccctgtcctccagtggcgaaagctgggagactctgccggggaaagaagagcgggaacctccacaggctaaggtgagtgccagcactggcaccagccctggccccggtgctagtgccagtgccggggctggcgccggggccaatgctggcagcaatggcagcaattaccttgaagaagttcgagaaccatctcttcaggaagagcaggcatccctggaagaaggagaaattccttggctccagtaccatgagaatgacagtagcagtgagggggataatgattctggtcacgagttgatgcaacctggggtattcatgctggatggaaacaacaaccttgaagatgactccagtgtgagcgaagacctagaagtggattggagcctctttgatggatttgcagatgggttaggagtggctgaagccatttcctatgtggaccctcagttcctcacctacatggcacttgaagaacgcctggcccaggcaatggaaactgcccttgcgcacttggagtctctcgcagtggatgtagaggtggccaatccaccagcaagcaaggagagcattgacgctcttcccgagatcctggtcactgaagatcatggcgcagttggtcaggagatgtgctgccccatctgctgtagcgaatatgtgaagggggaggtggcaactgagctgccgtgccaccactatttccacaagccgtgtgtgtccatctggcttcagaagtcaggcacctgccccgtgtgccgctgcatgttccctcccccactctaaagaccaaggccgtttactcctggtctgattattttccccatctgaaatccacaatactgcaggagccctcttgaaattaacaatggaaataaaaccaatcagtcagttagcctaaacctattgattcctcgtgattatttccaatgtgaaaacagttgtgtatgattgcattaaaaatcatatcatcttttagaggttagaaaagggaaaactaaactttctaaatgctacttgagattgcagtaagaagatacgttttctaacctgaaagttaaatcgcatttgttttcttcagtagaatgggaatgtgttgctgttacttgtaatgtcaagtttatctgttaaatatgtccaaaaggcaaaatcatttttgttgcatgttatgggtcgatgttcctgtaattgcagtgccgtaaaagcttattaaagttgttcttttggttttaaaaaaaa

SEQ ID NO: 353355 - DNA, 355 bp, Homo Sapiens
  misc_feature (29)..(29): n is a, c, g, or t
  misc_feature (59)..(59): n is a, c, g, or t
  misc_feature (67)..(67): n is a, c, g, or t
  misc_feature (80)..(80): n is a, c, g, or t
  misc_feature (110)..(110): n is a, c, g, or t
  misc_feature (118)..(119): n is a, c, g, or t
  misc_feature (133)..(133): n is a, c, g, or t
  misc_feature (329)..(329): n is a, c, g, or t
  misc_feature (351)..(351): n is a, c, g, or t
  misc_feature (353)..(353): n is a, c, g, or t
actgtgcccagcccctacataaatttcanacaccacattccctgaatacaacacaaaanagttaganatcaaataatganaatataactagcaaaattctgtatgtttgncaattttnnatattttcccaganactataaaactacatgttaatgtggataaatctcaaacaatcttaactgacataattaaatcacagaagcctgaataatggattcatttacataattaaagaacacattcatagtggtaacactataatgaaagatgagaaagattaacacaaagttcaccctagtgtttacctatgggtaataaggggactgtgnaggtaggggagaaagaagggananaa

SEQ ID NO: 353356 - DNA, 688 bp, Homo Sapiens
  misc_feature (197)..(212): n is a, c, g, or t
  misc_feature (665)..(665): n is a, c, g, or t
acggaaagaggcagggcggtttactaaatcttatgcagtgaaaattcgccttagaaatcgaaggttggatgagtcagtattgatatattcaaaaatctaaatttcttagcatatttcatcgttcttagatgttgaaagtattaaatgtaaacaatacaaatttaaattccctaagtaatgaatcaaaatggcaaggnnnnnnnnnnnnnnnncggaaaatcaaccaattcgtagccaccctggctggctatttctcaaaagaaatttctatgcatttgcttgagtttgtctataaattcacaaacataaagggtgttaaaattagtaacagacaaaataattcaggttggacaatagagacagcaacaccgattttgatccaggtataacaatgggccatgcattgacaatgacctaaaagacatgtgttcattaagttattttttttacacgggatgtagatgtatcataaaattcatgaaataaagcggccaggtgcaatatcctcagagagctgccttctcaccccctgcctcagggcggattttatctgtcctcgaattttagaactctgcaagtcgggtctttcacattcatcgattactttggtttatatttaattttatccaatttcggagtgggtgggtaaagcacactggaaaatnggggctgctcgaattacaaaatt

SEQ ID NO: 353357 - DNA, 887 bp, Homo Sapiens
  misc_feature (831)..(835): n is a, c, g, or t
cctagactggagatctggggatccagggtgactggttttcaactctgaggcagcactcagacagcctttgttgaattcattaattacgaattttctctcattcatcccccaaggcataacccccatttctaggcatctaaggaggaaaaacacacacacaggcatgggctcacctcttctgctggaagctcctctgtcctccagctgcttccactgggcgctcaggtcttgtgcggaaggggcacatgagggcgttttattggtgagattcccacctcccactgggtcatgcccttccacaccctctaacctaatgaggctttgatttaattataacagggaattaggtttttactggtgatatatctccagttaattgtaactttagtaaatccttcatcctgacagtctatttttctctcatatgaagataagattaaattgcctttatattaaattaggcttaatgtactaacttcaaaagcttattttagagatgtttccatcagttgtcagtaaagataattcctgtaatatgttgtaggcttcaagctttgcttggaaacctgaagtattaagtatgattggatttgcaattttacaaaatggtttaaattcatatacatcagactcaaaggtaataggggcatgcattccattgaggaaattctagggaatttttatttattttcattggtttatttctggttttgaaaaaatttcataattcataggaaaaaattggataattactattttgacaaatgaccattaagcttcttggaccttgagtacttcacacagtgttaagataaaagtcacaatttaaannnnnaagatgattttcttgtgaaacttgtgttctcaaataaaaattgttacccgtg

SEQ ID NO: 353358 - DNA, 329 bp, Homo Sapiens
ctcccacagtgctgagatacaggcaggagcccctgctttctacctggtttttacctggccagtcagcccaggctcctgggcttttcccagccaagtgcaggaagggaagtgagatgcagtgggggacctggctggtagcatggcaggagtaagtgctgctgcagggatgggaccctttggtcctgggattcagtttgctccaaccgacttgtgaaagcctgtaggatgaggcccaccttgccttacaaggaaggaagggtgccaggtacctcaacagtagctgaacatctgtgctatctaaagagaaaagcacctcaaaagaaccaaag

SEQ ID NO: 353359 - DNA, 198 bp, Homo Sapiens
aggcaagttaatggtagactaacactggggggtggggtctaggcatcatgcttttgtcagcatactcttgagcttttaagtctactatgtctgaactgtggtttcttgtttatccttttttccttagttggactgttctgtatgggtgtctatacccttattccaaggtgaataaataaagttgtgtttgcctaatca

SEQ ID NO: 353360 - DNA, 495 bp, Homo Sapiens
accctcactccccacactttggacagttagggttggatatttaatttcatagttactctttttttccacagaagaaaggccagcctgacccaagttgcccaatttttaatgtgttactgcaccttaattttccccttcaaagtgaaaaaaggcccagaaactagcagatagaaatggaacccgttgacttagttcccttataagaagttcttgcaaacacctctgtgacgttttcattcaagtggatatgttggacaaataggaaacagttttagtttacgcgaacagtatgagacttccaggtggtggacgccatttttttagaagtgttgatgatgtatttgataacattataaaagtatgtgtctcccgtgaaagaacattgagctatttccctggaatggatggggaagaaatgagcaaaggagtgctgttctgtatgggtgtctatacccttattccaaggtgaataaataaagttgtgtttgcctaatc

SEQ ID NO: 353361 - DNA, 710 bp, Homo Sapiens
  misc_feature (17)..(17): n is a, c, g, or t
  misc_feature (28)..(28): n is a, c, g, or t
  misc_feature (43)..(43): n is a, c, g, or t
  misc_feature (412)..(412): n is a, c, g, or t
  misc_feature (665)..(665): n is a, c, g, or t
  misc_feature (670)..(670): n is a, c, g, or t
  misc_feature (695)..(695): n is a, c, g, or t
ccccacgtctggaaaancctagggaaanaaaagcgactccccngttgtccccgaatccccccaagggacagaaaaaaaattggagactgttgaaaatgcagatttgaagtaaattttttaaaatattaatttgggttctgcgacattgtgaaaaattaaagttgttgtgcaaaacttaattcagacatgtacccacaagttaatggtagactaacactggggggtggggtctaggcatcatgcttttgtcagcatactcttgagcttttaagtctactatgtctgaactgtggtttcttgtttatccttttttccttagttggactgtaatgtatggtctgtcaacctgtgaatctttaaagtatgattcaggtattgttgtattctttactgtgtaataaaaaagttgaanaaaatctggatcctctgtctccctcgtccccggtgtgccatggttgcccaccagtgaccccagcctgaggagtccatcctccatggtgctgaatcaaatctgtagagtttattcagctacaaagcgtggctctgtaacagggagttgggcttatccatgcgtgttgagtaggggaatgatgtcagaactttgcaaaagtcgagctcattcataagggggatgtttctcagggcaggaggagtagggaagagtnggganggagaattactaccttccatagggnaaggagagcttggct

SEQ ID NO: 353362 - DNA, 1220 bp, Homo Sapiens
  misc_feature (189)..(321): n is a, c, g, or t
ctgtgttggagaaggcagattcggggtagggtggcatttgccgcagaaggggcaggtatttatgtgaaagaggggccccggggcgagttacggctggaagaggcggccggggattagggaagcggcggcttagggcgaaaaaggtgggagtgggcaggtaaggtgggcgcacctcccgggagggtagtnnnnnnnnnnnnnnnnnnnnnnnnnnnnnnnnnnnnnnnnnnnnnnnnnnnnnnnnnnnnnnnnnnnnnnnnnnnnnnnnnnnnnnnnnnnnnnnnnnnnnnnnnnnnnnnnnnnnnnnnnnnnnnnnnnnnnatgatgggtgtgtagaacccacagagtctttatcgtgtctaatactcagctggcctgagaaataaggccccccgggatggggcagaactaggtccgggggcagcctggatgggtatccgcgaggaggcggcctccccagcctgcccaccctcaggaacatcataagcccatactcggtccaggccctcgccaaccgcggtcacaggctgccaggtggggagtgggaagcgcccagacaccacgcgggccccagcaggcagctctgtccgcagcttgtcctccagcagcgggagcacgctaggggccaggaacacagacacgttgcggcagtccctcaggctcaccttccagagatccttgcggcgatagcagacgctgccggcacagccggccctccaggcgtgcagccgcgccagcgccaccagccaggggttcagctcgtagcccacggccgggcggaggccgcacctgtgggccgccagcacgatcctgccgtcgccagagcccagatccaccgtttttccggggcgtcctcgcagcagcgacaacacgtgctccacctgccgcgcgctcgcgccgacgtagggcacctgcagccgcagcggcacgcgccggaagccgggctggagcagcagcgcccacaccgcgtaggctgccaagcccgagccggccgccgcctgcagcagctccagcgcgcccagccgccgctcgcgcagctccgtcagcgcctcgaccgggtcgtcctgctccatggctgcgggacgcgcggctcgtccgcccaaggtccttcccggctcgggtccgcggccctcgcagcctggcctggggctggcggtgtgccctctgcctcctgccgggagccgcccctcgtgccgaattcgccacccaggcctcgctac

SEQ ID NO: 353363 - DNA, 932 bp, Homo Sapiens
ttgctgattgataaggggccccggcccgggggcagaactaggtccgggggcagcctggatgggtatccgcgaggaggcggcctccccagcctgcccaccctcaggaacatcataagcccatactcggtccaggccctcgccaaccgcggtcacaggctgccaggtggggagtgggaagcgcccagacaccacgcgggccccagcaggcagctctgtccgcagcttgtcctccagcagcgggagctgccggaagagaagtcgccccggccggggagaggcctggtgggcaccgggtcatcgcagctttccgaggtcccggcccccaagccctcgcaggtgtcagcccgcaccttgggctgtcagcgggtggccagggatcccccaggttaccttccagagatccttgcggcgatagcaagacgctgccggcacagccggccctccaggcgtgcagccgcgccagcgccaccagccaggggttcagctcgtagcccacggccgggcggaggccgcacctgtggccgccagcacgatcctgccgtcgccagagcccagatccaccgtttttccggggcgtcctcgcagcagcgacaacacgtgctccacctgccgcgcgctcgcgccgacgtagggcacctgcagccgcagcggcacgcgccggaagccgggctggagcagcagcgcccacaccgcgtaggctgccaagcccgagccggccgccgcctgcagcagctccagcgcgcccagccgccgctcgcgcagctccgtcagcgcctcgaccgggtcgtcctgctccatggctgcgggacgcgcggctcgtccgcccaaggtccttcccggctcgggtccgcggccctcgcagcctggcctggggctggtggtgtgccctctgcctcctgccgggagccgccgcgcgacaccggaagtccgct

SEQ ID NO: 353364 - DNA, 550 bp, Homo Sapiens
aaggtggtattaacagtcagggtcgaccttggaaatccaaccacacacagggcttagggccctgtgcaactggcccatctggccgggcccgggagcccagaggctgaggagtggggcagcccccatggaggcctgcaggaggtggaggcactgtcagggtctgtccacagtgggtctgtgccaggtctcccgccggtggaaactgttggcttccatggcagcaggaagcggagtcgagaccacttccggaacaagagcagcagccccgaggacccaggtgctgaggtctgagagggagatggcccagcctgaccccactggccactgccatcctgctgccttcccagtggggctggtcagggggcagcctggccactgcctagctggaatgggaggaagcctgcaggtggcaccggtggccctggctgcagttctgggcagcatcctcccaagcagagaccttgctgaagctcctggggtgtggggtgtgggctggaagcactggctccctggtagggacaataaaggttttgggtctttctgaaaaaaa

SEQ ID NO: 353365 - DNA, 880 bp, Homo Sapiens
  misc_feature (796)..(796): n is a, c, g, or t
  misc_feature (844)..(844): n is a, c, g, or t
agtttatcccaaacagccatctcattttctctgttttctatgcacaggattgctaagtaggggaatcctgctttgcatggtggtttgttatctacctcatcagtagtcaaaagcatttctccttttcaacataaacccttccaaaacatcatttaaattccattccatttttagatgttagtttcagtaccagagccaaatagtaagtttgttccctcttctataagttgtggcctgccttctccaagacacccttctcccccactaacatgcactgaacagctgctgtcaatccattccctcaagaaacttaaaggtctaacagacaagacagtccattaacagatttttacaatccagtgcaacaagtgctgaagtagggggacatataagatgtggtggaaaacagaaaggaccaatagatgttgcagaaggggtgcaagagaaaccaggggaagagcactaccacctaaggaaatgagatgtgggatatggtgaagataacacatttttttatagaggttgttgagatatctaggtggttggtttggtttgaagctcaggggaaggtctgaaatggacagctttgggagttgctggcatgaatgagaatcaaagtcctagagaggtaagccttcccagagagtatgtaattatcagtttttcaggaatcaaaacctttgccccatcccacctccagctcaatgaccattgccccttcctcaaagggacgatcatgggcttctcccccttgcactgggcctgccgaggagggccgcttctgctgtggttgagnatgtttgatccatggcgggggggcacggatccaatgttaattgaaccntgggggatggacacccccctgcatctgggcagcctt

SEQ ID NO: 353366 - DNA, 1634 bp, Homo Sapiens
gctgggagcagagactgcgaaaagctgagtccgccgatcgtgcccgggacaaggctgccttccactcgccgcatctacctggtaggcggcatgcgcacgggcttagaggcttgagagcctctggaagagaaagggtcccaggaaggaaacctgcccccggcctaagtgtcggcgcccagatcaccacgaaccccgcacctaagcgccgcccaccaagttccaaagaagtccgaggcgacctgggagtcggtcggatcccagccgagaaaagaaacaagcaggatagcaattcttaggggagccaccctgggagttttaggcagcgtttgcctttccctggttttcttcaccaagccccatcctccccccgcataccacccccagtcaaaagagtgggagaaaatgcacagttcgaagtcggtgagagcaaaaatgggtctagtaaatcaacccgtggtggtagctaaaaggtttggggctgcaaagaaacaaactgtaagttttgagcaacaaactttttcttcaatctgtaatatgtcgaaatgggaagggggtgttgcaaaagccaactaccactgtcaaacttagcccgtttacaacatggggaaaggcgtatttcttactaatatctcaacaacgataacaatgctgtatccttccttaccttgatgttgaactgcgaatcctcctccggatcaatgtccaggaacttagaagaattggtgatattaggagttcagtacttctggaaaaaaatgcaaatggtttagccaggatctttcctgtctgattcgtcactattattatatctgatgatgcgaatggttggagcgattcaatcctaagtcattaatgagctattttataaacaccactgtctgaagatcttcatttacattttgctaaggatcacttcgctaacctcacaggcttgtgtcaacagcatgatttgcaggacttcagttacactcttataaacaacacggctgtattgttaatcggttaatattttataaagtgtaaatattttattatgttttgaagggaactattgattctaaattattaaacccctgagaaggactatttaaatgaaatatacaattaagtacaattaaatgtacattgtggttagtttgttttcagattctgcacccttttaaattcattgcttttctctttactggagtttcctcttgtccatttctgatactgaaaaaaatctatcatgttaggaaaaagcctaaattatttaaagttgcattaaacttagaggaaaatgtcaaatacgattaattatgaccagaaatgtattttggatgtttgtagagttgtaatttcatatcacattttacaaatttcttccgatttaaaggagagttctaggaagttttgtgatctatgtccggtgtgggtttttgtcctctcgagttttgtctctaataaaggccttttttgtttcaaattacatacgctttttactgcacaatttttgtattgaccttatttcaactgaagcgattatttccagcaggtttaatttcgacaataagatatattttaatagttttacctttcgctagaattttgtattgtttaaaacagtaaatgaataaatttgctgatgattcaag

SEQ ID NO: 353367 - DNA, 287 bp, Homo Sapiens
cctagtaattccactgtgatttaataacaaaccggtgatgtcattcctattgtgccacttttgtcaaaccatttatgtgactttaataaacatagtaaacttgcctgactgcaccagaggtcccattagtgatttatatattgcatgacattttctatttgagtttgacatgtagagtcatttttagtttcatggcaattgacagtccttaataactcagctaatttgaaactaacaatcttgctgtgtaaaaggaaaaaatggtgtttgtgttcagtaaatgtttg

SEQ ID NO: 353368 - DNA, 538 bp, Homo Sapiens
cttcgctcaaaaaagattaagaactaccaccgcacctggccagggaattatcttaagggcaatattcatttggaagtataagttaagatgtatgtgttaaatgtcttcagagctatttgtttaaaattattgattttttaaaaagcagctataactgcttcaactaatatatctccaaaaataattccctaatattatctataatacctagcccatattcagttaaccccggttatttataagatgacttttaagaagtatgtgagtcattatatttagctgtatggctcttagtcttttcatatctaaaataagccaacttaaatatattttaaaaatcgctcttaaaaatatcaaagaaatgtagccagcacatcttctttataataaaaatcagaaagatatagaaagtagaaatatttttatagcttccatcattgtgagcatggatgccttcctgatatatttttctatctctatttacttccctatctgttttctttcacatggttgagttcattttgtatgccattctacc

SEQ ID NO: 353369 - DNA, 1227 bp, Homo Sapiens
  misc_feature (1102)..(1111): n is a, c, g, or t
tagtggatcccccgggctgcaggttcaggtacaagctgaaggtggtgtgtctaacaactaaaaactatcactaaatctcaaagagaaagttcttgcaaaatatgtaaagttcacaaggtgcagacattttccttctttaggcttttatctaaggaagggctatgaaactgggcccatctgtatacaggctcaaatttacgtttttaaaggaagaatctatgcagctgaggcttattgcaggaaatacttcatttgtatgtaaatattattgtaaataaataggaggctgtatatttttgaagttgttgatctgcactgaaatagaagtctctaggatctgcatataaacaataaatgtttcctagaaattagtggttttgtttgggaattagaaaaatttacattctctcccaggtaacatagttctctcaatgtaaacttggaacctgaaaccctacttaatttagagaaagaaatgtctgagaaatagttcccttgatttcttatgctggcattaagatcaattatttaacagatagtcctctgagatacaagtaaggaatatttagacacaaatccttgtcctatagaaacagatatacccaaatgacaaattgtttcttcataatgatcttccatttttaacactgataccactacacagtacatatgaaaacagaagctggggagaagaatgtttttttcacaattgaattgctgcatttctcaaactttgggatctatgaaagcggggagagggaacctgaatattaattatgagcacaaatttgaaggaaagaaaacaaagaaccattatctaatcaagctttgaaagtcctgcatgtttgccttttattttagtgttgacgccaacatagactgtctaaggtatttttttccccaaacacttgaatcttggtcgttggtatgtaatccactctctagagtccagtgtactttagacttcatctgagtccaatacatgtaccacactactgttttattaatgtaaaaaccttgtaaatgaatttcagatgggtgatttaagtgagtcacaagtcacaaaactttgctattcatagttaatcaaatagaactgggnnnnnnnnnncagagtgtggtgtaaataaagaaatataagaagttctgttctataactgctctgttaacatagtttttaaacattaaaaaatgtgaactaaaagtaatggccgcgtttcgtcggtg

SEQ ID NO: 353370 - DNA, 620 bp, Homo Sapiens
  misc_feature (492)..(520): n is a, c, g, or t
gtgtgataaatttcaaaattctaaacaaattacccacttttatattggaaatctctaccagaactccctcttcattttttaaggcatacatttgcttgttttcaagatcaagaattctgagctagctttaagtagcaaactgatttatatgtgcaattataggatgcattaagatgaatgatagcctttacatattgaaaactttgcagacgttttgttttgaaaatggcattgtatagtaaatgcaaattaattttgtaaaattatgttaaagagtatgttcagacactttctgccatggccaaaaagtatgtatgaaagtatgtgtgtatttgtttgtaaaaggatgccaatgttttacctgatatcttagtgacacttcagttatctatgcattctttagatctgtgattcggtaaacaggcagccatgttcacgatgccttctatgtcttaccatatttttaattaacctgttaaatacagcttaaannnnnnnnnnnnnnnnnnnnnnnnnnnnnctgaaatatactgcattattgtgttaatgtattatctttcctggatattatctcccagtgtatccagatctaagtaatctcagtgaactatacattgcct

SEQ ID NO: 353371 - DNA, 672 bp, Homo Sapiens
  misc_feature (138)..(166): n is a, c, g, or t
gttttacctgatatcttagtgacacttcagttatctatgcattctttagatctgtgattcggtaaacaggcagccatgttcacgatgccttctatgtcttaccatatttttaattaacctgttaaatacagcttaaannnnnnnnnnnnnnnnnnnnnnnnnnnnnctgaaatatactgcattattgtgttaatgtattatctttcctggatattatctcccagtgtatccagatctaagtaatctcagtgaactatacattgcctaaaaagtggttttgtaatgatttgtagtcacatttctattgggatatgtagaagaaaaggcaaaatgcttaaagttccttttattttttaaaagcagctagatagacacagacttgccacctcatacatctgctccttggcaacatcaaggggaacgactagccaacatgcctatggctaaaaactttcctttgcagactaaagcactgcttggtgcttcgtttttctacccttcacaacatgtgtgatttcatctaagagatatatacatgtacacatgccctttgtttccacctggatacaagatcactcatagctaattaggaccattgttttttgttcatctgtcttgttgcatgaagggacattagacccatttccattaaaataagttcttggtgataaa

SEQ ID NO: 353372 - DNA, 572 bp, Homo Sapiens
  misc_feature (137)..(137): n is a, c, g, or t
  misc_feature (401)..(401): n is a, c, g, or t
  misc_feature (455)..(455): n is a, c, g, or t
  misc_feature (459)..(459): n is a, c, g, or t
  misc_feature (528)..(528): n is a, c, g, or t
aggccgagggccctaaggcctggcacccggctccccggcccatgtcctcacttgcagctgttcgcggtgggtggcttcgacggcctgaggcgcctgcacagcgtggagcgctacgaccccttctccaacacctgggngccgccgcggccctcccggaggccgtgagctcggcggcggtggcgtcctgcgcgggcaagctcttcgtgattgggggcgccaggcagggcggcgtcaacacggacaaggtgcagtgctttgaccccaaggaggaccggtggagcctgcggtcaccagcacccttctcacagcggtgtctcgaggctgtctcccttgaggacaccatctatgtcatggggggtctcatgagcaaaatcttcacctatgatccaggcacagatgtntggggggaggcagctgtcctccccagccctgtggaaagctgtggagtcactgtntgtnacgggaaggtccacatccttggcgggcgggatgatcgcggagaaagcaccgataaggtcttcacctttnaccccagcagtgggcaggtggaggtccagccatccctgcagcgc

SEQ ID NO: 353373 - DNA, 433 bp, Homo Sapiens
gagggtcgtaactcagacattcccaccacttattcaaagcacactgggtcacaggtccagagtcttacaccagctcaagaagtcctcctgctgccttcccttaacccttcctttggatctgggggccctagtttctagctctttgggggtgcttgggatagcaagagagccgatgggcaacagctgcttctctctccctaggaggccacatcaacagtcatgatgtgtggatgtttagctcccatctgcacacctggatcaaggtagcctctctgcacaagggcaggtggaggcacaagatggcagttgtgcaggggcaggtaggcacgagctgcagcggctgccctgggacacaagctgttcgcggtgggtggcttcgacggcctgaggcgcctgcacagcgtggagcgctacgaccccttctccaacacct

SEQ ID NO: 353374 - DNA, 656 bp, Homo Sapiens
  misc_feature (564)..(601): n is a, c, g, or t
cagtcgcgtgtgctcagtcgcgtgtgctctcttcaacatagtagcaccaataaaggagagattatgttaacttcctagtggtgagaataccatgggatgggagaagggccagtgagtgggatgggaatgagcttcatcaggaacagatttcagactctgcagggtgcaccggttctagcctcaaataacaacattgcaaggaggtggactacagggtccacaccctctgtccttcggggcccatggtcaggccattccctctttgttttgctcctagaggatgagcatgtaagatgagatcaggagggaaattgggtgctctgcctcaggctgttaaaatgctgctacctgcattctaaaacgtgcaagtcatgccccacaagacacctccttagggcagcatccactgtggtgtgccagcctgacacccctgcagtcacggtgtttgaatggcagctgatgctggcccacccagagtatcggtgcatctctcctaaagccacagttcagcactgcatgttgaccaggcggatatcctataatatagatgctcgtttggatccnnnnnnnnnnnnnnnnnnnnnnnnnnnnnnnnnnnnnnctttaatgttttgggggggataaaagaaaagaataaataaaaccttgttgtaaag

SEQ ID NO: 353375 - DNA, 428 bp, Homo Sapiens
  misc_feature (356)..(356): n is a, c, g, or t
  misc_feature (366)..(366): n is a, c, g, or t
  misc_feature (393)..(393): n is a, c, g, or t
  misc_feature (415)..(415): n is a, c, g, or t
  misc_feature (427)..(427): n is a, c, g, or t
caaaatagaaacatacgtaaactctgggaacttaaatatacttatgcaaaaactaaatttagaaaaaataaataattttaaaaatttccattccaattttttaccttgcagttgttgattaaatgtattagcaaattttgaatgaaatgcaaatttcattagaaatttagccattagataaagtcagaaagtactgttgttttatgctcatcttactattactgattttatgctgctttatgtttttcttcttattcttactaaatcttagcagtgtcactagtaatagtcttacaaagtaggcaggtttttttaggctaagtgattagtgacatagttaatgattaacaaaaaanatagcaagantgaaaattagtcagatacacctctgantttgtctcctgctaaatatttngtgttgcttatnt

SEQ ID NO: 353376 - DNA, 330 bp, Homo Sapiens
  misc_feature (82)..(82): n is a, c, g, or t
aatggcaccgaagctagctcgcctcagtgcaattagacaaaaccctaactcacttttcaaagcatatttatttagaattcanagaattttaaaaatgttgtttatttaacttcccttcagagagggaatctgacatgactcattttcatcagagatacacaaacttcataagatgctattatttatttcactgacaaaacatcagtaaattaattgccgccactttaatcaaggtaataggaaccagggggtcatatcttgtaatttattatgatattctgaggttgaggaaaacccattcatggaatttttttaaagctgtaaaatttg

SEQ ID NO: 353377 - DNA, 788 bp, Homo Sapiens
  misc_feature (40)..(40): n is a, c, g, or t
  misc_feature (42)..(42): n is a, c, g, or t
  misc_feature (44)..(45): n is a, c, g, or t
  misc_feature (75)..(75): n is a, c, g, or t
ccattgttcattttgggttgcctcagattcagtgtatatntnannatattggttacataataggtactcaatganatggtttatagtagaatatctaagctagcactttattttaaaaagtaacttattaatcacacattgatggtacaccttgtatttagcaaatgtttgatgttgataaaatctcctatgtcttctttcttaaatccagttgctgattttgtaaaatacagttgtgataaagcagcattacggggggaaaaagctatattccaactggtgttaaatgtattcaacaaaatcttacatcatacagtatttatttcttaattaatagaacttcagtgatatacttggtagatatctcaagccttttgtcttttacacaatggtgctctatcctattgttttcttttcaaagaagcatctgaacacttgcatttctattttcctatccaaaggcatccacatctaagtgtgtttttaaagttgattaaaattatttttctgttaaagcattctgaaagtgtttgtctttacctagaatgatttgtacacactcgtggtcaactgaacatgaatgtcagtagtagtctaattatgggaagggtaaacgtgttagattaaggctcttaaagctctaaaccatataaactatggacttgtatcatgatttaactgttcttagatctttcttacacagtgattcattcctctatttgtacagtggctttatgaaatgttgtgaattgatactgtaatcaataaagtgcttttaaccatcaaaa

SEQ ID NO: 353378 - DNA, 639 bp, Homo Sapiens
  misc_feature (61)..(61): n is a, c, g, or t
agattaagcaggtttcagatctacatgaacttgaagcctccagttccactgcttatgttcncaatgatttagctaacaatgcgtaacagctctgacatcctctgtcatgctttgattctgcatacaaaatttcttctgtctctgagggatatccagcccatctcccttcctgaactgactgaccaacatagtatcgtatcacatcacccttgaaatcagggcccttttcctttaatgtgggaccctggactccattttatccaagaaaaagtctgcattattagctaataacagaaggctactaatcactgcccttgtatttatatcctttgcaacacctaaaacctcccatgttctgttttatttcagtgggtcactacaagctgctggagcaaagacttggtgggtgggtaacttaacctcttcacagaggataaaaaatgcttgtgagtatgacagaagggaataaacaggcttaaagggtaaactcgagtccttttccttgtcttctcttctaagggataaaggtattatggccaattctctataatatttgcccctgaagctccccttatctggtctaatctagctccaataaatcaaaggagcacctaataaaacacattgttctcttttaaa

SEQ ID NO: 353379 - DNA, 632 bp, Homo Sapiens
  misc_feature (62)..(62): n is a, c, g, or t
  misc_feature (296)..(313): n is a, c, g, or t
gtttcactacccttgaaacttcactttccacatatccagcttgaagagaaaagatttctaanaggattccatgtgtatttaggccttctccaaccatctgccttatgaggttcacccatttccaaacaaaggttttaaatacggtgactgttcttggatttgcaagaatgtacaaccagcaggtccccttttgcagtaaagggcattatacttgaaggggcatactcattttttcctcaggtcagaggcagagggaagagttaacagtgatcaaatagagaccttcatgtgtctgnnnnnnnnnnnnnnnnnnaagttcatttaagggtgatgacggagaaagaagggagtaaaaatgatgcgcgcacaaagaaatttttcccattgcttgccagattcattctttttaggctacccttactccagtccttacctacaccctaaagaactgtatttagctagcaagagaggcattctcaggatacgtgagcttccaggcatggactaacatgtggtttcaaatcaatagtgtattctaacagaaaagcgttacttaatcttaattctccattatgtgataaaataatctatagaaataggtatcactttggccagttctgtgcatgtagctg

SEQ ID NO: 353380 - DNA, 554 bp, Homo Sapiens
agggaggtgtttgctgtccgaaggacctgggccggcccatgggagcctggggttctgtccagataggaccagggggtctcactttggccaccagttcttcggccagcacctctgccctccagaacctgcagcctggaggggtgaggggacaaccacccctctttcctccaggttggcaggggaccctcttctcccgtctgccctgcgggttgcccgcctcctccagagacttgcccaagggcccatcaccactggcctctgggcacttgtgctgagactctgggacccaggcagctgccaccttgtcaccatgagagaatttggggagtgcttgcatgctagccagcaggctcctgtctgggtgccacggggccagcattttggagggagcttccttccttccttcctggacaggtcgtcaggatggatgcactgactgaccgtctggggctcaggctggtgtgggatgcagccggccgatgagaaaataaagccatattgaatgatcgccaccagtgtttggtctgggggctgtgagaattggattgtgaaaa

SEQ ID NO: 353381 - DNA, 384 bp, Homo Sapiens
  misc_feature (371)..(371): n is a, c, g, or t
cagagagataatcctgggggtgcacagagggtcccccaacagtatccaacataatattgaccagcacaagtctatgaggagactgcctgaggccagccgaaaaaccacctgaaaatccttgcaggaggagtgtgcagtgctgacccagggcaggggatgaagcctgttctcgtcagccaggtgctaaaccttatattcacagtgccttcagcagagcactcagaaggcctcaacttaatagcagagaataattagtaataggctgaatattactcagctactgcctagcaaatgtaaaaagctagaccatatcatactatttccaagtaacttaactgcttccaagaggaaagctcaaaaatatttctagnaatgaaacatatc

SEQ ID NO: 353382 - DNA, 786 bp, Homo Sapiens
  misc_feature (478)..(504): n is a, c, g, or t
acttttccactgttttattacaaaaatcaaatttcatttgttacaattcagcttatttattgtaataatcaaaaaaggggtttatacaaggtatttttatacagtttataattaaagcacttattttacaaaaggagggaagtgaataagtggacaagggctgaccaaatgttggccattataacataaatacatccttgcaaagcaccatcgtaccaaagtcaatgaacaagaaacaccagttgactttaagacaatgacgaagattaaagcttaagggaaaaaaataaaagataaacatctgaaagcagcaccagatccttcacttgcaaataaggctagtccagtttaatcttcttggtatcctctctactttttaacatttttccttactaatccatatatttaatttcatgtcatattggatttaatcagactttaaaaattttccctttaatacccatatttaggcattagnnnnnnnnnnnnnnnnnnnnnnnnnnnatatatctctatcgcccatcctgcttatatttgactgaaaaacacaaccaccaaaatggacagttcagcaaaagcgcgttgtctgtaattctctggtgttgcttctgggcaaaccctaagtgatggtggagaatctaacagttcgttaggtctgtactctgcttctaaatacaagacatcatttagtttgtaattctatctgtaaagtcatggagatttttttcagcaataaactcaacaatttgagaatgctttatgaaaaagaaaaacagcaaagtttac

SEQ ID NO: 353383 - DNA, 617 bp, Homo Sapiens
ggggctgccggtgccctccgcaggccgggcctcctgggcgcccctcggtgctgcaggctggggggccttgggtacctgcagagccttttctctgaattccttatgtccggtgggccagaagcccgtcctcctatgctggtggaaggcggaggaccggagtccctgcagaaggccccgtgcactcgggggcctccctcacatcccgtgccccctgcgctggccttcacagtaggtaatggctccggcccgggtgttcgctgtccacggaacatggcagaggggcaccccggcccggaaagacgccagagccagcaggggctgtttcgggccgcgtggctccccgggtctcggccgtctcccctcttctgcgtctgttccgtgacttcgcctgggtgggatgtaccgcaggtgcatcgcgtcgaggtggggcacggccgccggcaagaaacccaccctgtccggaggcgggcgtgagacaagcccagcccgcacgcgctcatctttcttcgttttttgatcagtttattcagaattgctctataatttaccaattgtatgtatttaacctattcttgtggaaaaaaaaggtctttcattatatctttatttctgaattt

SEQ ID NO: 353384 - DNA, 1106 bp, Homo Sapiens
  misc_feature (12)..(12): n is a, c, g, or t
  misc_feature (21)..(23): n is a, c, g, or t
  misc_feature (32)..(32): n is a, c, g, or t
  misc_feature (50)..(50): n is a, c, g, or t
cgtggtctcgcnctgatagannncacagccanccatgccgccggaaagcnacgcttgtcagggctgctggagaccttccacttcagcctggccctagccgagcaccagaagacccacgagaaggagaaaaagtacgcgctggggggcgcccgggcccccaaccgtccacccgcgaagcccaggcggggctagggcgggcgtcccccagagagcgtgaagggcgagggccccccgcacccccagaggcgcagaggtgagccgctgtgctgtcccgttccggagggccgctttgccggccgtgaatcccagacgaggcattgggcctttccacgcccctgggtggcggcttcctgtggtgtttgtggacgtcctctgcctgtgccctgaatccgctcctgaggctaagcgctcccaacgagaagggtccacgggaagccctcacctctgtaaacacaccctgggccagcgctcgcatccgaggggagccgccggatgtggaagaagactcggctttcctgcagccatttagtgccgccccatgctaggttatttgacattgtgcagtgtagagttgccttaaagtgcgtgatctgccagtgctttcttcaagtcacccttgccccgattcctcctgtttgcgctccccagggttgctcaagtggaaattttgtcagctgtttagccttttcgtacttggcgtgatgtcaacttcacttctaatctgcaaaagcagaagctgtttcctagtttacctcgcgtgtgtttacctatatggagtagctcgcagagatcacagaaatgcttgcagcctaaggcagggttttcagaccgtgggtcccagcccatttagtaaaatgggaaatcaattagcaagtggtcaccagcattacacagcaatgaagcagaataaagtaggccagaatgcatcatgtagtaaaggcaaatactgttttgtgaaacttttcacccatacatctaaatgtgagaactggttgcaatgtaagacatttcttgctgggaagttgtgagcaaaataagttgaaaacactaataaagatctgtctgtctgagcaaaggagactaaactccttgggctacataaggcc

SEQ ID NO: 353385 - DNA, 516 bp, Homo Sapiens
  misc_feature (30)..(30): n is a, c, g, or t
  misc_feature (75)..(75): n is a, c, g, or t
  misc_feature (215)..(215): n is a, c, g, or t
aacccctcaaggcttgccgactccccccanggttgcctcaaagtgggaaaaatttggtccagctgttttagcccntttccgtaacttggccgtgaatgtccaacttccacttcctaaatctgcaaaaagcagaagctgttttccctaagtttaccctcgccgtgtgtttaccctatatggagtagcctcgccagagatcacagaaaatgcttgcnagcctaaggcagggtttttcagaccgtgggtcccagcccatttagtaaaatgggaaatcaattagcaagtggtcaccagcattacacagcaatgaagcagaataaagtaggccagaatgcatcatgtagtaaaggcaaatactgttttgtgaaacttttcacccatacatctaaatgtgagaactggttgcaatgtaagacatttcttgctgggaagttgtgagcaaaataagttgaaaacactaataaagatctgtctgtctgagcaaaggagactaaactccttgggctacataaggtg

SEQ ID NO: 353386 - DNA, 383 bp, Homo Sapiens
acggattataaaagttatatttattcacgatgctacatttattgcattcccttagaaaaatggagaactgtttatgtacccaatctgcacatataaaattttatacaaattatgtgtagcacataaaggcctctggtacagctaaaatcctgacactataatttgggtattcctgctttagggtctccagtttatcaggtctgtccatagaaaacagaaactggaattatagtcagtcttgctaacacttagaaactactttaaaatacaataaaattttcatttaccctaaaagtccaaatgggaggggatatattttgttaccaatttcaatgtaacagtatgacaaattcacacctcattttggctgggctttcaaaatt

SEQ ID NO: 353387 - DNA, 151 bp, Homo Sapiens
cgtcatgtgagtgaagagatgtcactgtctgtggtcttggagaactagtctcgtagctgaggggtggggtccctctgtctggggcactggcacccacagcaggactccgccagtctgatgccaggactgaataaagtgtatttgccccgac

SEQ ID NO: 353388 - DNA, 1661 bp, Homo Sapiens
  misc_feature (55)..(55): n is a, c, g, or t
  misc_feature (79)..(79): n is a, c, g, or t
  misc_feature (192)..(215): n is a, c, g, or t
  misc_feature (229)..(229): n is a, c, g, or t
  misc_feature (384)..(400): n is a, c, g, or t
  misc_feature (1405)..(1421): n is a, c, g, or t
aagacaaaagtaacaaggaatgggaaaggaaaaaaaccatgagcataccacaaanagtttatatttaaatgaaaaaaanaatcagtcacagaggcattcaagtagtaataatgttatccagagcttttcctttatatcaagacagatttgcacaagtgtttgcaatagtttgtatacaacccacagtccttnnnnnnnnnnnnnnnnnnnnnnnnataaattttgtttnttaggtttgtttttaagatggaagtggtcacgctaattggtatgtgtacaggcccaagtgatccatcggcaacacatttataaatgcaaattttacaggcaagcagattttcatacaactatctgtatctgcctgtagacagatatagttaaggnnnnnnnnnnnnnnnnnttaacacaaggaagtctactttgtcaagctaaccccttatgtactggttgtcattttgcttttattgcagaggtgcaaaacggagcaacaaacttgaataaaacggcataacccttgtgaaaataatccaaaccccagggattactttcaaagcctctcaaaggtagatctcagtctgggactctactgtgcttctagttgtctcttttattttcagtggctcaggtttctaccagaaaagacagattttattgtaaagcatacctacttttccacacaggggagaaaagtgtttggctctgtgattagatgatcactaacatgaacagtaggaatcagatacaatttcagttgaaaagaaagaaaaccccccaaattcctggggatctggcattggccaaacttcctttggaagattccaaagttaaatcctttaaaaaggaaagggaaaaatagatgaaatgccagtgtcttcatatccacagggatagagaatactcctctcagaaacctttgcattggtgcagacaagatgactggttaggcatacattgttaaaacataaaccaaaaatgtgtctaaaaattaagaggacttaaaaaaaatgacacagcatgtcactggaaagaaggtgcagtcttctgccttgctggaatgaacacacgatgtttcaaaaatagtaacctttggtttggtagttttttcttctattcaagacattttatatggactactttgaggcaaaacattctatttaaaagaaattaaaatgatatttcattgagcaagggtagagatggcgggagggaggaaatgggctaagagttcccttgttaaaacaacagtcctctattggcacggtggcactccgtgcagtaactgctagtaattgcactatagcattttagaccactgacgtatcaaaacctgatactattaggaaacttcgatttataaaaaaacaattctctgtcactctctcatttgggagggaagtagataaannnnnnnnnnnnnnnnncatggaaggctcccagaatctgctgtttttaagacccatggttagggcttgtggaagagacgagcaaaatttaatctattcgatatcctccagctctagggctccctggtgctacactaagtccctgaatggactaagtatgaaatgaaaccggtctcactgctaccgaggaggaaagacattcagaaccaaaacaaaggcagggcttcaacgaaatgaaattacgaatatgatttcctc

SEQ ID NO: 353389 - DNA, 337 bp, Homo Sapiens
  misc_feature (264)..(264): n is a, c, g, or t
tttagggtccccctcatctgccttacaccctggaagaaacagaggcctctgacctcactctttcctaaagagcagctctttcaatcaacagactttcactggaacacctaccttgcaccaactattctgaattcagagtccatctcttctctctgggaatgtacaggctaccgagacagaaccatggaaacaaaactggaatgaaatatgattactgtaatagagatcccccaaaaggaagaccacagagaagaggagtgagtnagaaggttccaagaaccaactctccctccaaactcaccagccaagtacctaaacccatatcagcatagataaa

SEQ ID NO: 353390 - DNA, 802 bp, Homo Sapiens
ggtctgaagccagactcaagtgatctgcccgcctggcctcccaaagtgctgggattataggcatgagccaccgcgcctggcctagttccctcttcttagatggagatttctgcacatgagctgtgagatccacagacatgtcactgagctcccccactctgtcagtggaagatgaatggaataaagcctgcttgcattgtggagtgcagctgtggggacagttgtcatttttgtgttttcagcttaactgtccagcatctcccctcccttcctacagcagggacatcatgccttagatataaacttagtggtgtgcagtacccaccgtggaagctgaagaagggaagtatttcctgtctctcaggcacaccccgcttccagccccataccagtcgggaagtggtcattgacctggggtggactacctggacccttgcttggggctatgagcctggagaatgtgacacaaatgaagggatgctgagactcatttcaaggaagccaccgtggtccggggttggtagtcatacagcaaggcaggtgggtagggctggcaggctgcagggatggtgtgtccactggtagcaatgtccagggatggcagcgtcctggggaatgtcatttctgctccactccttggactcgctgagctgtctccgcctccacctatcttcctacagacctcccttcttagttttctgtcaattcttttgagccagcaaactccatccagtaaattctttcttctttcatgaaagagcttgagttggatgtaactatatatgacctaacaattccaccc

SEQ ID NO: 353391 - DNA, 496 bp, Homo Sapiens
  misc_feature (104)..(124): n is a, c, g, or t
agtttttaatgacttaacaaattgtaccacattgttaaggacatataatgatagacactagaactcagacctctgcatgtatatttgataacatgtcttttgtnnnnnnnnnnnnnnnnnnnnntttgtttacattccactggtacccttaatttaaaataaatcagactaaaaggtggtatctcttccttagtgttctatttatccttatttgcctaatgggagcacttcttcctttgttaggctgtgctttactgataaaaccaagtattgaataaagagagttaattatctttttaaagtaaataaaattatggaaatatatatagtatatataaagtactgtgtttaaaaaaatgttatgcaatgttttccaaactgataaagtttgtaaagtgctataaatgtattttgttaagtacagataaaagctattgtgtgagtatattgtgctaaaatcatagaaataaagattagatttcttcatcaaaaaaaa

SEQ ID NO: 353392 - DNA, 460 bp, Homo Sapiens
  misc_feature (35)..(35): n is a, c, g, or t
  misc_feature (50)..(50): n is a, c, g, or t
  misc_feature (58)..(84): n is a, c, g, or t
  misc_feature (90)..(90): n is a, c, g, or t
  misc_feature (137)..(137): n is a, c, g, or t
  misc_feature (156)..(156): n is a, c, g, or t
cccaccagaacccccagcccccccggcaggaaaanttggataaaccaggnccaatggnnnnnnnnnnnnnnnnnnnnnnnnnnnttggtntaccatccccccacgggacccctaatttaaaaataaaatccagcccnaaaaggggggtaccccccnccctagtgtcccatttacccttatttgcctaatgggagcacctcctccctttgttagggctgtgctttactgataaaacccaagtattgaataaagagagttaattatctttttaaagtaaataaaattatggaaatatatatagtatatataaagtactgtgtttaaaaaaatgttatgcaatgttttccaaactgataaagtttgtaaagtgctataaatgtattttgttaagtacagataaaagctattgtgtgagtatattgtgctaaaatcatagaaataaagattagatttcttcatc

SEQ ID NO: 353393 - DNA, 755 bp, Homo Sapiens
tgcatgttggtaagtaaaagtatctcacggtacaaattaagaatgactttcttcaaaatatctgaataggtgcagttttagtttaacatgcaaacaaccattgttgctacctatcctgaatcaagccttgagcctaaatcaaagcaaaccaataccattgataagaagaagataaaaacaaaatattttggagtgttttccaacttaaagtatgaagacatactcagttcttggaacttagtattaaaccttttttatgccatttcataagaattccgatatatacttgatgattgccaaggggatgaaaggaaacaacagagatggttgatctgatcttagctcactttccaataacagaaggagttgtttacagatgaatagtatcacatcattatcaatttccacatgaaaaaggtggagctttctagaaaaaccaacctctaaggcattaggaatttagctgaaaccagcagaattgaaaactctggcaataaaacatggactcaaccatatcccttctggcaatttccttctcagagaggggagtgggaataaaatgttgccttccccacttctcaccaccaccgccatcatgacgctcatactggctttgcctgtttgtagaggaaaaggtgggctggttttagtactctgaaggacaaaaacaagcaaacaaaaacccctgctgcagcatttcaggtgcagtatgatatttcctacatctttccatctttcttgaccaaacagatttt

SEQ ID NO: 353394 - DNA, 402 bp, Homo Sapiens
  misc_feature (42)..(42): n is a, c, g, or t
ggatggtggatacctatccacctgtaaaacaaaccccctccngttattgggaaaagtgaagccctaagatccagatcaacccacccctgctgttccccttccatccccctgggcaatccatccaagtatatatcggaattccttatgaaatggcataaaaaaggtttaatacctaagttcccaagaactgagtatgtcttcatactttaagttggaaaacactccaaaatattttgtttttatcttcttcttatcaatggtattggtttgctttgatttaggctcaaggcttgattcaggataggtagcaacaatggttgtttgcatgttaaactaaaactgcacctattcagatattttgaagaaagtcattcttaatttgtaccgtgagatacttttact

SEQ ID NO: 353395 - DNA, 345 bp, Homo Sapiens
  misc_feature (48)..(48): n is a, c, g, or t
  misc_feature (50)..(50): n is a, c, g, or t
  misc_feature (94)..(94): n is a, c, g, or t
  misc_feature (122)..(122): n is a, c, g, or t
  misc_feature (188)..(188): n is a, c, g, or t
  misc_feature (205)..(205): n is a, c, g, or t
  misc_feature (213)..(213): n is a, c, g, or t
  misc_feature (215)..(215): n is a, c, g, or t
  misc_feature (248)..(248): n is a, c, g, or t
  misc_feature (255)..(255): n is a, c, g, or t
  misc_feature (284)..(284): n is a, c, g, or t
  misc_feature (337)..(337): n is a, c, g, or t
caactgaaattccaccaccaccatcagtagttgtagtaaaattaatcnantcattcaccgctaaagatgatctaaattggtgcagcccttgtgnaaagcatcatgacgataaatgtcaaaantacatgagcatgatcatttctgtagaccagaaatctgactcctaagccccatatcaagaataaaantcaaccaaagaataacntcatgctnanaaatgcttactgccgagttatgagcaagcaacncaaatgnccaagctgctgttatttgatatgaaaagnaacttggatgcagaataaatatacaaccatgaaatgtatatttaagtataaanggcacgag

SEQ ID NO: 353396 - DNA, 452 bp, Homo Sapiens
  misc_feature (8)..(8): n is a, c, g, or t
  misc_feature (12)..(12): n is a, c, g, or t
  misc_feature (18)..(18): n is a, c, g, or t
  misc_feature (50)..(50): n is a, c, g, or t
  misc_feature (52)..(54): n is a, c, g, or t
  misc_feature (56)..(56): n is a, c, g, or t
  misc_feature (69)..(72): n is a, c, g, or t
  misc_feature (100)..(100): n is a, c, g, or t
  misc_feature (117)..(117): n is a, c, g, or t
ctcgtgcnaatncggcanagaattgtctctaaaatacataagtaaatttnannnanaaagaataataannnnaacagtgaatgttgatgtaacatcttanataatagagcaccaganaaatttctaccaaatgagacaacaactttaggataagttcatcctctaggagctttctaatgtgcactcagttcctgtatactgtgtgttttgttctgatcaaggggtagggaacctttccagagaagtcccattagtaagaaatgacataaaatacgtgctttctcaggttactgtataactgttataatatatttaatatataaaattaagacttttgcttccagcaagtatgttagactagatattataaaacaactagatcctgaataaaatctgcttttaataggttcactggaagtaggagaattttcaagaaccatacttcgtcattt

SEQ ID NO: 353397 - DNA, 1117 bp, Homo Sapiens
  misc_feature (17)..(17): n is a, c, g, or t
  misc_feature (24)..(24): n is a, c, g, or t
  misc_feature (29)..(29): n is a, c, g, or t
  misc_feature (42)..(42): n is a, c, g, or t
  misc_feature (47)..(48): n is a, c, g, or t
  misc_feature (58)..(58): n is a, c, g, or t
  misc_feature (70)..(70): n is a, c, g, or t
  misc_feature (79)..(82): n is a, c, g, or t
  misc_feature (95)..(95): n is a, c, g, or t
  misc_feature (109)..(109): n is a, c, g, or t
  misc_feature (111)..(111): n is a, c, g, or t
  misc_feature (113)..(114): n is a, c, g, or t
  misc_feature (121)..(121): n is a, c, g, or t
  misc_feature (133)..(133): n is a, c, g, or t
  misc_feature (135)..(136): n is a, c, g, or t
  misc_feature (140)..(140): n is a, c, g, or t
  misc_feature (168)..(168): n is a, c, g, or t
  misc_feature (174)..(174): n is a, c, g, or t
  misc_feature (202)..(202): n is a, c, g, or t
cccaccccaagatggcnctctcgnggggncccccccgctttnctttnncccagcttgnttaccaaggctncctcatggnnnntgagttggagaangaaggcgagtcccncntnntttgggnagaaagtattgngnnaagngggtgtgtgggaaacttgaagatggccngcacangacacagcgtgttcggcctgggcagaanggcggctggctgtcctggagctgctgctggagcctgccctcagagtgtccctttccagtgctgtggcattctgtggcagcttcccccaggtgtggtgacggggggggcggggcctccacctgtgacagtcaggcttgagggtggacggcgtgcctctcccaggagccttccccatgtccttgccttgctgagaattgccctcccatgccgctgaggtgttaggtggtttagggccaaaaggggaaaaccacttgagtcttgtggtgtgtggtgggcagacaccacagggtggcatcacctggtggcatttccagaacctcagccccgattccagcacccaccaccgcctgaccctgtgtaacctgctgtcccgggtcccagagtgcactctgccccactgctctgctgcctgtcctgggaaagtagctttgccccactaggaaatgtaaacaggagggcttggggagcgtgggcacctttctcatgagcagctactgcggcgttggcaggactccgcttgctgctgctgctgcttgtgtaggtcggggagccggagatccccaaggacgcgcgccggacagtcggcactgaccggcccacctggtagcagaggacacccccagccccccaagcattgaagacatagtgtatttcctcgtatcctttctcccttgggtgtagttggggtggggaagcagggaaggctggtgcgatctccattccttgggctccacgtccgagttcatggtgcgccgctgtgctgggagctgcagtggtaatgtgtgggacaccttgaccaaaggggagctttgtctcgtgtgttttgaaaaaggcttaatgaagagaatgttgttcattcttagtagtatagtttgcaattcttaatggcaaataataagtttcagtagaaaacaa

SEQ ID NO: 353398 - DNA, 803 bp, Homo Sapiens
  misc_feature (686)..(686): n is a, c, g, or t
  misc_feature (745)..(745): n is a, c, g, or t
  misc_feature (760)..(760): n is a, c, g, or t
ggcagtatttcccaaaagggaatataaggataaaccagaagccatgccgctccaaagtaatacattccaagaagggacagaagtcaagtgtgaagcaaatggtgctgttcccgatgacccttctcctgtcccgcatcccgagctgagcttggctgaaagcctgtggacttccaaaccaccacctctcttccatgaaggagcaccttatcctccccctttgtttatcagggacacatataaccaatcaatacctcagccacctcctcggaaaattaagcgacccaaacgaaaaatgtacagggaagaacccacttcaataatgaatgctattaaactacgacccaggcaagttctgtgtgataaatgtaaaaacagtgttgttgctgaaaaaaaggaaattagaaaaggtagtagtgcaactgactcttctaaatatgaagataaaaaacggagaaatgaaagtgtaactactgtgaacaaaaaactgaaaactgaccataaagtggatgggaaaaaccaaaatgaaagccagaaaagaaatgctgtggttaaggtttcaaatattgctcacagcagaggcagagtagtaaaagtttctgctcaggcaaatacatcaaaagctcagttaagtactaaaaaagttctccagagttaaggaacatgggatgcatgcgaaagttcggggnagtgttaaaaattgccaaaggaaaagggcacaaaggaaggcaaaatggaaacctcttanttcccaaaattggcncctttcaaaagttcccttttcacacgttcggtatccggattcc

SEQ ID NO: 353399 - DNA, 275 bp, Homo Sapiens
  misc_feature (170)..(170): n is a, c, g, or t
  misc_feature (247)..(247): n is a, c, g, or t
atctgttaggaaggtatgcagtgtgagaactgaagtatttctgatcactctcagactgtcctccgtgatttatgctgacttaactgtttacctataaaccccatacaaagcagggtcataatttgtgatctgtggtggatttctagcagtcatcacaggcttctactganagtcctgaaaagaccttgcagtagtccaagctacaccaaacattaacacatatttgtggtaaacatttctgtataangttacctgacacacatataaacacaagg

SEQ ID NO: 353400 - DNA, 354 bp, Homo Sapiens
  misc_feature (8)..(8): n is a, c, g, or t
  misc_feature (12)..(12): n is a, c, g, or t
  misc_feature (32)..(32): n is a, c, g, or t
  misc_feature (107)..(107): n is a, c, g, or t
agaggtgntggncttgtccacttcttggcccnccttaaaactttcccagagctgttcctgcagtgtgccattctagacactctccacaggactattgtgagaagggnacagcctcaggcaacctgaccagtgtctacttgctgccaaagcactgccactggaaaggaggcccacccttttggcatccttcataggccccttaggaaattgttaaagacagaaactttgaaattgaattttaatgattgtcaggaaataagggtgaggtacagcagctgctccgggaaagctgtcccagctgccctatccaagggacggcctgctttttggccaccatcttcccccacccccgat

SEQ ID NO: 353401 - DNA, 406 bp, Homo Sapiens
  misc_feature (16)..(16): n is a, c, g, or t
  misc_feature (22)..(22): n is a, c, g, or t
  misc_feature (40)..(40): n is a, c, g, or t
  misc_feature (42)..(42): n is a, c, g, or t
  misc_feature (44)..(44): n is a, c, g, or t
  misc_feature (54)..(55): n is a, c, g, or t
  misc_feature (58)..(58): n is a, c, g, or t
  misc_feature (65)..(65): n is a, c, g, or t
  misc_feature (94)..(94): n is a, c, g, or t
  misc_feature (127)..(127): n is a, c, g, or t
  misc_feature (323)..(323): n is a, c, g, or t
cctggtggcttgccanaaaccnagaataaaggcgaagtcntncnacaaaaccannagnacgcttnctgagtctggctaaagtcaagtattaagnccaccttttctgagccatgtagaaaagaagaanaaagtcaggacggttgctgctttccaagtctccgttggcaccatcacaaaatctcagtcgtaaggtcacatgattctctgccaaatgtagagtgcactcccatcaaccattctgctgatactgcgaaggcagctattgtctcgtttagacccaaagttcagcccactcttcattgaattagctgaaaaacgcatcnacctttgggggctgggagtcatggaaacgtctacctggcaagctgcccactttttctgcccatcaaccagagatggaattgtg

SEQ ID NO: 353402 - DNA, 373 bp, Homo Sapiens
caaaaacctcgctgtaaacagggtacgtgaagagctggcatttattttccttacgagaaggttttcgtagagaattaaataaatgtaggcccttttacctttggctgttacccttccttgaaaataacccgaactcagaattatttaaagcattcatgtttctccccaccttatccccatcccacctttattattattatttttctcccatggctaagctagataactgtatgctgtctctctctgcatgcactactatccaggatggtaaacctgggcttacatgttacacaggcttatcggagtttgcttgcggccacttgaacacccaaactacggcatctgttccaatgaagaaccaaaccaccatctt

SEQ ID NO: 353403 - DNA, 432 bp, Homo Sapiens
  misc_feature (293)..(305): n is a, c, g, or t
gtttgctttttgttttgctgtttttcctttatactcagggactcttgctttcaacttaaacagaagttcaagtccataacaggttgcagctcaggtaaaataccatgcacagcatttgattacttcaaaacagcaggaacacacaggctgaagagagtggtcaaatagggcttgctgttctcaaaaattaggtataatggcaaaagcattaatatccatatctaaagttcttcctccaaccctggcttctgaggcagataataaacacatcaattactggtagatgaagtagnnnnnnnnnnnnnattttctggcaatagtcaaataacagctgcctttaagcttacttgggtttatgggctccttgtttgccacttctgccctatactcacatgcagggattccttaaaaggatgatttttatttgcaaga

SEQ ID NO: 353404 - DNA, 495 bp, Homo Sapiens
ccctagcagccaggcagcacctgccagagcatgaataaggctatcttggaccgcccagcgtagcaacctgtgctgaatgaagccacatgaatatgcccaggagaaactagcagaagaatcacccaccttgcccacgttagagatataaaccactatttgaggcagtttgttatgcagcaaaacttagccgaaactattaccttgctaccttgactgctggtgtaatttcccatctcatggagtcacagagttttcttgccaactgcagtgagttggcaaatgggaatgatcagtagcctcagtgtgttttctgatccactccatcctgtattatcatctgcgaataccgtttttcctttaaatgcaatgtgtctttcaaagctgacttgaatttctcacctttcgagttacctgccatttggactcacttatttggaggagatatgtaaagacccagcgtaatacctgtatgctcaataaaaagtatttgctggt

SEQ ID NO: 353405 - DNA, 317 bp, Homo Sapiens
  misc_feature (24)..(24): n is a, c, g, or t
  misc_feature (28)..(28): n is a, c, g, or t
  misc_feature (235)..(237): n is a, c, g, or t
ggttagaggccacagagtataaanggtnaaaccataaagcctctagatgctaacatagattgctaaaaacttcagggaaaggaaagatttcttaaaactaaacagtggaacaatggtatatttaactacattaaaactaaaactttaatttgtcaagacatcatttgagagcgaaaaggccggtcaaggacatgggtaagatgtttacaaatacacagttatcatttgctagcannnaaaatatataaagagttcctaaaaataaggaaggaaaagacagaaaaggctactgaaaattggacagaagcctgaagagc

SEQ ID NO: 353406 - DNA, 306 bp, Homo Sapiens
tctgtaatgtatgtctgccagtaatctgtggtagtctagaaagtagggattataaaaatttgttgttttcatacacgcataaaaactttcctattatgttttgtatttctcttatgctgtcagatatgcaagaactgtacaggttgctttgatcgacacatcccatgtgtttctctgaactgcccagtacttttcaaactctcccgagtaaatagagaattgtccaaggcaccatatctccggcagttattagaccagttttaaattgtcaatatcacagtattacaggtgctatttttctcgtgc

SEQ ID NO: 353407 - DNA, 545 bp, Homo Sapiens
  misc_feature (436)..(436): n is a, c, g, or t
  misc_feature (471)..(471): n is a, c, g, or t
  misc_feature (478)..(478): n is a, c, g, or t
  misc_feature (501)..(501): n is a, c, g, or t
  misc_feature (513)..(513): n is a, c, g, or t
  misc_feature (523)..(523): n is a, c, g, or t
gggggacccccgggagtaccacttatccagcttgtaaggcgcccagtggaagtcctgcaggacccaactctgagactgaatgctacttactatattaccaagcaaatccttccacccttggcaagaatcttctcacttattggtattgatgtcttcagctggtatcatgaattaccaaggatccataaagctaccagctcctcgcgaagtgaacctgaagggcggaaaggcactatttcacaatattttactaccttacactgtcctgtgtgtgatgacctaactcagcatggcatctgtagtaaatgtcggagccaacctcagcatattgcagtccatcctcaaccaagaaatccgcggagttgggaacgtcaacagggagcaacttgttaaagatatgcaaggaactgttacaggttgctttgatcgacacatnccatgtgtttctctgaactggccagtacttttcanactctcncgagtaaatagagaattgtccanggcaccatatcntccggcagtnatttagaccagttttaaaattg

SEQ ID NO: 353408 - DNA, 314 bp, Homo Sapiens
  misc_feature (4)..(4): n is a, c, g, or t
  misc_feature (51)..(51): n is a, c, g, or t
  misc_feature (170)..(170): n is a, c, g, or t
  misc_feature (180)..(180): n is a, c, g, or t
ggcncaaagggactcgctgagggtctggtgttgaggcggagggtctatcanggaggatgatgcagactcagcacgcacgcgcagcaggttggctacacgtttggccatgtctgactgagccaggcgatctttagcactgtaacactgaatctgctctatccgactgcacnagtgaagtcnactttgatgtgtaactgcaccaggtcattacctgagcaatccacctacaaagaagcagagaagccaattaatccaaggggagttcctatcactccaatcccacctatagactctacacaaaaccttgaaacaac

SEQ ID NO: 353409 - DNA, 1667 bp, Homo Sapiens
  misc_feature (64)..(64): n is a, c, g, or t
  misc_feature (419)..(419): n is a, c, g, or t
ccggtaacactgaatctgctctatcccgactgcccagtgaagtcactttgatgtgtaactgctnccaggtcattacctgagcaatccaccagaaagctaagtgtcggatgatgagcttgtggcagcggtttccagtgctcagccctaaataagcaaagggcctctaagtgcttgtcagattccatgtgtgctcgcacagctttggcctcgtggatccatttggcaggtacacggagcttctgggtaaggaaagtctctttagcccaagattcaggggtctccaacagctggcagtgccgggtaagcagctctcgaacagccttctcacgtatgcctgagttgtcaatgtgcaggaggacaaagatggcccacttcccagagcccctcactttccaagctggccagccgttaactggccnttgtagcacaccttcaacactgcgctgagaagatgggtgtagttaagagccctcagcacttcccacaagtgccagcttaggcggtagtccaaaggatctgctgttatgcttcgaggctccagcagctggttgagatcataatgtctgtcactgtagagttttagaaggtgaaagcagacatctcgaagtggtgtctgtgagttttgctcctccgctatcacacagccagaaccctccagatacgaaggaagtggggagcaggcatatctgtcactgtcagaggtattctgaaatgcttcttcatacatgctgagcgccctagaaatggaggctgttggtggaagcaaataccaaagatggatagccagggagcgtttccaatccaactgggagcacacgtttatttgcttcttttctgagagctgccacaccggttttccagccaacagagcaaagatgcgcagtctctcatcctggatgaaggagtctgcttggagctgatgccagtccaccaactgcatggtgagcagctcccggactgactggctacccacaaactgagataaaagaagagcaagacgatgatcccctgactgctgggccagagagcaggcctcactgatccttttgcctgtgaggtagctgaatacagcctccacagggctgtttttttgggttaaggagacttcctcttcaatctgaggtgtggcagtacaggatagccagcgggagaaagctcttcttcgctccagaatttgaatgtattcacggggttcatttagctggctgtcaagctccttcaggtggccccatagggcttcacatagtgtccatgtcaggctccagtgcttcacaatttgtgcttctggtaagtctcctgatgcttctttaacccaatctgcatagtcatgaatgacagcaactcccagattggggacaatgagaggacacagttcatccacatggacagtgctgtgttttaatttgagctccagaggtgtctgatataatttcatgtcttcatctggctttctttgtctcaaactgagtttttctaagtgaactttgaatggggactcagttaggggtttaacagctactggattgggcaggaatccaaactccatggaatcggcaatctgatgattttctagttcatgagagccattcagctgttctccactattagcaagagtccagttggggccccaaccaacacgaaatgagcgtcccagaagtccaggtatg

SEQ ID NO: 353410 - DNA, 1789 bp, Homo Sapiens
gtccggaattcccgggatctggcacttgtgggaagtgctgagggctcttaactacacccatctctcagcgcagtgtgaaggtgtgctacaggccagttacgctggccagcttgaaagtgaggggctctgggagtgggccatctttgtcctcctgcacattgacaactcaggcatacgtgagaaggctgttcgagagctgcttacccggcactgccagctgttggagacccctgaatcttgggctaaagagactttccttacccagaagctccgtgtacctgccaaatggatccacgaggccaaagctgtgcgagcacacatggaatctgacaagcacttagaggccctttgcttatttaaggctgagcactggaaccgctgccacaagctcatcatccgacacttagcttcagatgccatcattaatgagaactatgactacctgaaggggttcttggaagacctggcacctccagagcgcagcagcctaattcaggattgggaaacatctgggcttgtttacctggactatattagagtcattgaaatgctccgccatatacagcaggtggattgctcaggtaatgacctggagcagttacacatcaaagtgacttcactgtgcagtcggatagagcagattcagtgttacagtgctaaagatcgcctggctcagtcagacatggccaaacgtgtagccaacctgctgcgcgtggtgctgagtctgcatcatcctcctgatagaacctccgactcaacaccagaccctcagcgagtccctttgcgcctcttggctccccacattggccggcttcccatgcctgaggactatgccatggacgaactgcgcagccttacccagtcctatctgcgagaactggctgtttgggagcctgtgagccccaagcactttgcatcacagtcacatgcccattcacaccacacagagggttccctgccttgtttggattggcactgtttgccattctctgggttggctgtggcatctaccctccctccctgctgccagaagcagcatcctccacttgttcagggcttttcttaatactgaacgtagcataagggcttctggaacccagaagaagagacagtttaccatcctcaagatcattcagtgtttttcctttaaaaaaatggtcaataaagctccctttggcagaatcccccaaagaaccagggtattctttttccatccctagccattctggatcttgtgaccctccatgccaaccagcttccctactcctaccctggcccttttatactaggactccttaggaggagtgagacaggtgataatggatccttaacagatgaactatccacagaaggaagagggatccgtctcttaagtaattggttagttaacactgaattttggaggcaaaggagggttggcctgagttaagaaacaaaatgggatctttctgacacacttagggccaaaagtgaatgcctgtcacggaaggggattgatcttccaggggctgtttttttgttccctgcccctttaagagttcccatggaacccccataaccttttggctacctacttattgtgccagggaaaccccttggggtcaacaatggtggaccagtggtcctggtgggggaaaagcctcccccacaaaaattatggggactttggggtgcgccttgtggggaagttcccaaagtcagttagggctgaaaaaaacacccagccccccccaggagaatatatagacaactcccgcacagaaggttcaatcaaaaaaacctaagaact

SEQ ID NO: 353411 - DNA, 893 bp, Homo Sapiens
  misc_feature (93)..(93): n is a, c, g, or t
  misc_feature (748)..(748): n is a, c, g, or t
gggtttcccagggaaagcttttgagcttaggggatttgaaaacccctaaaagggggaatgggaaaaagcttccatccattaatttttgtttgngactttcaaggaagtacaaagtgttccaggttagaaatattttcttaaaagcattgctcccacaattctgcattctttctttacttttcttgcttaagttctgaccactttttgaacataatttgttgaatgatggtatttaaaatgaatttttttccagataatatggctttcttttttcctctaataaaaacattccaaatcaagccagttttgcaatttgctttaagcagctgcctaagtcagaggttactaagaggtgtactctgtgaagtaaacgtaacctcttagcattaaaactacagcattgagcctggcccaatatctcattaactcttcatccaaaaccaggactcagctggcagactggccccaaggacttcttcctgcatgtagtttacttaaccaatggtgcccatcataccagcatcttctgcgggactctcctggaagaaaaggcctctttggttggaagaggcctcatggaatgtagttattaattagggagaaataaaacaaagtacttggctgtgataatcagaatcaaaaacagcaaaaacctttcctgatagcataaaaagttcccttggactaaacgtttttgaatttttaaaaggctaaaaggagaagtatgtccctgattttatttttctcnagggactgcatgagtgtcacactctctggaaatgcaggtgagcaacgagacatcaacatgggcttgatcttcgcttttggcattaactgaattctgaagcaaagtagaagaacaagcctacttgttcttactcctctgcccaagt

SEQ ID NO: 353412 - DNA, 1220 bp, Homo Sapiens
  misc_feature (50)..(86): n is a, c, g, or t
  misc_feature (634)..(644): n is a, c, g, or t
ggatgtatagactcactatgggcgaccggggttcatcgcggtggcggcgnnnnnnnnnnnnnnnnnnnnnnnnnnnnnnnnnnnnnatcaggccaaatcggccgagctcgaattcgtcgagagcggcttagcaggtagaccagaggccgtgtgaccagctcagtgctggtttacggaacaactcttacttttaaaaattacttgttcccccaaattgttgagtgccgccgtttggtttcctatgttttctttccctgttttgattttgctgaagggagaggtggtggtggttaggatcagagctctcctggcatccgtggggaggatttgctggtggtggcttcgggctcatgcccagacacactcactgccccgtctgtccaaggcctccccttcccctttgctggtgggaggagctcgtgtgctccttggccgcttactggaagggcgtttttcagagctgcagggacagggtgagcagctgaagggctaggagggaagccggcccccgctctgcagaagctgcatttcagctgaatctgtgtttcagcctcagttggttgcaccgttagcccctctcctcccggatggtcatgttttggtcacattagagaataaacagccacacacacannnnnnnnnnncctttaaaacagtaacttggaaatatgaaaaggccagaaggaggagcaagggctgttttctggagtggttgaggtgttgtcctgcagttgtcattgtcttctccaccgggctgttcccatttatttcctgtggaactgaatccctcctccctccactccttgggagcccaggtggtcctgggccaacattcaggccttccaagaagccaacaacctgggagatttgttctcttggaatttcgcggtaaccttctgcttcctttagcataaaaagcagctcaagagaccttatcttagggatgagaaaaacatgcatattaattccatctgagtgattgtcagtgtaaggccttttaaaacaaaagcaagttctttgttaggaattggtcaaaattcatctctttctttaagcccatcaactcccaggacggtttgagttactcagttacctaagcttgctattcatccaaatcattttctagagtcactgtataagggtctatgagtagctgtgtatgaataaatattacctgtctacctcaaaatacacatactgctgaagcattctgtacaacc

SEQ ID NO: 353413 - DNA, 835 bp, Homo Sapiens; identical to SEQ ID NO: 231632
  misc_feature (370)..(373): n is a, c, g, or t
  misc_feature (425)..(457): n is a, c, g, or t
  misc_feature (506)..(625): n is a, c, g, or t

SEQ ID NO: 353414 - DNA, 427 bp, Homo Sapiens
  misc_feature (86)..(86): n is a, c, g, or t
  misc_feature (144)..(144): n is a, c, g, or t
  misc_feature (266)..(266): n is a, c, g, or t
  misc_feature (352)..(352): n is a, c, g, or t
  misc_feature (356)..(356): n is a, c, g, or t
  misc_feature (426)..(426): n is a, c, g, or t
taaacctaaagatatcaaattgacaaatgctgggagcaagcttgaccatggaattaaaagccttagtagtcctaagattgccagtnatgtgaaacctaaagccgaaggcaggcaagtgcaaaataaatggtctcatttacttgnttcagagagagaagatgaaagaacctcaagaaaggaagaaacagtaaatttagagacaattctgaaaaatgtgtcttagagaaatggaagagaaatcaattttctcaggattataactccanacaagataattaaggaacccttgggatctagaagacagaagatcagtttcaaaatccctataaaatcccgtgacaccctccagaancttntagaagaaaatgtcttcaacatagattctaataattcggagactaagcaggaagaaagagaatacctggna

SEQ ID NO: 353415 - DNA, 584 bp, Homo Sapiens
  misc_feature (313)..(313): n is a, c, g, or t
  misc_feature (543)..(543): n is a, c, g, or t
gcgccagtatgtgaaacacaccacaaaaatggtgagataagacaaaaatgcagtttaggaagcctcctccttgcttaaatgtttagaatatttcttctccaaagactgcatttgcctcagtgatgtaaattttccatcatggttggcataatatctgtaaacatctcactaaatgcaaaatggagtttacatttatgtgcatactagcagaaaagaagtaaactaatctcatatgcatgtagctatgctgatcaaatgtcgccaaccaaaatttaggaaagaatttgttttcacccagcatgtacatctcacntttctcttggcaaggaagtctggtgttaacgttgggtttaggtttaacatttacaccagcgaaaatgtttatgaatattatggaaaacttattttaaaccttgatttcttttgagcacatttacatgcctgcgtgactgattaataaattaggcaccaatcatgtgtaaatcaatgtaaatcactagtttatgtacataatataaactatgtaaacttcatttttcatgncagtgcccaactactgctaaggtttactatgattcttaagg

SEQ ID NO: 353416 - DNA, 512 bp, Homo Sapiens
  misc_feature (36)..(36): n is a, c, g, or t
  misc_feature (48)..(48): n is a, c, g, or t
tcccccaagacgcaattgccccggggaggtaaaatnccccaccaggtnggccaaaaaacccgtaaaacaccccactaaagccaaaaagggagtttaacatttaaggtgccatacctagccagaaaagaagtaaaacctattcctcatttgccatggtagctatgctgttccaaatgtcgcccaacccaaaatttaggaaagaatttgttttccaccccagccatgtacatcctcacttttctcttggcaaggaagctggtgttaacgttgggtttaggtttaacatttacaccagcgaaaatgtttatgaatattatggaaaacttattttaaaccttgatttcttttgagcacatttacatgctgcgtgctgattaataaattaggcaccaatcatgtgtaaatcaatgtaaatcactagtttatgtacataatataaactatgtaaacttcatttttcatgcagtgcccaactactgctaaggtttactatgattcttaaggaaaaaaaa

SEQ ID NO: 353417 - DNA, 853 bp, Homo Sapiens
  misc_feature (29)..(29): n is a, c, g, or t
  misc_feature (576)..(670): n is a, c, g, or t
  misc_feature (674)..(734): n is a, c, g, or t
ggtccggaattctccgggatcagcaatangaagaacaataccgatcagcatctgaaggagaaatttaataaatactgccggttaaatgatcacaagaggcccatttgtagtggctggttgacaacggctggagcaaattaaataaataaaatagctctgtctttcaatgaaacactcacgatgactactgcgccttctctttcgaaaaactcttaatttagtgacttatggcaaaattttatcttaaatcaatgtgattctttcttgttttgggagacggtggaggtatcctcattagttctttcttcaggcttgtgtctttagttgcgtggctgcgcaggcctgccatatgatttaagccatctcttttcattaaatgtttctcttcctgtgagacttactaaagcaacttagtggcaaaaagtaatgttgtacttataattctgtacagaaatgacaatgagctgaatatatggttttacaaagtagacatccacttgcaaaatgtttggatgtaatgttaaagcgcaatgtgcaaaatttaaaataaagaatatttattaatacgcacagtannnnnnnnnnnnnnnnnnnnnnnnnnnnnnnnnnnnnnnnnnnnnnnnnnnnnnnnnnnnnnnnnnnnnnnnnnnnnnnnnnnnnnnnnnnnnnnaaannnnnnnnnnnnnnnnnnnnnnnnnnnnnnnnnnnnnnnnnnnnnnnnnnnnnnnnnnnnngaaaaaaaggggcccctaaggggggcgtttattaaaaatgggccggggccctcttttataaaacccggcgggggggaaaaaccgcccctgtgggactttttgggaaaaacccttttcct

SEQ ID NO: 353418 - DNA, 677 bp, Homo Sapiens
  misc_feature (135)..(160): n is a, c, g, or t
agcggctcgctctggccctcactcttactctcttgcactcttgctctccccctccctcccttactctaacagctgaatacacagtacttgttgatgtaccaaaaaggcattcaaccatttcgttattgatcgtcnnnnnnnnnnnnnnnnnnnnnnnnnncaaaataacactgctgtaatacatactggtgcttttatttatataggttggattcccagaaatactatgtaggcatatgtttcagaaatattacaagattactatccaaaatgaaagcgcccgttccagcgtcctctccagcactctttaatgcttgaaaatatgaaaggctaaaaattgcattgtattgcttgttagtttaattgccttttgtctgagttcaaagaggtttgttgttgttgctgtccttgtttctgtttggatttttctctgatttgcctgttcttaccctttgctcatgtatctattgatgtttttcattataaatttgtagaaattcttactacatagtgcatattaatcatttgtagctctaatgtgttatgacgttttcatcttgactttattgatgatatatctccctttaaaatttttaaactttttaggtagacccttatctcttttatagatttggtttcctttttttatcacatggatgcccccacccaaaagtcat

SEQ ID NO: 353419 - DNA, 847 bp, Homo Sapiens
  misc_feature (322)..(322): n is a, c, g, or t
  misc_feature (410)..(410): n is a, c, g, or t
gcacgggcagtgtccccggcctaccggctgtgtcacaaccggaggtcttctttaagatctggggcgcgaaacacgttactgcacaaaaggtgccatccagccccccaagtttcgagccaagaaaaaggaatcccccgggggcgctgaggcgtgcaccccaccccgcgcgaagaacccccgtggcccggaccctggagcgggacgtcggctgcacgcggcatcagagcgtgcagacggaggatggcactggcgggatggccagggctgtggccaaggcggcgctgagcaaggtgcaggaacacgagacaggccggcgcagcangcactggcgaggcgggcacacccctggtacccattgtcgtagagcctgcgcggcccggggctaaggctgtggtgcctcagcctctggngcgcggactccaaggggttgcaggaacccgcacccctggcgccttccgtgcccgaggccccccggggcagggagcgctgggtgttggaggtggtggaggagcgcaccacgctgagcggtcctcgctccaagcccgcctccccaaagctctccccggagccccagacaccctccctagccccagcgaagtgcagtgcacccagcagtgcagtgaccccagtcccacccgcatccctcttgggctcaggcaccaagcctcaagtggggctgacctcccggtgccctgctgaagctgtgcccccagcaggcctgaccaaaaaaggagtgtccagtcccgcacccccgggaccatagccaagggggtcatcggccccgcgctgtacagcctccgtatacatatgtacacatataaataaagtgcgtccgtgctgcgtgaaa

SEQ ID NO: 353420 - DNA, 1201 bp, Homo Sapiens
  misc_feature (1082)..(1082): n is a, c, g, or t
  misc_feature (1119)..(1119): n is a, c, g, or t
  misc_feature (1129)..(1129): n is a, c, g, or t
  misc_feature (1164)..(1164): n is a, c, g, or t
aaaatctgttcttcctaaagaaatcccttcagatagagctcatggtgtttagtgatgtacttgcagtattgtttgaagaattgttttgtcttaaggaaaaaagacgttgcacatgatttgtactgcagcaaatcagcaaaagtgatctgagttggatatatttgaaggtattttgaaagttacgttcaaggctaacacctgagcttggtgtaatgtaaataagaccttgtgtttatgaacctttcagctaatttaattttttttcccttacatgccaagtgatgttcaggttttgaatgttttgtatcagttttttcctttgtaaatggcattaacattgttacttgaggtcatgcttaagtcacttttgttgtcctgaggacttgaactgtaacagtgcatcaagatttgttgcaaattttgtctgtagatagtctatgcttcagactgtgtatggtgatgctagcattttcgtttataaagtatgttagtggtataaaataaatgagtataaccataggtttggaacaaatttcgcttacattgttcatacaagaaatcataaagtatctgtatgctattgaaatttaactttgtatgatgcttaaaaaccactatttggggaaataataaaataagtctttaccatgtatgaaagaaattttaaaaaatacaaaatattttctgattagcatctagcttataataaattttcaaaaaagctgaaggcaaaaatgccttcatcaggatgcactgagaactatatagttacgtcctgctttttgtataaactgagatgctcacatgcttccccttagaacaggcaatgtgctatgcataacatagttgtacattatctttgcggttgctctgagttttattttttattatttaaaattgtagttataaaatttttcagtatagtacagtacatatactgtgaggcgcgtgctaaagtgaataagcgagttttcatgctgacccactcaatgctattcagaaatcaattggcttagcactttctcatatccttaggtgcatttagattgccagagttaaccttctgcgtttaaaaaaagaanaacactaaaaaataaaatacatgtatatacttaaaanaaaataatangggtttccctcaggggaaaacagcagctacatggnttcttttcctattactactgtagggcaaaccaggggc

SEQ ID NO: 353421 - DNA, 335 bp, Homo Sapiens
  misc_feature (126)..(126): n is a, c, g, or t
cgtgccataagccgtttcgatcaacggtatgagcaatggcatttttcccggttcggcacgtttcatagtatcgcgcactggtgcggcgaggatccccccccgtgcggctggtttcgctcaacgccnaacaatcgcgcgaggtcatcctgatgcaaacaaggacgagcggcgtcatgcaccaataccccactgcgcgtcgccagcggctttcagacctgccagcacggaatcggcacgctcatcaccgccatctacaacggtgatttgcggatgattcgccagaggaagttgtgcaaaacgctatcgccaggacttatggcaatgacgacacgttt

SEQ ID NO: 353422 - DNA, 932 bp, Homo Sapiens
aatgtggaaaaaaagtaccattttttggttaagggagcgaccagagtcccacttactgtgtctctgaagaatcgctccttcctaaggacagtagtctctttacgatgggtgagggtaccctccataaggccgtatccaattaaagacctttggaaacctggcccaataatatgtattatggaaaaaactcttcaaggcagttccggataggatcccaaggtttaagaaatgtgagaagcactgggtctaaagccatctagtttttcgaccttcgaaggggggggtcattcgctccaagagcatcagtgagccagtaaaaataataaagcaaccccccaaggcagccatttattacaagaagcaacaggttattgacattacatgtttgaaaattccctttggtctttagggaaaataaacaggaagccaagatttggagcctttgtaataaggacttcctgcagaaagtcttttctttactataattgagtaattcatatttagagtcacatgtccagtagcatttctaattttgagcattcaccttgctacctttaaaaaacatctgagttttaagtggcctttttatcatcatacacatgtgcatacaaagaagggacttggcagtttaaaagccacatatattcacttttattgccctaaatttacatgaaacagacatactggcaaactcacatattgctggtgctaaccttatatttcatagtgttggcatattccccttttcttagattcttactccgaaatataggtacacatcctttgctctgtgcagagggaattacatcctttttcctctcctacaaaaacatgctttattaagtatccatcattactttcctttatgctcgctcaatatgcaatgtgctgttattctaccatgtaccttaaataaaggatgatggcaaagt

SEQ ID NO: 353423 - DNA, 1094 bp, Homo Sapiens
  misc_feature (444)..(551): n is a, c, g, or t
  misc_feature (600)..(638): n is a, c, g, or t
  misc_feature (802)..(802): n is a, c, g, or t
gtagcgaggcctgggtggcgaattcggcacgaggcctcagtgtgctgagcaaacgtggagacaccatttccctcctctagacctcatcttggagagagagatgttggatggggccatctattccagctttattcacacaaatcatgtctgttggcctggaaattggaaaaccagttaaaccaaaaacatgatattaagaaaacaggcaggctcaccatagtaaaaatgctgaaagccaaagacaaaattgggagaacaaaagaaaagcgtcttgtcacatacagaaggtccctgataaagttagtagctgccctcatcagaaaccaggcccaggcagtggggacacatccagagtgctgaaagaacctcccccaggtcatcctatccccaagagtgatgcccggcagcattcccagctcagggctaatggttcacggaagccannnnnnnnnnnnnnnnnnnnnnnnnnnnnnnnnnnnnnnnnnnnnnnnnnnnnnnnnnnnnnnnnnnnnnnnnnnnnnnnnnnnnnnnnnnnnnnnnnnnnnnnnnnnggccattttgagtgcctttcacagccctgcataaggcaggtgtctcagnnnnnnnnnnnnnnnnnnnnnnnnnnnnnnnnnnnnnnncatggtgagtgagcgtagggcgcaccctggaaagctgccaagcccaaagttgtgcaaagcgctggggaatccagactccccacagcagcaaagactcgggactagagcatccttctgttcacaggaaatgctggcatctactgggtcagggctctgcgcttcgnggctgcgcaaccttggaaaaatcctcaaccctctcgggcctatcgaccctcataggaaaaatgggtggcgacaaacccccctactcgcggttgatgagaaaaccgacggcgctaacctcgttgaccagggcccccaactccgactggcgggaactacgtacggcacttctctaaacattatgcaccccgcggccacgatctaccccctcacgatcctccccgggacattgaatactcccagtctgactaaagtactcgcgcttatcaccagccaccggtcaatcacctgacc

SEQ ID NO: 353424 - DNA, 614 bp, Homo Sapiens
  misc_feature (596)..(596): n is a, c, g, or t
tgctggcattacaggcgctcgagcctttctgatgtggctgctgctgctcagaaggccttgtccttaaccacctccttgcctgccctggaggcttgtgcctctaggccccaccccctgtggagtcctgctggctttctccatccctatctgaatcctccctgctgtgtggcctcccctggtctcatccgtaacacagcccagcttagtgggcctctgttcctgcgggtggccagcctgtctgtgtggctgggctggggaggccatgtctggtatctgaatgctatcggtgggttggggtggaggaaccaggagagggctggagggagggagatggtctcagccccacagagtttggagtcctcagtgtgctgagcaaacgtggagacaccatttccctcctctagacctcatcttggagagagagatgttggatggggccatctattccagctttattcacacaaatcatgtctgttggcctggaaattggaaaaccagttaaaccaaaaacatgatattaagaaaacaggcaggcttcaccatagtaaaaatgctgaaagccaaagacaaatttgggagaacaaaagaaaagcgtnttgttcacttacagaagg

SEQ ID NO: 353425 - DNA, 383 bp, Homo Sapiens
  misc_feature (83)..(169): n is a, c, g, or t
  misc_feature (285)..(334): n is a, c, g, or t
  misc_feature (372)..(372): n is a, c, g, or t
ggaacgtctgaggttatcaataagctcctagtccagacgccatgggtcatttcacagaggaggacaaggctactatcacaagnnnnnnnnnnnnnnnnnnnnnnnnnnnnnnnnnnnnnnnnnnnnnnnnnnnnnnnnnnnnnnnnnnnnnnnnnnnnnnnnnnnnnnntgacagctttggcaacctgtcctctgcctctgccatcatgggcaaccccaaagtcaaggcacatggcaagaaggtgctgacttccttgggagatgccataaagcacctggatgatnnnnnnnnnnnnnnnnnnnnnnnnnnnnnnnnnnnnnnnnnnnnnnnnnntgtggatcctgagaacttcaagctcctgggaaatgtgntggtggaccgt

SEQ ID NO: 353426 - DNA, 458 bp, Homo Sapiens
  misc_feature (1)..(1): n is a, c, g, or t
  misc_feature (34)..(34): n is a, c, g, or t
  misc_feature (37)..(37): n is a, c, g, or t
  misc_feature (54)..(54): n is a, c, g, or t
  misc_feature (454)..(454): n is a, c, g, or t
natgctggaggagaaccctggaagcccctggtgnctncccatggacccagaggntctttgacagctttggcaacctgtcctctgcctctgccatcatggcaaccccaaagtcaaggcacatggcaagaaggtgctgacttccttgggagatgccataaagcacctggatgatctcaagggcacctttgcccagctgagtgaactgcactgtgacaagctgcatgtggatcctgagaacttcaagctcctgggaaatgtgctggtgaccgttttggcaatccatttcggcaaagaattcacccctgaggtgcaggcttcctggcagaagatggtgactggagtggccagtgccctgtcctccagataccactgagctcactgcccatgatgcagagctttcaaggataggctttattctgcaagcaatacaaataataaatctattctgctaagngatc

SEQ ID NO: 353427 - DNA, 425 bp, Homo Sapiens
  misc_feature (49)..(49): n is a, c, g, or t
  misc_feature (85)..(85): n is a, c, g, or t
  misc_feature (91)..(140): n is a, c, g, or t
  misc_feature (184)..(184): n is a, c, g, or t
  misc_feature (196)..(196): n is a, c, g, or t
  misc_feature (257)..(343): n is a, c, g, or t
cctgcaggggtgaattgcgttgccgaaatggattgccaaaacggtcacncagcacatgtgcccaggagcttgaagttctcagganccacannnnnnnnnnnnnnnnnnnnnnnnnnnnnnnnnnnnnnnnnnnnnnnnnnatcatccaggtgctttatggcatctcccaaggaagtcagcaccntcttgccatgtngccttgactttggggttgcccatgatggcagaggcagaggacaggttgccaaagctgtcannnnnnnnnnnnnnnnnnnnnnnnnnnnnnnnnnnnnnnnnnnnnnnnnnnnnnnnnnnnnnnnnnnnnnnnnnnnnnnnnnnnnnncttgtgatagtagccttgtcctcctctgtgaaatgacccatgccgtctggactaggagcttattgataacgtcagacgttcc

SEQ ID NO: 353428 - DNA, 592 bp, Homo Sapiens
acactcgctttttggaacgtctgaggttatcaataagctcctagtccagacgccatgggtcatttcacagaggaggacaaggctactatcacaagcctgtggggcaaggtgaatgtggaagatgctggaggagaaaccctgggaaggctcctggttgtctacccatggacccagaggttctttgacagctttggcaacctgtcctctgcctctgccatcatgggcaaccccaaagtcaaggcacatggcaagaaggtgctgacttccttgggagatgccataaagcacctggatgatctcaagggcacctttgcccagctgagtgaactgcactgtgacaagctgcatgtggatcctgagaacttcaagctcctgggaaatgtgctggtgaccgttttggcaatccatttcggcaaagaattcacccctgaggtgcaggcttcctggcagaagatggtgactggagtggccagtgccctgtcctccagataccactgagctcactgcccatgatgcagagctttcaaggataggctttattctgcaagcaatcaaataataaatctattctgctaagagatcacaaaaaaaa

SEQ ID NO: 353429 - DNA, 438 bp, Homo Sapiens
  misc_feature (111)..(111): n is a, c, g, or t
  misc_feature (261)..(261): n is a, c, g, or t
  misc_feature (267)..(267): n is a, c, g, or t
  misc_feature (270)..(270): n is a, c, g, or t
  misc_feature (272)..(272): n is a, c, g, or t
ggagagggggaggttggttccttgggggccaaagaaggcagggaatgcctggagggtaactggggggccacccatgaccccttctctctccagaaacagctgcttctcccncccatcccagggtcccacccccaacccccagaggtggcccttgtttacagtgaggactcggccactgtgtctctgtttcctgaaatataaactgtagcgaccccagactgtagagatttttatgtgtttggatacatctgctgtgtggcncacccnccncnctacaaaaaccctaattttgtacatactgtatttttactattgaactgtattctagtggctgttcatgctccaagactttagttaccgagacatgaatactatccatgtaataagcacttgcctggaataaaatataaaactgaaataaacctgcactgaaacctg

SEQ ID NO: 353430 - DNA, 975 bp, Homo Sapiens
ctgcgccccttttgagtcgctagtgaatacacatcaggttagtccagggtactgcctcttaaggggttacacggttctcttgtggaagtggagaaatccagtggaagcagtggtcattgattcttgaaaatgcgtactgccttcaccttttcacagaagattatataacggtccataatccaccagtgaaaacagcaatgccccaaaggtaactgagggctgcttaaaatatgtcaaattctgcttgtttaatttctaaagtgaactttaagttgtgaaaagcatgattatacaggcctctcaggctgagtgctactttggtaaagttcccagttttcctgccttctgtgacaggatgaatgaggtgggtatggacagtggaggcagctggaatggcaagtgcagaaaataggaacagttctatacagtgctctcatttactaataacataatgccttctaaataatttttttgggaaactacattatcacaaaattatacaaatttttttacaagtatttacatactgtatctgaaaacagactttaaagtcacaggattataaatgtacatatgtattctcacattctgaaaaataacattctcagaatccacagaaaatatacttagttactactgaagataatttttgaaatgtaaaaattagatttaaatagtatattttaaatgacagaactataattacagagatcagatcagataggtaaactgcaagatagataggatgaaacttttggcctactgtattacttacagagtttttttgtgtgtggtttttaaaactgttaaggcaagaagtgtcaaatgctttagagttaaataacagatcactgatttcaaagacttggtgtatagtgttaaaaattaaagcttaaaaggtggttagaaaagtggattaatgcaaaaggggtaataaagactgcaacattctcaggaccaaattaaactgctaaa

SEQ ID NO: 353431 - DNA, 1809 bp, Homo Sapiens
atgttttgatttatctgggagaaaactgtggtgcacagcttgtgaggagggcaaggttgtgacgttcgagcttagttctggtgttattctgtctcctcttctttgtcatcagccaaaacgtggtttttaaagagagtcatgcaggttagaaataatgtcaaaaatatttaggaatttaataacctttaagtcagaaactaaaacaaatactgaaatattagctcttcctacacttcgtgttcccctttagctgcctgaaaatcaagattgctcctactcagatcttctgagtggctaaaacttatggatatgaaaaatgagattgaatgatgactatgctttgctatcattgttacctttcctcaatactatttggcaactactgggactcttcagcacaaaaggaatagatctatgattgaccctgattttaattgtgaaattatatgattcatatattttatgaatcagaataaccttcaaataaaataaatctaagtcggttaaaatggatttcatgattttccctcaggaaaatgagtaacggagtccacggcgtgcaatggtaattataaattggtgatgcttgtttgcaaattgcccactcgtgataagtcaacagccaatatttaaaactttgttcgttactggctttaccctaactttctctagtctactgtcaatatcattttaatgtaattgattgtatatagtctcaagaatggttggtgggcatgagttcctagagaactgtccaagggttgggaaaatccaaattctcttcctggctccagcactgattttgtacataaacattaggcaggttgcttaacctttttatttcaaactctctcaactctaaagtgctaataataatctcagttaccttatctttgtcacagggtgttcttttttatgaagaaaaatttgaaaatgataaaagctaagatgccttctaacttcataagcaaacctttaactaattatgtatctgaaagtcacccccacataccaactcaacttttttcctgtgaacacataaatatatttttatagaaaaacaaatctacataaaataaatctactgtttagtgagcagtatgacttgtacatgccattgaaaattattaatcagaagaaaattaagcagggtctttgctatacaaaagtgttttccactaattttgcatgcgtatttataagaaaaatgtgaatttggtggttttattctatcggtataaaggcatcgatattttagatgcacccgtgtttgtaaaaatgtagagcacaatggaattatgctggaagtctcaaataatatttttttcctattttatactcatggaagagataagctaaagaggggacaataatgagaaatgttggtgtgcttttctaagcatttaaaacataattgccaattgaaaccctaaatatgtttacataccattaagatatgatccatgtaacaatgttaaattaattataatgggattgggtttgttatctgtggtagtatatatcctagtgttcctatagtgaaataagtagggttcagccaaagctttctttgttttgtaccttaaattgttcgattacgtcatcaaaagagatgaaaggtatgtagaacaggttcacgtgattacctttttcttttggcttggattaatattcatagtagaactttataaaacgtgtttgtattgtaggtggtgtttgtattatgcttatgactatgtatggtttgaaaatattttcattatacatgaaattcaactttccaaataaaagttctacttcatgtaatcc

SEQ ID NO: 353432 - DNA, 3297 bp, Homo Sapiens
  misc_feature (2735)..(2828): n is a, c, g, or t
  misc_feature (2985)..(3208): n is a, c, g, or t
agcggggagtcccccaagagcggatgccgcggcgggcctgtgggagcggggtcatcttctctctgctgctgtagctgccatgggcaaaagagaccgagcggaccgcgacaagaagaaatccaggaagcggcactatgaggatgaagaggatgatgaagaggacgccccggggaacgaccctcaggaagcggttccctcggcggcggggaagcaggtggatgagtcaggcaccaaagtggatgaatatggagccaaggactacaggctgcaaatgccgctgaaggacgaccacacctccaggcccctctgggtggctcccgatggccatatcttcttggaagccttctctccagtttacaaatatgcccaagacttcttggtggctattgcagagccagtgtgccgaccaacccatgtgcatgagtacaaactaactgcctactccttgtatgcagctgtcagcgttgggctgcaaaccagtgacatcaccgagtacctcaggaagctcagcaagactggagtccctgatggaattatgcagtttattaagttgtgtactgtcagctatggaaaagtcaagctggtcttgaagcacaacagatacttcgttgaaagttgccaccctgatgtaatccagcatcttctccaggaccccgtgatccgagaatgccgcttaagaaactctgaaggggaggccactgagctcatcacagagactttcacaagcaaatctgccatttctaagactgctgaaagcagtggtgggccctccacttcccgagtgacagatccacagggtaaatctgacatccccatggacctgtttgacttctatgagcaaatggacaaggatgaagaagaagaagaagagacacagacagtgtcttttgaagtcaagcaggaaatgattgaggaactccagaaacgttgcatccacctggagtaccctctgttggcagaatatgacttccggaatgattctgtcaaccctgatatcaacattgacctaaagcccacagctgtcctcagaccctatcaggagaagagcttgcgaaagatgtttggaaacgggcgtgcacgttcgggggtcattgttcttccctgcggtgctggaaagtccctggttggtgtgactgctgcatgcactgtcagaaaacgctgtctggtgctgggcaactcagctgtttctgtggagcagtggaaagcccagttcaagatgtggtccaccattgacgacagccagatctgccggttcacctccgatgccaaggacaagcccatcggctgctccgttgccattagcacctactccatgctgggccacaccaccaaaaggtcctgggaggccgagcgagtcatggagtggctcaagacccaggagtggggcctcatgatcctggatgaagtgcacaccataccagccaagatgttccgaagggtgctcaccatcgtgcaggcccactgtaagctgggtttgactgcgaccctcgtccgcgaagatgacaaaattgtggatttaaattttctgattgggcctaagctctacgaagccaactggatggagctgcagaataatggctacatcgccaaagtccagtgtgctgaggtctggtgccctatgtctcctgaattttaccgggaatatgtggcaatcaaaaccaagaaacgaatcttgctgtacaccatgaaccccaacaaatttagagcttgccagtttctgatcaagtttcatgaaaggaggaatgacaagattattgtctttgctgacaatgtgtttgccctaaaggaatatgccattcgactgaacaaaccctatatctacggacctacgtctcagggggaaaggatgcaaattctccagaatttcaagcacaaccccaaaattaacaccatcttcatatccaaggtaggtgacacttcgtttgatctgccggaagcaaatgtcctcattcagatctcatcccatggtggctccaggcgtcaggaagcccaaaggctagggcgggtgcttcgagctaaaaaagggatggttgcagaagagtacaatgcctttttctactcactggtatcccaggacacacaggaaatggcttactcaaccaagcggcagagattcttggtagatcaaggttatagcttcaaggtgatcacgaaactcgctggcatggaggaggaagacttggcgttttcgacaaaagaagagcaacagcagctcttacagaaagtcctggcagccactgacctggatgccgaggaggaggtggtggctggggaatttggctccagatccagccaggcatctcggcgctttggcaccatgagttctatgtctggggccgacgacactgtgtacatggagtaccactcatcgcggagcaaggcgcccagcaaacatgtacacccgctcttcaagcgctttaggaaatgatgcttaggcagggtacttcgttcaagaccggcgcttggcacccttgttggaaagggattttcagcataacattttccttccacctctttgaccttccctccagcgttggccaaattgtgctgaggaagatgcatcaagggcttggctgtgccttcataggtcatctagggttttataaaggaggaggagacaatattttttcaaactttttggggagtggggtcatttctgtatataaaaaatgttaatatttaaggtgtatttatgttaccgttctgaataaacagaatggaccattgaaccagtnnnnnnnnnnnnnnnnnnnnnnnnnnnnnnnnnnnnnnnnnnnnnnnnnnnnnnnnnnnnnnnnnnnnnnnnnnnnnnnnnnnnnnnnnnnnnngaagaacaaagaaagaggggggcggccccgggacgccgcgacccgcgaggagatgcagccgacagcggacgcccgcgacagagggggaggtagacgacggacggggcacaaaacaaaagagagaccgaaaaacaacgtcacgaagcgagaagaggannnnnnnnnnnnnnnnnnnnnnnnnnnnnnnnnnnnnnnnnnnnnnnnnnnnnnnnnnnnnnnnnnnnnnnnnnnnnnnnnnnnnnnnnnnnnnnnnnnnnnnnnnnnnnnnnnnnnnnnnnnnnnnnnnnnnnnnnnnnnnnnnnnnnnnnnnnnnnnnnnnnnnnnnnnnnnnnnnnnnnnnnnnnnnnnnnnnnnnnnnnnnnnnnnnnnnnnnnnnnnnnagaaacgaaacgggaaggcgagggcgagagacaaaggagaaggaggacggcgagagagaagaaagagggggagcgggcacgcaaggaga

SEQ ID NO: 353433 - DNA, 460 bp, Homo Sapiens
  misc_feature (383)..(383): n is a, c, g, or t
ggtggcaatcaaaaccaagaaacgaatcttgctgtacaccatgaaccccaacaaatttagagcttgccagtttctgatcaagtttcatgaaaggaggaatgacaagattattgtctttgctgacaatgtgtttgccctaaaggaatatgccattcgactgaacaaaccctatatctacggacctacgtctcagggggaaaggatgcaaattctccagaatttcaagcacaaccccaaaattaacaccatcttcatatccaaggtaggtgacacttcgtttgatctgccggaagcaaatgtcctcattcagatcttcatcccatggtgggctccagggcgttcagggaagcccaaaggcttaggggcggggtgctttcgagctnaaaaaaggggatggtttgcagaaggagttacaattgccttttttctaattcactggtattcccgggggcacacaggt

SEQ ID NO: 353434 - DNA, 905 bp, Homo Sapiens
aaccccaagcaaactggttgtttaaggtttccaggaacccttttttggggaaatggttttttccttttaccaagtttttacagagatgttagggtatatcccatgaatgcaattttggcattttaatttccaacgtatccctgtagttttaattcctcattgttcttaaaagactgttgatactataaacatcagtgaatcattatattttaaaacagaaaagggcttctcagataccctccatctactggcccatcccctctcctaaacaaaactccttcaaaacaggttaaaaaaaatatgttgtcatgaatcttcacagtaacatttcagaaaggtgcttttttggtactcttcatgggaacagtttagcagccatgagtgatcttcctttgaaagagaatgaaagaccctgtgacatttcacttcaaaaataagccctgtagctctttacggtcgcatagtataaaattataccctgcatgctgaccctcgcttggaatggaatgccagaaatgcatggcagcagctaataagtaaagctgattaactatttatttgtcaatgttattatttaatgagctttcacatgtgatttgtttcaaaactttaattttttaatgttttgaaactttttcatggacctaaatattttcctatatgatttgtggttgattagaaatatgaaatacatgttgtagatatgtaaaatgaatattttagtctccttattacatatatgttcatggtgaactttatcaatagtatggatctttttaaatcaataagatgctttgtaaagttgaaataagtaatactttcttgtttaatctgtgcaatcagaaggtgtcttgaccttcaattcaattggtttcttttaacaaaaataaacactgctaaaagtt

SEQ ID NO: 353435 - DNA, 457 bp, Homo Sapiens
gtccacatcttcatgaaccctcagactctggagttgggtgtcggcttttttagccagcttttgtgggaattgcctttgacctattaaagaaggaaagtgggtaatggagtcccagccactcaagagactggatatcccccgagaatggcttgggttaccagctatggacccttggaagatgaatctaatccttctcactggtttttctttgcaaattcatttgcttttatttttctaataacaataaactctattttccatgttctcagggcccctgggtagacagacacagcttgatttcagagcagacataggcgaagaaaacatggcattgagtgtgctgagtccagacaaatgttatttatatacacatccaaatttgaagagaaaatgtatttctttaggtttcaaacactgtaatagatataaagcaaaaataaaaacctgttgcaaagtt

SEQ ID NO: 353436 - DNA, 780 bp, Homo Sapiens
tacaccatttcagggtagtaaacatggccctaaacaaaaagaaaactctgtcagttttgtacctgttgtgatacaatcaatcctttgcacttggtgtttctgaaacaatgtgttgccagcattgattctttcctaagaagtaagcagatcctaataatctgctggaacatataaataaaattagaaggctgtggagggcagcaaatttacttaaatagtgaccccataaatgtgtcatctgtaaataatcttttaaattaatcgtaggctactcctttttaaacatttaattttttatatatatatatttctattggtataaaatgcatagaattaattactaaaaacactgaaacttgtggggaaaattaagtccttcattttcagtgtgactaaaaatgtactgctggtttttactttatgatctaatactgtaatttttaaaatcaatttcaggcacatttatttcattgatgattattaaataaaacactgcttgtgttaatggagtgaagaaaacttatccattattagcttattgtgaacgctgtactagagctgtactagtggtatacaattcatttatcaaagaaacgctgtaaatccaaaacatctagagttttacactccaatgctttgtactgtttattccagtaaatgctgtaagattatattccagatttttaaggaaaaaagttaagtcaagcctgcaagatacagctttctcaagtgtctacaatgccagtatgaaaataaaaaattaagttacactgatacacc

SEQ ID NO: 353437 - DNA, 1113 bp, Homo Sapiens
  misc_feature (448)..(509): n is a, c, g, or t
gcggccgcagcagcgccgcctcgtcccccgccgccggccgctcgcccgccgaccaccgcggcgacgccagcctgcgcgccgactcgcccgccccgtccagcgcgccctcgcacgcgtcctcctcggcctcgtcccactcctcctcgtccttctcctcgggctcctcgtcctccgacgacgagttcgaagacgacctgctcgacctgaaccccagctcaaactttgagagcatgtccctgggcagcttcagttcgtcgtcggcgctcgaccgggacctggattttaacttcgagcccggctccggctcgcacttcgagttcccggactactgcacgcccgaggtgagcgagatgatctcgggagactggctcgagtccagcatctccaacctggttttcacctactgaagggcgcgcaggcagggagaagggccggggggggtaggagnnnnnnnnnnnnnnnnnnnnnnnnnnnnnnnnnnnnnnnnnnnnnnnnnnnnnnnnnnnnnnggaaaaacgaaagaaaacagtaagcagggctggcttcgcccgcgttctacgtcgtcggatcaaggagcgcggcggcgtatgggacccgagctcccataccccaaccttcccgggccggggacccactctgcccagccggagggacgcggaggcaggaaagagggtagcacaggggcgaaccgtgtgaataggtacgtaatggacagtccgtgagtcgaatggcaacaaaacaaaacaggcagactccaaaattggcccccctttggcctggaagaagaccccctcacccactatcacaagcgagagcacatcccccggaccttggtcacgtggaccccgcccccaacagaaacacagccaaggggcccgcgaataggagctcatgagcctaagagagacccttcgtcaccggacgacgacattcatccccccccgatatcccggtgcagttccaccagagcagtgggcgaagaaggagagaaaatgaaggaggctgtactgtggggccacacacgcacaaggcggcagcgcgggacgaaaccaccagggcgacacaccccgtgcccccgccatgttgatagttaaagaacgagcggtgaacgca

SEQ ID NO: 353438 - DNA, 736 bp, Homo Sapiens
agcggatgtgctgtttttgaagcatttttaaaaacgaatgtagttgtttttcttcatttaaaatggatctgtggaggttatgtgtgtatgttgtagttttattgcagccacaataattttaccaaagttttcacataggcagttagcctttacttaatatcaagacaagtgaaaaaatattggcatcgatgaaaccgataacattggcctcattggatttctttacccattcacagtgtaaagaagttaccttcatgctttcattgtacctgcaggcctgtgggcttgtacagtagataattaatttctaaaaagaacagctgcctattttcttcctaggttaggttatatcttcataatcacaagaattagtgatggcaaaataaaattttgcttatgaatcttttacattgtttatatatgattaatatcatcatatatattttctgtattaagctcatttggcttcatttaagctgtatacttagtcatatatctttcattagttctatggatatgagcagatccctttactggagcccagtatgtgctgtgtgagttagaagtcattcttgctgagaaggtgaataggtagggatttgccttgttttgtaagtctacaatttgccaagagtaaataacactggaccagctgtaaaagtaaacagtgtgtttatgcattgagatactaaagcatttaagaaaaaattaaaagatctcttttgtttaaaaaaaa

SEQ ID NO: 353439 - DNA, 568 bp, Homo Sapiens
  misc_feature (41)..(90): n is a, c, g, or t
aagacaaacactcctctttgagtttcctctctcttgctctnnnnnnnnnnnnnnnnnnnnnnnnnnnnnnnnnnnnnnnnnnnnnnnnnnaatagcagtgcatatattacatatgcttcaaaaatattcttaaagtttcacctacacagcaccacataattttaaacatagcaaccagacaggatgagtaagagtatctagaagactcatttgagctttttagaatgtacaatgagtgatctggtgaacgaataatcatttcttcaaaatcatctagattcatttacattaaactctgagctcacagctagtagtcttctaattgaaatgatacaaaactcatggcttaagtctcatacactatcttctttcatgagttcaacagttagagacctagtaggctttattcttcattctgaggagattcctgtcactttcaaataattatgccatttgccaaatgaaaaatgttacctgaaaagtggatgaccacctccaaggtattagatagcttctctcttatattttcagcaaatttactcagaaaaatccactactttaatgttgc

SEQ ID NO: 353440 - DNA, 764 bp, Homo Sapiens
  misc_feature (90)..(139): n is a, c, g, or t
  misc_feature (475)..(522): n is a, c, g, or t
tctggttgctatgtttaaaattatgtggtgctgtgtaggtgaaactttaagaatatttttgaagcatatgtaatatatgcactgctattnnnnnnnnnnnnnnnnnnnnnnnnnnnnnnnnnnnnnnnnnnnnnnnnnnagagcaagagagaggaaactcaaagaggagtgtttgtcttaagacctgttcatactggtatattggtgagacttctcacttctggttggaggtttcacatatggctcaactcaagtcattaatctctttttaatttttactcttgaattccttaaacttcgctcattatgaaatgttttaaaattatgacaaaaattactctgcctaaccacttgccttgtctgctaccagtttgttaaaaattattccccccaaccagtaattccaccagtactacttgatttgtgttatatttcctatgtacatgtacagcctttgttttgcttgcttgtctannnnnnnnnnnnnnnnnnnnnnnnnnnnnnnnnnnnnnnnnnnnnnnnagaaggaatatacagaagtaaaatcttgtcttctctgctgattctttaattaatatgagccggatactttccactgtcttcttggcactttcaggatttcttaatgctgatatatggactcttagaatggaatttttgaagaaaaatctcaaagcctgtatcgttcttgaaggtcacatgtacctattgtgaaaatgtgaagctgtatttctgaagctgaaataaattataacatttgaagg

SEQ ID NO: 353441 - DNA, 975 bp, Homo Sapiens
  misc_feature (627)..(672): n is a, c, g, or t
tccttcaaatgttataatttatttcagcttcagaaatacagcttcacattttcacaataggtacatgtgaccttcaagaacgatacaggctttgagatttttcttcaaaaattccattctaagagtccatatatcagcattaagaaatcctgaaagtgccaagaagacagtggaaagtatccggctcatattaattaaagaatcagcagagaagacaagattttacttctgtatattccttcttcaaacaaagcaaaagaaaaatttgacccaaaaaagggaaagtaaaaatagacaagcaagcaaaacaaaggctgtacatgtacataggaaatataacacaaatcaagtagtactggtggaattactggttggggggaataatttttaacaaactggtagcagacaaggcaagtggttagacagagtaatttttgtcataattttaaaacatttcataatgagcgaagtttaaggaattcaagagtaaaaattaaaaagagattaatgacttgagttgagccatatgtgaaacctccaaccagaagtgagaagtctcaccaatataccagtatgaacaggtcttaagacaaacactcctctttgagtttcctctctcttgctctnnnnnnnnnnnnnnnnnnnnnnnnnnnnnnnnnnnnnnnnnnnnnnaacaaatagcagtgcatatattacatatgcttcaaaaatattcttaaagtttcacctacacagcaccacataattttaaacatagcaaccagacaggatgagtaagagtatctagaagactcatttgagctttttagaatgtacaatgagtgatctggtgaacgaataatcatttcttcaaaatcatctagattcatttacattaaactctgagctcacagctagtagtcttctaattgaaatgatacaaaactctggcttaagtctcgatacactatcttctttcatgagttaaacaggtcc

SEQ ID NO: 353442 - DNA, 408 bp, Homo Sapiens
  misc_feature (25)..(25): n is a, c, g, or t
  misc_feature (54)..(70): n is a, c, g, or t
  misc_feature (292)..(292): n is a, c, g, or t
  misc_feature (321)..(321): n is a, c, g, or t
  misc_feature (335)..(335): n is a, c, g, or t
  misc_feature (349)..(349): n is a, c, g, or t
  misc_feature (375)..(375): n is a, c, g, or t
  misc_feature (381)..(381): n is a, c, g, or t
  misc_feature (392)..(392): n is a, c, g, or t
aggtgaaactttaagaatatttttnaagcatatgtaatatatgcactgctattnnnnnnnnnnnnnnnnnctttgtatatatgaaagaatgtgtgtatgtgtgagagcaaaagagaggaaactcaaagaggagtgtgtgtcttaagacctgttcatactggtatattggtgagacttctcacttctggttggaggtttcacatatggctcaactcaagtcattaatctctttttaattttaactcttgaattccctaaacttcgctcattatgaaatgttttaaaattatgncaaaaattactctgtctaaccccttgccntgtctgctacccgnttgttaaaaattantcccccccacccggaattccccccgnaccacntggtttggggnaaattcccctgggaca

SEQ ID NO: 353443 - DNA, 432 bp, Homo Sapiens
  misc_feature (8)..(8): n is a, c, g, or t
  misc_feature (22)..(22): n is a, c, g, or t
  misc_feature (66)..(66): n is a, c, g, or t
ccaaaagncactatcacatggnctgtaaatgcatatgcatgatttcctaaactgttttagaactcnccttaacaatctcaactaccctatttttccctgttccctggtgccacaggctgacaactgcagtctccagtttagaataaatattccatagtggtgacatgtcagctgcccactgatactcctttggaaaatggtgcgctgtggatcaagacactttggtatgatgcatatacaagttggaagactaaagaggtgcagtgtgatctgagcctccatcattgtcctccacaaacatattttcatattctttatgtggaagaatagattttaaagtacaagccaaatgattttcattggtggaactgacacaaaaaaagtaacttaaaaacaagaaacttggttattgaataaacagataagtttaaa

SEQ ID NO: 353444 - DNA, 1814 bp, Homo Sapiens
catcctcaagctcccaagaggaggagctgttccattggctcccgagggctctgaaatgacccccctcccatgaaacatgggggccgaggggtgtcccttttagggcaacagggccttccttcagatgcctaacattctgggtgtctggagggggttcaagcttcacattttccccttgaaaggacacatgcgctggcagaaatgagggtggacagtaacaaagagcacttggcagctggaaacatcacctacatagactcagctgggcccgcagcggaagggaggcacattttgggaaagaaacacgcttcagtgcattgccaaacaattctaccctggtttcattaaaatctttcccgatattaccagcaggaaaacaaaagcaatctccccacagcccacccccaaaacttgacaaccaaattaatcacatttgcaacaaaatttggataatacgatgggtgcttgccacagatttttaggaacatgataaagtcttcctcccttctgcagagagctgatatggagaccatcttcgccagtgggatcctagtgggcaatgaatgagccctgccctgaccacgtcccacgcctggatgtccgtcacgcggctaacttgacctggcgggtctaaggaaagtcaacttccaggaagaaccgacacgggcactcttagaggccatgcatctccgtcttgagaggtgtgtgtgtaaaattatagatgtgtctatatgcacatgcatggatactttatgtatatgcgtgggtgaagtcatttttactaatgagctcatattcatctccggagcacacaggcaggtctttgggggtgggggacacctactgccagagcggggtgttctgagccccttgctaaggactggtttagatcacgtcgtaaacaagaggaagacaaactctatgttgagcccagcgatatgcattccaagggaatggctctgttttacattcacagtgttatttcttacaaatgtaaacatctagccaggaacaacatctggcctgtgatactgctgtctcagagctgctgacataacctgcgggggaggcgggaggcgggtggggagcagccaacagttctgagaactttcccctcgttcccaaaccttctagcgggctttccaggaaaaagctaggatgagaaacaggagcccccaaccaatacggaagaatggtgattttcttacgtgttataattcagtagcttcccttaagggcctcctcaaacatcggacccctttctaccgctcctgctgccccgccacgaggacgaggtggtcctggctgggggaggcctctgttgggagctggtgggaaaagcctcatacaggcctggcagaggctgctcagaggaggggctccctttcagctccccctcacgtatgtgggcagcatacaagtccacatctcagctgctccccagctgccacataggagagggacaggtggaagcttgggggtctcaaggcagcacctgcacagagttccaacatttcctccacttaccacattcaatacccaaaacatcgacgggcatgaccaaaccaagccacatgacagtcgccaaccttgcctggctcgcctctagggctgaggaagcagagcccctgcctcgtctcacagccagtcagcaagcagagctcccaaatccagctcctacatcagcagcagcccggccatccagaatccacttccattttaatgacttggctcctctgggcctgcaaacaggaggctggtccagggacctggcctggggataggagtggcggctctgacagggccgtggggcc

SEQ ID NO: 353445 - DNA, 451 bp, Homo Sapiens
aaaaaatgaaaaaacactcatgagataactgcatttcacccaacaaaagcagggtataaggcgatattggtgatgaaagtcttaggaaaaatgcataattttgctataaaatgtacttatttggaatactattttatatagaggtaagagaacactgctggggaatatgctttttatggttgctgttgccatatttactgaaggtttatacctaaatgtaactttagctttatggaactatatagtaatcccaaatcaagttattttgaatatttttatgctgtcatgcttgaatgttttagatgtaacctttgacatatttagaactctcctcctatacaatgtttattctcagatatagaggttatgtcattttataaagacttcattgataagatggcttttattcatactaatcctcccaatgttaccccttccatcttccaagaag

SEQ ID NO: 353446 - DNA, 2960 bp, Homo Sapiens
  misc_feature (22)..(22): n is a, c, g, or t
  misc_feature (25)..(25): n is a, c, g, or t
  misc_feature (34)..(34): n is a, c, g, or t
  misc_feature (101)..(153): n is a, c, g, or t
  misc_feature (249)..(267): n is a, c, g, or t
atccgccctgcccgcagcctcnccnccccttccnccccgccgccacggccccgtagtgctcggggacccaccttccacctagcacgggttcgtgcccctcnnnnnnnnnnnnnnnnnnnnnnnnnnnnnnnnnnnnnnnnnnnnnnnnnnnnnttctcccggggagggggtcaggtgggcgggcactattgttgtaggagccggcgccagattcctcagccgcgctcggggtgggaccggctgggtttnnnnnnnnnnnnnnnnnnnagcggtgatctgagctccgagcagctggtcttcgcggctcgctccctccttcgcgctctctcgctccctgccgccgcccgcaggtcggcggggctcggtggcatctcccgggcgcggcccgcagtccttgcccctgcctccgggccgctcccgcccccggcgccgctcgctcccccgacccggactcccccatgtatgacgactcctacgtgcccgggtttgaggactcggaggcgggttcagccgactcctacaccagccgcccatctctggactcagacgtctccctggaggaggaccgggagagtgcccggcgtgaagtagagagccaggctcagcagcagctcgaaagggccaagcacaaacctgtggcatttgcggtgaggaccaatgtcagctactgtggcgtactggatgaggagtgcccagtccagggctctggagtcaactttgaggccaaagattttctgcacattaaagagaagtacagcaatgactggtggatcgggcggctagtgaaagagggcggggacatcgccttcatccccagcccccagcgcctggagagcatccggctcaaacaggagcagaaggccaggagatctgggaacccttccagcctgagtgacattggcaaccgacgctcccctccgccatctctagccaagcagaagcaaaagcaggcggaacatgttcccccatatgacgtggtgccctccatgcggcctgtggtgctggtgggaccctctctgaaaggttatgaggtcacagacatgatgcagaaggctctcttcgacttcctcaaacacagatttgatggcaggatctccatcacccgagtcacagccgacctctccctggcaaagcgatctgtgctcaacaatccgggcaagaggaccatcattgagcggctcctctgcccgctccagcatttgcggaagtgcaaaagtgagatcgagcgcatatttgagctggccaaatccctgcagctagtagtgttggacgctgacaccatcaaccacccagcacagctggccaagacctcgctggcccccatcatcgtctttgtcaaagtgtcctcaccaaaggtactccagcgtctcattcgctcccgggggaagtcacagatgaagcacctgaccgtacagatgatggcatatgataagctggttcagtgcccaccggagtcatttgatgtgattctggatgagaaccagctggaggatgcctgtgagcacctggctgagtacctggaggtttactggcgggccacgcaccacccagcccctggccccggacttctgggtcctcccagtgccatccccggacttcagaaccagcagctgctgggggagcgtggcgaggagcactccccccttgagcgggacagcttgatgccctctgatgaggccagcgagagctcccgccaagcctggacaggatcttcacagcgtagctcccgccacctggaggaggactatgcagatgcctaccaggacctgtaccagcctcaccgccaacacacctcggggctgcctagtgctaacgggcatgacccccaagaccggcttctagcccaggactcagaacacaaccacagtgaccggaactggcagcgcaaccggccttggcccaaggatagctactgacagcctcctgctgccctaccctggcaggcacaggcgcagctggctggggggcccactccaggcagggtggcgttagactggcatcaggctggcactaggctcagcccccaaaaccccctgcccagccccagcttcagggctgcctgtggtcccaaggttctgggagaaacaggggaccccctcacctcctgggcagtgacccctactaggctcccattccaggtactagctgtgtgttctgcacccctggcaccttcctctcctcccacacaggaagctgccccactgggcagtgccctcaggccaggatccccttagcagggtccttcccaccagactcagggaagggatgccccattaaagtgacaaaagggtggggtgtgggcaccatggcatgaggaagaaacaaggtccctgagcaggcacaagtcctgacagtcaagggactgctttggcatccagggcctccagtcacctcactgccatacattagaaatgagacaatcaaagcccccccagggtggcacacccatctgtttgctggggtgtggcagccacatccaagactggagcagcaggctggccacgctcgggccagagagagctcacagctgaagctcttggagggaagggctctcctcaccctgccaggaagcttcttaacatgtgacaggaccagggaccaggagcatggtgaagccaagtggcagatgggagccaacctggatgggggtttggggaaggagggcatgtgtagcagagaacttaggggggcctccttgcctttctcattcttttgccctgcatcctgtcatttctgttcttgtccctcatacatctttggagaaccgggctccagactttgttccctgactcatagctgccgcttgttaggttagggttagatggggagagacagggcacagaggacctgtctccccggctactcttgccttatggctctagtgtgtgacctacagagcatgctccacaagcccctgcctcacctcactgtcatcactaataaacatcatgcacagtccc

SEQ ID NO: 353447 - DNA, 1026 bp, Homo Sapiens
  misc_feature (11)..(11): n is a, c, g, or t
  misc_feature (20)..(20): n is a, c, g, or t
  misc_feature (948)..(948): n is a, c, g, or t
  misc_feature (950)..(950): n is a, c, g, or t
  misc_feature (973)..(973): n is a, c, g, or t
  misc_feature (986)..(986): n is a, c, g, or t
  misc_feature (989)..(989): n is a, c, g, or t
  misc_feature (996)..(996): n is a, c, g, or t
  misc_feature (1002)..(1002): n is a, c, g, or t
  misc_feature (1010)..(1010): n is a, c, g, or t
  misc_feature (1018)..(1018): n is a, c, g, or t
  misc_feature (1023)..(1023): n is a, c, g, or t
gtttattaatnatgacattnaggtcaggcaggggcttgtggagcatgctctgtaggtcacacactagagccataaggcaagagtagccggggagacaggtcctctgtgccctgtctctccccatctaaccctaacctaacaagcggcagctatgagtcagggaacaaagtctggagcccggttctccaaagatgtatgagggacaagaacagaaatgacaggatgcagggcaaaagaatgagaaaggcaaggaggcccccctaagttctctgctacacatgccctccttccccaaacccccatccaggttggctcccatctgccacttggcttcaccatgctcctggtccctggtcctgtcacatgttaagaagcttcctggcagggtgaggagagcccttccctccaagagcttcagctgtgagctctctctggcccgagcgtggccagcctgctgctccagtcttggatgtggctgccacaccccagcaaacggatgggtgtgccaccctgggggggctttgattgtctcatttctaatgtatggcagtgaggtgactggaggccctggatgccaaagcagtcccttgactgtcaggacttgtgcctgctcagggaccttgtttcttcctcatgccatggtgcccacaccccacccttttgtcactttaatggggcatcccttccctgagtctggtgggaaggaccctgctaaggggatcctggcctgagggcactgcccagtggggcagcttcctgtgtgggaggagaggaaggtgccaggggtgcagaacacacagctagtacctggaatgggagcctagtaggggtcactgcccaggaggtgagggggtccctgtttctcccagaaccttgggacacaggcagcctgaagcggggctgggcagggggttgggggctgagctagtgcagcctgatgcagtctangncacctgcctggagtgggccccanccactgcgctttnctnccagggnaggcanaggaggtntaatagtntcttnggc

SEQ ID NO: 353448 - DNA, 1272 bp, Homo Sapiens
  misc_feature (20)..(20): n is a, c, g, or t
  misc_feature (29)..(29): n is a, c, g, or t
  misc_feature (51)..(51): n is a, c, g, or t
  misc_feature (64)..(64): n is a, c, g, or t
  misc_feature (98)..(98): n is a, c, g, or t
cccaagttaaggccaacaanaagctgttnaattaactaaccctttgggccnaaagcccggtttncgctgcccaattcccggttcaactgtggttgtgnctctgaatccctgggctaaaaagccggtcttgggggtccatgccccgttaagcactaaggcagccccgaaggtgtgttggcggtgaggctggtacaggtccctggtaggcatctgcatagtcctcctcccaggtggcgggaactacgctgtgaagatcctgtccaggcttggcgggaactctcgctggcctcatcagagggcatcaagctgtcccgctcaaggggggagtgctccttgccacgctccccccagcagctgctggttctgaagtccggggatggcactgggaggacccagaagtccggggccaggggctgggtggtgcgtggcccgccagtaaacctccaggtactcagccaggtgctcacaggcatcctccagctggttctcatccagaatcacatcaaatgactccggtgggcactgaaccagcttatcatatgccatcatctgtacggtcaggtgcttcatctgtgacttcccccgggagcgaatgagacgctggagtacctttggtgaggacactttgacaaagacgatgatgggggccagcgaggtcttggccagctgtgctgggtggttgatggtgtcagcgtccaacactactagctgcagggatttggccagctcaaatatgcgctcgatctcactctgcacttccgcaatgctggagcgggcagaggagcgctcaatgatggtcctcttgcccggattgttgagcacagatcgctttgccagggagaggtcggctgtgactcgggtgatggagatcctgccatcaaatctgtgtttgaggaagtcgaagagagccttctgcatcatgtctgtgacctcataacctttcagagagggtcccaccagcaccacaggccgcatggagggcaccacgtcatatgggggaacatgttccgcctgcttttgcttctgcttggctagagatggcggaggggagcgtcggttgccaatgtcactcaggctggaagggttcccagatctcctggccttctgctcctgtttgagccggatgctctccaggcgctgggggctggggatgaaggcgatgtccccgccctctttcactagccgcccgatccaccagtcattgctgtacttctctttaatgtgcagaaaatctcctcgtgccgaattcgccacccaggcctcgctacctta

SEQ ID NO: 353449 - DNA, 1998 bp, Homo Sapiens
  misc_feature (946)..(966): n is a, c, g, or t
  misc_feature (1951)..(1951): n is a, c, g, or t
  misc_feature (1988)..(1988): n is a, c, g, or t
gcagctcctccacccccaccacctgtgatccgaaatggtgccagggatgctccccctcccccaccaccataccgaatgcatgggtcagaacccccgagccgaggaaagcccccacctacaccctcaaggacgccagctgggccaccccctcctcctccaccgcccctgaggaatggccacagagattctatcaccactgtccggtctttcttggatgattttgagtcaaagtattccttccatccagtagaagactttcctgctccagaagaatataaacactttcagaggatatatcccagcaaaacaaaccgagctgcccgtggagccccacctctgccacccattctcaggtgaagcctggcttggtcccgttcctcaggaaaaggatggaccttctcttcttctcagatggtcccttccattcccctgaaacctgcatgagagctcctaacatgtttctccaatgcaatcaagccctagactccaaatgtcctcccagctcacctccatctatgcatctcatctctggatttggtgatcagactctatattgacagtaggatctcaaaccctgcatccatccttcctccagcaagccctgctagccacatgaggaacaagtttccgtgtcttctgccttcctcttggggaaaggtgccttgttgtgatgaattaactcactgttagggcagggtggagaatggtactccttccttctcctgtccactgtgggggaagcttggcaggtatattatatttcatcatttagggaggctggcatgaccaggacttatgggtgggaggggagcatttttagttgaagcaagaaagggagtttggccaagaagtgatctgtttttaaaggtcatatttggagaaagggcaaggaatttgggtctgctttatttttggggggtattttgtttttgttctcacctgctgnnnnnnnnnnnnnnnnnnnnngggataaattggatataaacactaaatactaatcagttgaacttaacatttaataaaaagaaagggtgaaataaactgaagaccattttagaactagtcagtcctctgcagcaaagggaacaggagccatttgaaccctctgggacccctcaccccactgcttcagggtgctaggctgagggatgtttttcctcccccttaccgcccatgcccttgaaagaaaagtcactttttgtggagggcatcattcattcctgattcacaaaccccaaaaacctctggtgggagataggaagatagggcgtgggcctgggccttaacctcaatcttgtgtctgcctcagtcttttctgactggccctgaagttgtcagtggctctgtctgtccttcagcccctggaaggtgctccaggataacaaagaagggcaggttgaagcccctcatggaaggagctggctttgtggggctgcaaaggacttttaagtcctgcctgtactgaagttcacagcccacctgactgagcagactcttcctgttcctttctctaccacccttgccttcccaggactgcacggtttaacacagcagagtacagaagggtgaagaagtgagcagaggcttatgaagatattcagatactcttctatgccaggaagcacaaagactttgttgagatttgcctcagttcagtagatcttccttggcagccagccataggttgtttctttgtcttccgggtcctaaagagcacagagaaaatggaggtccccagtctaggtaggaagctgattggatgaggacttctttttttccgacagcaggatggggctcttgggctccacacaccagatgctttggttttctacaactgttgctatgtgtagagggtgctcagagcgtggcatgagagcaaggagaccatggctactctttgaaatggatggggaaaattagcttaaaaatttaatcacgagattgcgccacntgcactccagcctgggtgacagagcttagctccgtcntcaaaaaaaa

SEQ ID NO: 353450 - DNA, 1009 bp, Homo Sapiens
  misc_feature (882)..(897): n is a, c, g, or t
ggggtcactcccaagatggcggacctactgggctccatcctgagctccatggagaagccacccagcctcggtgaccaggagactcggcgcaaggcccgagaacaggccgcccgcctgaagaaactacaagagcaagagaaacaacagaaagtggagtttcgtaaaaggatggagaaggaggtgtcagatttcattcaagacagtgggcagatcaagaaaaagtttcagccaatgaacaagatcgagaggagcatactacatgatgtggtggaagtggctggcctgacatccttctcctttggggaagatgatgactgtcgctatgtcatgatcttcaaaaaggagtttgcaccctcagatgaagagctagactcttaccgtcgtggagaggaatgggacccccagaaggctgaggagaagcggaagctgaaggagctggcccagaggcaagaggaggaggcagcccagcaggggcctgtggtggtgagccctgccagcgactacaaggacaagtacagccacctcatcggcaagggagcagccaaagacgcagcccacatgctacaggccaataagacctacggctgtgtgcccgtggccaataagagggacacacgctccattgaagaggctatgaatgagatcagagccaagaagcgtctgcggcagagtggggaagagttgccgccaacctcctaggcgccccgcccagctccctttgacccctggggcagggcagggggcagggagagacaaggctgctgctattagagcccatcctggagccccacctctgaaccacctcctaccagctgtccctcaggctgggggaaaacaggtgtttgatttgtcaccgttggagcttggatatgtgcgtggcannnnnnnnnnnnnnnnagagtgtgaatgcacaggtgggtatttaatctgtattattccccgttcttggaattttcttccccatggggctggggtactttacattcaataaatactgtttaacccaaaa

SEQ ID NO: 353451 - DNA, 1252 bp, Homo Sapiens
ttcccgagctgcccggtgcggatcgtagtgttgattggagggatgagaataccctgccgggtcctgattggccactgtctccgcctgcgttctcggagtagcttccctgcgggtgggctggagttcggcggcctggcgtagggcgcggccctgcagggctggtgggagcctccccggggctgctctgtgttgcagcttgggatgatactggcggaacgcaggaccccaactcccaaacctgcggaccttgaccacggacgagccctgtcccagctccccacgtgccccaggggaccagagcaggcaggacgccttccaagtattcaagggcctgctggttgcctacgacttcgtcccctttgtttcttgaacaaccgttagggaccagggagtacccctcagggaggccacagtccggggctggggcgctcattgatgcagtgatcacacgtaagtttaataaccaacttgataagtgctctgagagaaacacataactgtgagagcggccacctgaggttctcccccaatctgcagtgagccgagatcagaacaggtaattccgtaagatgagagagagaaggcaaaagcgttacaggcagacagagtctatttgaaatctctgagaaaggaggaagccatgatgggcaatggggaactggaattctctaaatgctccgatgactgtctaagtgggggatcacccgagcatggacagactgggaagcttaaatgagtcactcgcctgaggtcacatggtaagtttgaacagaccgcccgcctgaagaaactacaagagcaagagaaacaacagaaagtggagtttcgtacaaacggatggagaaggaggtgtcagatttcattcaagacagtgggcagatcaacgacacaaagtttcacgccaatgaacaagatcgagaggagcatactacatgatgtggtggaagtggctggcctgacatccttctcctttggggaagatgatgactgtcgctatgtcatgatcttcaaaaaggagttgcaccctcagatgacgagctagactcttaccgtcgtggagaggaatgggaccccccagaaggcctgaggagacgcggaacctgaacgagctggaccagaggcaacgaggaggagcgcagcccagcaaggggccgtggtggcgaagccctgacagcggacaacaagggacagtacagccaactcatcggcagggagcaacccaagaacccaccacatgctacagagcaaaccg

SEQ ID NO: 353452 - DNA, 1140 bp, Homo Sapiens
  misc_feature (51)..(51): n is a, c, g, or t
  misc_feature (1011)..(1026): n is a, c, g, or t
agcggactcccaagatggcggacctactgggctccatcctgagctccatgngagaagccacccagcctcggtgaccaggagactcggcgcaaggcccgagaacaggccgcccgcctgaagaaactacaagagcaagagaaacaacagaaagtggagtttcgtaaaaggatggagaaggaggtgtcagatttcattcaagacagtgggcagatcaagaaaaagtttcagccaatgaacaagatcgagaggagcatactacatgatgtggtggaagtggctggcctgacatccttctcctttggggaagatgatgactgtcgctatgtcatgatcttcaaaaaggagtttgcaccctcagatgaagagctagactcttaccgtcgtggagaggaatgggacccccagaaggctgaggagaagcggaagctgaaggagctggcccagaggcaagaggaggaggcagcccagcaggggcctgtggtggtgagccctgccagcgactacaaggacaagtacagccacctcatcggcaagggagcagccaaagacgcagcccacatgctacaggccaataagacctacggctgtggtgaggccacagtgcggctgggggtggctgggagaggagcatagggatgcggcaggagggcagtggaggctgaggtacagatttcctagggcccgccctaccctcctctctgtcccctagtggcccggtgggccaactaagagggacacacgctccatttgaaagaggctatgaaatgagatcagagccaagaaagcgttctgcggcagagtggggaagagttgccgcaaacctcctaggcgccccgcccagctccctttgacccctggggcagggcagggggcagggagagacaaggctgctgctattagagcccatcctggagccccacctctgaaccacctcctaccagctgtccctcaggctgggggaaaacaggtgtttgatttgtcaccgttggagcttggatatgtgcgtggcannnnnnnnnnnnnnnnagagtgtgaatgcacaggtgggtatttaatctgtattattccccgttcttggaattttcttcccccatggtggctggggtacctttacattcaactaaactactgtttaagccc

SEQ ID NO: 353453 - DNA, 1078 bp, Homo Sapiens
  misc_feature (483)..(592): n is a, c, g, or t
  misc_feature (936)..(936): n is a, c, g, or t
  misc_feature (945)..(945): n is a, c, g, or t
  misc_feature (961)..(961): n is a, c, g, or t
  misc_feature (982)..(994): n is a, c, g, or t
gtagcgaggcctgggtggcgaattcggcacgaggcttaaattcccgagctgcccgggcggatcgtagtgttgattggagggatgagaatacccgccgggtccgattggccactgtctccgcctgcgttctcggagtagcttccctgcgggtgggctggagttcggcggccggcgtagggcgcggccctgcagggcggtgggagcctccccggggctgctcgtgttgcagcttgggatgatactggcggaacgcaggaccccaactcccaaacctgcggaccttgaccacggacgagccctgtcccagctccccacgtgccccagggggaccagagcaggcaggacgccttccaagtattcaagggccgctgattgcctacgcttccatccccttgttccttgaacaaccgttagggaccaggggtacccctcagggaggccacagtccggggctggggcgctcattgatgcagtgatcacacnnnnnnnnnnnnnnnnnnnnnnnnnnnnnnnnnnnnnnnnnnnnnnnnnnnnnnnnnnnnnnnnnnnnnnnnnnnnnnnnnnnnnnnnnnnnnnnnnnnnnnnnnnnnnntgaagaaactacaagagcaagagaaacaacagaaagtggagtttcgtaaaaggatggagaaggaggtgtcagatttcattcaagacagtgggcagatcaagaaaaagtttcagccaatgaacaagatcgagaggagcatactacatgatggtggtggaagtggctggcctgacatccttctccttttggggaagatgatgactgtcgctatgtcatgatcttcaaaaaggagtttgcaccctcagatgaagagctagactcttaccccgtcggggaaaaggaatggggaccccccagaaaggctggaagaggaaccgggaaccttgaaaggagcctgggcccanaaggccaanaaggaaggaaggcacnccccacccacgggggcccctnnnnnnnnnnnnnaaaagccctggcccaagcgaacttacaaaggggacaaaggtacccggcccccccctccatccgggccaaggagaagcccccccc

SEQ ID NO: 353454 - DNA, 445 bp, Homo Sapiens
ggagcgccgcgtgtggctggaggagaaggagaaggtgatcgagtaccagaagcagctgcagctgagctacgtggagatgtaccagcgcaaccagcagctggagcgcaggctgcgggagcgcggggccgcagggggtgcaagcacgcccactccccagcatggcgaggagaagaaggcctggaccccctcccgcctcgagcgcattgagtccacagaaatctgatcgacctgggcactcggcattttgacacatgtcctgtcaaaaggccagagtccccagtgtcccctcccctccatctctcttccccatagaccccataaccccagaccaaagaggttctctaagcagctgtgaccaggttcctccctccccacctgccctcctagctccagcactgccccggtggcagcccacttggacccccctaaaaggagggattaggag

SEQ ID NO: 353455 - DNA, 1043 bp, Homo Sapiens
  misc_feature (969)..(969): n is a, c, g, or t
  misc_feature (983)..(983): n is a, c, g, or t
  misc_feature (985)..(985): n is a, c, g, or t
  misc_feature (995)..(995): n is a, c, g, or t
  misc_feature (1001)..(1001): n is a, c, g, or t
  misc_feature (1004)..(1007): n is a, c, g, or t
  misc_feature (1028)..(1028): n is a, c, g, or t
agcaggctggtaccggtccggaattcccgggatcggagccagcagggagctgggagctgggggaaacgacgccaggaaagctatcgcgccagaaagggcgacgggggctcgggaagcctgacagggcttttgcgcacagctgccggctggctgctacccgcccgcgccagcccccgagaacgcgcgaccaggcacccagtccggtcaccgcagcggagagctcgccgctcgctgcagcgaggcccggagcggccccgcaggaccctccccagaccgcctgggccgcccggatgtgcactaaaatggaacagcccttctaccacgacgactcatacacagctacgggatacggccgggcccctggtggcctctctctacacgactacaaactcctgaaaccgagcctggcggtcaacctggccgacccctaccggagtctcaaagcgcctggggctcgcggacccggcccagagggcggcggtggcggcagctacttttctggtcagggctcggacaccggcgcgtctctcaagctcgcctcttcggagctggaacgcctgattgtccccaacagcaacggcgtgatcacgacgacgcctacacccccgggacagtacttttacccccgcggggggtggcagcggtggaggtgcagggggcgcagggggcggcgtcaccgaggagcaggagggcttcgccgacggctttgtcaaagccctggaacgatctgcacaagatgaaccacgtgacaccccccaacgtgtccctgggcgctaccggggggccccggctgggcccgggggcgtctacgcggccccggagcaacctcccgtttacacaaactcagcagctactccccagcctctgcgtcctcgggaggcgccgggctgccgtcgggaccgggagctcgtaccgacgacaccatcagctactcccacacgcgccgccttcgcaggtggcacccgcgcntgggcttggggcgngngctccacttnaagagnacnnnnacgtgcggagggcaccgggancacgcgccgtgtccc

SEQ ID NO: 353456 - DNA, 1840 bp, Homo Sapiens
gagcgaggcctgggtggcgaattcggcacgaggccagcctcggagccagcagggagctgggagctgggggaaacgacgccaggaaagctatcgcgccagagagggcgacgggggctcgggaagcctgacagggcttttgcgcacagctgccggctggctgctacccgcccgcgccagcccccgagaacgcgcgaccaggcacccagtccggtcaccgcagcggagagctcgccgctcgctgcagcgaggcccggagcggccccgcagggaccctccccagaccgcctgggccgcccggatgtgcactaaaatggaacagcccttctaccacgacgactcatacacagctacgggatacggccgggcccctggtggcctctctctacacgactacaaactcctgaaaccgagcctggcggtcaacctggccgacccctaccggagtctcaaagcgcctggggctcgcggacccggcccagagggcggcggtggcggcagctacttttctggtcagggctcggacaccggcgcgtctctcaagctcgcctcttcggagctggaacgcctgattgtccccaacagcaacggcgtgatcacgacgacgcctacacccccgggacagtacttttacccccgcgggggtggcagcggtggaggtgcagggggcgcagggggcggcgtcaccgaggagcaggagggcttcgccgacggctttgtcaaagccctggacgatctgcacaagatgaaccacgtgacaccccccaacgtgtccctgggcgctaccggggggcccccggctgggcccgggggcgtctacgccggcccggagccacctcccgtttacaccaacctcagcagctactccccagcctctgcgtcctcgggaggcgccggggctgccgtcgggaccgggagctcgtacccgacgaccaccatcagctacctcccacacgcgccgcccttcgccggtggccacccggcgcagctgggcttgggccgcggcgcctccaccttcaaggaggaaccgcagaccgtgccggaggcgcgcagccgggacgccacgccgccggtgtcccccatcaacatggaagaccaagagcgcatcaaagtggagcgcaagcggctgcggaaccggctggcggccaccaagtgccggaagcggaagctggagcgcatcgcgcgcctggaggacaaggtgaagacgctcaaggccgagaacgcggggctgtcgagtaccgccggcctcctccgggagcaggtggcccagctcaaacagaaggtcatgacccacgtcagcaacggctgtcagctgctgcttggggtcaagggacacgccttctgaacgtcccctgcccctttacggacaccccctcgcttggacggctgggcacacgcctcccactggggtccagggagcaggcggtgggcacccaccctgggacctaggggcgccgcaaaccacactggactccggccctcctaccctgcgcccagtccttccacctcgacgtttacaagcccccccttccactttatgttgtatgttttttttctgctggaaacagactcgattcatattgaatataatatatttgtgtatttaacagggaggggaagagggggcgatcgcggcggagctggccccgccgcctggtactcaagcccgcggggacattgggaaggggacccccgccccctgccctcccctctctgcaccgtactgtggaaaagaaacacgcacttagtctctaaagagtttattttaagacgtgtttgtgtttgtgtgtgtttgttctttttattgaatctatttaagtaaaaaaaaaattggttctttatt

SEQ ID NO: 353457 - DNA, 2657 bp, Homo Sapiens
  misc_feature (33)..(33): n is a, c, g, or t
  misc_feature (667)..(677): n is a, c, g, or t
  misc_feature (751)..(764): n is a, c, g, or t
actgcgggagttctagcatttgttttcaaagantggatcaaagaccagctgtatttctttataaacaacaacatcagagcatatcgggacgacattgatttgcaaaacctcatagacttcacccaggaatattggcagtgctgtggggcttttggagctgatgattggaacctaaatatttacttcaattgcacagattccaatgcaagtcgagagcgatgtggcgttccattctcctgctgcactaaagatcccgcagaagatgtcatcaacactcagtgtggctatgatgccaggcaaaaaccagaagttgaccagcagattgtaatctacacgaaaggctgtgtgccccagtttgagaagtggttgcaggacaatttaaccatcgttgctggtattttcataggcattgcattgctgcagatatttgggatatgcctggcccagaatttggttagcgatatcgaagctgtcagggcgagctggtagaccccctgcaaccgctgctgcaagacactggacagacccagctttcgggaccctcccgcgtgccgaactgatcttcgagctgcatggacctaatcacagatgcagcctgcagtctcgcctaatggagctgccattaggggagtgtaaaactgggaaatgctgctcactgacagaattnnnnnnnnnnntaaccagtatgaaagtcgttgcgccgtgaatctctactgtagccatgaatttatggacagttagatgcttaccnnnnnnnnnnnnnngggagggtaggggacccagatgtacttgaatgtgcagaaaatacattcttgtcctcatcttccgtaattggagggctgggagaggcagctttgctcttcaccacaccttggacggaccaccttctttctgttccatggcctgaaggagtgcatctcctcaaagactcagcccctcacctgggagggcagtggtttgtgggcatccctccatgtacattttaggaaacacttgcaactctcatctgaagaagaaaacaactcatctttgggttcagattttgtgatggtattcagcaagtcacttgggcgagcacacttggtctatcctggaaagtctccttataagagaagttgtgtatttcatgtgcaccgagcaagggcattggaagacgtcatgaggctgtattttagcaggactgatcgtttttctaagtagacctgagctttgtttatcagtgaaattcaaggagaaaatgaggttaatgaagaggtatcagttaaatatccccttcttctcaccctgccaaaattagcagttggatttttggaaactctggaatattctgggtcattttgttttgtatgtttgttgtttttcgtcttccaaaggtgaaagctatgatacagttccacttaaattttagtgttttcttactcagctcaagcattaatttttgattaagtcttaatctgcatgacctgtgaatctggaatccatcatctccctttcctgccagcttttctacaaacattgaaatatgttatttggtcagcacttatttcctaggttcacagccttgggaggttgtggcatgtcctcccagtctggctgggaagagaccagctgtaccatccaaatgcttccctggtcttgatgatctcttccagagtcgatctgagtggccttttctgcaccctccccttctttctctttgaatggaattaaacccaatttggaaacaacattgacccagtcaaaagcttctaatggtttctttttcttcctccagttttagtttgcttttattaaaaaaagaaaatagtgcatggccatagctccttcagttctcttattgcagactaaccatcaggatggtatcaaagcacaaatactttggaggggaatgcgttgaactggggcaagtactctgtaacacaaagtgggaaaccacttcctggtgctgccgctcctgcccccactttaggtgggagggacgagttttgccctctagattttaatccagctggtgtccaccggatgttgccctcctggggagcagatatcagtctgtggaactctgggaaaaccacaggcacatttttcggtgcggacagatttgccagcacataactgggcagccagctagaatactttgtggaaattaagcgaggttttccatttcagccccatggtgcatggtggtggccgatgaatgtgtcagtctgctcagagaaaggacaaaaaggaaattattttcaaaactgtgttcactgtttgggtgtgtgtatggctctgcatgtgtgtgtttttgtctctgtataggtagaggtattcacatcttactccgactgtaaggttgtcttacttcatctctgcccccaccacagttgccattttgtaatgtccttccaacatggagaagacacgagctctctccagttggcatcatttgtcttttttgttgattgcctcattctccagtgaactccatctggccaattgattcagaatcaggcaagatccctgccctttggcacatccactgaaaggccaaacagcaagtccgagtgagttttaaatattaattaatcaccctttattttttacacttgagagtgattgtaataaaggctgtcattaataaacttggttctaccttaaaaaagagaaaa

SEQ ID NO: 353458 - DNA, 813 bp, Homo Sapiens
  misc_feature (23)..(23): n is a, c, g, or t
  misc_feature (41)..(41): n is a, c, g, or t
  misc_feature (109)..(111): n is a, c, g, or t
  misc_feature (118)..(118): n is a, c, g, or t
  misc_feature (156)..(156): n is a, c, g, or t
  misc_feature (169)..(170): n is a, c, g, or t
  misc_feature (193)..(193): n is a, c, g, or t
  misc_feature (232)..(232): n is a, c, g, or t
ctgtggccatgaaatgaaaaggnagttctgtccaacatccntcccatcaccgatctcgcggggcttgacccagtttggctctccctgtggtgagaggagtgatgtcatnnntgggatntgcagggtgcatgggagcgctacgggaaaacacttccnttctcaagttttnntctgtgtttcctgggaatatttntcttccctggagctcactgcgggagttctagcattggtnttaaaagactggatcaaagaccagctgtatttctttataaaaaacaacatcagagcatatcgggatgacattgatttgcaaaacctcatagacttcacccaggaatatattccaatgcaagtcgagagcgatgtggcgttccattctcctgctgcactaaagatcccgcagaagatgtcatcaacactcagtgtggctatgatgccaggcaaaaaccagaagttgaccagcagattgtaatctacacgaaaggctgtgtgccccagtttgagaagtggttgcaggacaatttaaccatcgttgctggtattttcataggcattgcattgctgcagatatttgggatatgcctggcccagaatttggttagcgatatcgaagctgtcagggcgagctggtagaccccctgcaaccgctgctgcaagacactggacagacccagctttcgggaccctcccgcgtgccgaactgatcttcgagctgcatggacctaatcacagatgcagcctgcagtctcgcctaatggagctgccattaggggagtgtaaaactgggaaatgctgctcactgacagaaaaaaa

SEQ ID NO: 353459 - DNA, 939 bp, Homo Sapiens
  misc_feature (50)..(86): n is a, c, g, or t
  misc_feature (691)..(757): n is a, c, g, or t
  misc_feature (788)..(867): n is a, c, g, or t
gggatgtatagactcactatagggcgaatggagctcacgcggggcggcgnnnnnnnnnnnnnnnnnnnnnnnnnnnnnnnnnnnnnatcaggccaaatcggccgagctcgaattcgtcgagagcgggtttactcgctgctgtgcccatctatcagcaggctccgggctgaagattgcttctcttctctcctccaaggtctagtgacggagcccgcgcgcggcgccaccatgcggcagaaggcggtatcgcttttcttgtgctacctgctgctcttcacttgcagtggggtggaggcaggtaagaaaaagtgctcggagagctcggacagcggctccgggttctggaaggccctgaccttcatggccgtcggaggaggactcgcagtcgccgggctgcccgcgctgggcttcaccggcgccggcatcgcggccaactcggtggctgcctcgctgatgagctggtctgcgatcctgaatgggggcggcgtgcccgccggggggctagtggccacgctgcagagcctcggggctggtggcagcagcgtcgtcataggtaatattggtgccctgatgggctacgccacccacaagtatctcgatagtgaggaggatgaggagtagccagcagctcccagaacctcttcttccttcttggcctaactcttccagttaggatctagaactttgcccnnnnnnnnnnnnnnnnnnnnnnnnnnnnnnnnnnnnnnnnnnnnnnnnnnnnnnnnnnnnnnnnnnntattcacaaatgggaacatagtacactgcannnnnnnnnnnnnnnnnnnnnnnnnnnnnnnnnnnnnnnnnnnnnnnnnnnnnnnnnnnnnnnnnnnnnnnnnnnnnnnnaatccagaactttgtttatcactttccccaacaacctagatgtgaaaacagaataaacttcccccagaaaac

SEQ ID NO: 353460 - DNA, 510 bp, Homo Sapiens
cgcttgggcctccctggcggtcccgccctgccctaggctttaccttggaagcctgagaggcgccggctctcttgctcctccatcgatggacactgcattgcttctcatcggacacttgtggagcgcaggggcctggggagcagcgctaaccctggaggcagcctttgggtgatggctttttcttcccttttcctcccgcgggcctgttttcaggtgttcctagcatttctgcctccaggcaggacggcaggggtgagcagctttgggagagacacctggcctttttctcctggagcctctccctcccggccctgggaagtgggcgcagccctgtgttcccccagcttggcagatgggctgcatgcggcgctcccttccttcccacgctcagcggccccggccagaccctggcagacttcacacctcattgctttaccccctggggcctggggaaatgtctgtactttgggaagtcacagaaatacatttttgtgcaaaatggaaaaaaaa

SEQ ID NO: 353461 - DNA, 1284 bp, Homo Sapiens
tccctggctgccttggacctctcaggcattcagacgagcgacgccgccttcctcacccagtggaaagacagcctggtgtccctcgtcctctacaacatggacctgtccgacgaccacatccgggtcatcgtgcagctgcacaagctgcgacacctggacatctcccgagaccgcctctccagctactacaagttcaagctgactcgggaggtgctgagcctctttgtgcagaagctggggaacctaatgtccctggacatctctggccacatgatcctagagaactgcagcatctccaagaatggaagaggaagcggggcagaccagcattgagccttccaagagcagcatcatacctttccgggctctgaagaggccgctgcagttcctcgggctctttgagaactctctgtgccgcctcacgcacattccagcctacaaagtaagtggtgacaaaaacgaagagcaggtgctgaatgccatcgaggcctacacggagcaccggcctgagatcacctcgcgggccatcaacttgctttttgacatcgcccgcatcgagcgttgcaaccagctgctgcgggccctgaagctggtcatcacggccctcaagtgccacaaatatgacaggaacattcaagtgacaggcagcgccgctctcttctacctaacaaattccgagtaccgctcagagcagagtgtgaagctgcgccggcaggttatccaggtggtgctgaatggcatggaatcctaccaggaggtgacggtgcagcggaactcctgcctgacgctctgcaacttcagcatccccgaggagctggaattccagtaccgccgggtcaacgagctcctgctcagcatcctcaaccccacgcggcaaggacgagtctatccagcggatcgccgtgcacctgtgcaatgccctggtctgccaggtagacaacgaccacaaggaggccgtgggcaagatgggctttgtcgtgaccatgctgaagctgattcagaagaagctgctggacaagacatgtgaccaggtcatgggagttctcctgggagtgccctgtgggaacattcacagatggaaactcctggacaactgcgagatgttcctcaatttcaacggcatgaagctcttcctggactgcctgaaggaattcccagagaagcaggaactgcataggaatatgctaggacttttggggaatgtggcagaagtgaaggagctgaggcctcaactaatgacttcccagttcatcagcgtcttcagcaacctgttggagagcaagg

SEQ ID NO: 353462 - DNA, 2139 bp, Homo Sapiens
  misc_feature (863)..(896): n is a, c, g, or t
  misc_feature (1947)..(1947): n is a, c, g, or t
  misc_feature (2063)..(2063): n is a, c, g, or t
aggctaggtagcgaggccgggtggtgaatcggcacgaggctggagtgccctgtggaacatcacagatgaaactcctgacaactgcgagatgttcctcaatttcaacggcatgaagctcttcctggactgcctgaaggaattcccagagaagcaggaactgcataggaatatgctaggacttttggggaatgtggcagaagtgaaggagctgaggcctcaactaatgacttcccagttcatcagcgtcttcagcaacctgttggagagcaaggccgatgggatcgaggtttcctacaatgcctgcggcgtcctctcccacatcatgtttgatggacccgaggcctggggcgtctgtgagccccagcgtgaggaggtggaggaacgcatgtgggctgccatccagagctgggacataaactctcggagaaacatcaattacaggtcatttgaaccaattctccgcctccttcccccagggaatctctcctgtcagccaagcactgggcaacctgggccctgtataacctcgtgtctgtctacccggacaagtactgccctctgctgatcaaagaaggggggatgccccttctgagggacataattaagatggcgaccgcacggcaggagaccaaggaaatggcccgcaaggtgattgagcactgcagtaactttaaagaggagaacatggacacgtctagatagaggcctccgtccccatggccgccaccgctctggaccacaggcggggaggaagcatgctcaagcagcccagcgggcgggccccttccgagggagcctcccacggagtgaagagacatgggggacttttgcacaaccgacgcttttccttaatgttagtgagnnnnnnnnnnnnnnnnnnnnnnnnnnnnnnnnnnggttaggaagtgtgaagttttgtgtgtatgatttctgtgcaaaaacaaaagcaacactcctgagtccttgcagcttccttggccattctcaaacccactcagccttcatcgctgacacacacactcctaccccaaccagactaaatgcctataacgctgtgagtgtccagtccttgtccaggaaactcagatcccggcctggcttcctttcatgagaggagcaggccttggacagcgtatcgagcatcctgacccactgcccctgcctgagaacgccatctcggctcccgggcacagctgatggggtttggggattagaacttaccccactgggtctcccaaaagccttggtgctcccggctgtgggccatctggggcaggaaagtgagccattcctaggctgaggtccaggcagccctgcccctgaagaccctctaggagcagggcacccagtggccctgctgctgtccagccaggcctgcctgaggccacgctgctatggaggctgcctcctagtctcccaccaggtcccaggctgtggaaagccccagcccagggatggtcagaactcgggggcagattccactgccccttctgccaaacacatccagaacctgccctcagccctggaagctagcatcttctggggccaggggcttgcttcctcgctccatagccctcaactgcccaggcgctcccaccagcagaactgagcctgcctcctcctcccagcctgccccgctgcccagaggaccccacgcctctcagaggcagaggtcccatgccagcctttgacccacaacggccacacagccgcctccagaccagcactcggactgccctgcagtggccgcttggcgcttccctgggcggtcccgccctgccctaggctttaccttggaaagcctgagaggcgccggctctcttgctcctccatcgatggacactgcattgcttctctcggacacttgtggagcgcaggggcctggggaacagcgcttaccctggggaccccttggggtggatggctttttctttccctttcctcccncggccgggtttttcaatgggtccctagcaattctgcctccagaggaaaacggcaagggtgaccaaccttttgggagaaaacccctggcctttttctcctgggagctcttccccggnccctgggggaaaggggcccaacccctgggtgtcccccactttggaaaaaggggttttaatgagggggctcccttct

SEQ ID NO: 353463 - DNA, 454 bp, Homo Sapiens
  misc_feature (399)..(399): n is a, c, g, or t
gcgacgcagccttcctcacccagtggaaagacagcctgggtgtccctcgtcctctacaacatggacctgtccgacgaccacatccgggtcatcgtgcagctgcacaagctgcgaacacctggacatctcccgagaccgcctctccagctactacaagttcaagctgactcgggaggtgctgagcctctttgtgcagaagctggggaacctaatgtccctgggacatctctgggccacatgatcctagagaactgcagcatctccaagatggaagaggaagcggggcagaccagcattgagccttccaagaggcagcatcatacctttcccgggctctgaaggagggccgctgcagtttccttggggttttttgaggaattttttgtggccgcttaacgnacatttccaggctaacaaagtaagttggtgacaaaaaacgaaggagcaggtgttg

SEQ ID NO: 353464 - DNA, 1688 bp, Homo Sapiens
tccatgaaatggaaaaggagcacttaaataaggttcagactgcaaatgaagttaagcaagctgttgaacagcagatccagagccatagagaaactcatcaaaaacagatcagtagtttgagagatgaagtagaagcaaaagcaaaacttattactgatcttcaagaccaaaaccagaaaatgatgttagagcaggaacgtctaagagtagaacatgagaagttgaaagccacagatcaggaaaagagcagaaaactacatgaacttacggttatgcaagatagacgagaacaagcaagacaagacttgacagggttaggcaagagacagtggcaaaagaacttcagactttacacaacctgcgcaaactctttgttcaggacctggctacaagagttacaaaagagtgctgagattgattctgatgacaccggaggcagcgctgctcagaagcaaaaaatctcctttcttgaacaataatcttgaacagctcactaaagtgcacaaacagttggtacgtgataatgcagatctccgctgtgaacttcctaagttggaaaagcgacttcgagctacagctgagagagtgaaagctttggaatcagcactgaaagaagctaaagaaaatgcatctcgtgatcgcaaacgctatcagcaagaagtagatcgcataaaggaagcagtcaggtcaaagaatatggccagaagagggcattctgcacagattgctaaacctattcgtcccgggcaacatccagcagcttctccaactcacccaagtgcaattcgtggaggaggtgcatttgttcagaacagccagccagtggcagtgcgaggtggaggaggcaaacaagtgtaatcgtttatacatacccacaggtgttaaaaagtaatcgaagtacgaagaggaacatggtatcaagcagtcattcaatgactataacctctactcccttgggattgtagaattataacttttaaaaaaaatgtataaattatacctggcctgtacagctgtttcctacctactcttcttgtaaactctgctgcttcccaacacaactagagtgcaattttggcatcttaggagggaaaaaggacagtttacaactgtggccctatttattacacagtttgtctatcgtgtcttaaatttagtctttactgtgccaagctaactgtaccttataggactgtacttttggtatatcacagtgtatgttatcgttagaatctcaggttgacaattacctagcttgctactgctgcttgtttctatcttttcctattagaacgtcttccctttatactttcttagagacgaaaatggaatcatttaggttacatgtcctagaaaattagagcacttaacaacactaacatgccataaatatatccagtcaagcactgagctattaaaactcccctgcaaggatgcatacagggcataacaatactggcattgttctgcagtagccctgaaacaactgaggagacaggacacgtaaaagcacacagccatgagagaacaggacatgtaacacagacaagccgtgcgactttagaatgaaacgaagctcaaagcggctcacacaagaagtggaaagagaaagacgacagagaagaaaacgaaggaaaaaagaccagagccagatataaggacaaaaaaacacacaagcaacagacaga

SEQ ID NO: 353465 - DNA, 869 bp, Homo Sapiens
aagtggcaccagcacttccggtacggaaaactcgctgctgccccaacctggcttgacaggcttggtctctgcaagtggctctcagccccttcttctttcctgcctcaccttccaattcgtttgccgccgccgtcccgcagctgctgtttccggagttgccccttccccatgttccggggcaggagtccgcaaagcgaagatccgcccgccggttcctcatcatgtccgaactgactaaagagctgatggagctggtgtggggcaccaagagcagccccggtctctcggacaccattttctgccgctggacgcaagggtttgtgtttagtgaatcagagggatctgcattagaacagtttgaaggtggcccctgtgctgttattgcacctgttcaggcatttcttttgaagaagctcctgttttcttcggagaagtcttcttggcgggattgttcagaggaagagcagaaggaactcctttgtcataccttgtgtgatattttagaaagtgcttgttgtgaccactctggatcatactgcttggtttcatggttaagaggaaagacaactgaggaaactgctagtatttctgggagtcctgcagagtctagttgccaagtggaacattcttctgcctgggctgtcgaagagcttggctttgagcgatttcatgcatataatttcaacaaacagatcgttcagaagttttaccagaattaaacagaatgctgtcttggaccagtattcaacttgtggggaaacctaaatttgggagtattgctttttctgtattctgtattacttgaccaaagggcattgaaaacataaaaacgaaattgcaagattgcacgttgaacccttgatagaatc

SEQ ID NO: 353466 - DNA, 343 bp, Homo Sapiens
  misc_feature (94)..(138): n is a, c, g, or t
  misc_feature (292)..(294): n is a, c, g, or t
  misc_feature (316)..(318): n is a, c, g, or t
  misc_feature (320)..(320): n is a, c, g, or t
aacaagaagcatgtggataaatgtaaagcaagcagaagagtcataacccttggagagactcaagagtatagttcagtagaaagtcgtcatgtcnnnnnnnnnnnnnnnnnnnnnnnnnnnnnnnnnnnnnnnnnnnnnttacaggcataagccactgcgcccagccagaagatgcatgatttcttaggatcatatgctgtttgtagccataaggtaaatcatgtctcttccaatcatgactttggaactccctgaataataaaaatgagagttgagataaataggggaaaannnatttttttcaagccagagctannnanatgttaggtgatgggtagtatcc

SEQ ID NO: 353467 - DNA, 308 bp, Homo Sapiens
  misc_feature (268)..(268): n is a, c, g, or t
ggaagggaagcccgcccggtggcggctggggtcggctgctgggaggaggtggtgggctggttcggacgtgggtcgaggctgtagcaggactccagggttgggaagaacatggaaagtgacctccctgccaaataactcagaagaggagtgtcggtagccaaaagtttcttcagaatacgtgtaaaagaaatgtttttcttccatctaggaagatcttaccgagtacttcagtgaattccttagtgcaggggaacggagtcttgaattncagggatgcggcaagacacacagccggagcgaaacgctac

SEQ ID NO: 353468 - DNA, 1147 bp, Homo Sapiens
atcaggccaaatcggccgagctcgaattcgtcgagagcggaagggccggctccgttgagggaagggaagcccgcccggtggcggctggggtcggctgctgggaggaggtggtgggctggttcggacgtgggtcgaggctgtagcaggactccaggaagatgttaccgagtacttcagtgaattccttagtgcaggggaacggagtcttgaattccagggatgcggcaagacacacagccggagcgaaacgctacaaatatctgagaaggcttttccgctttcggcaaatggactttgaatttgctgcctggcagatgctctacctgttcacatccccacagagagtttacagaaattttcattatcgaaaacagacgaaggaccagtgggccagagatgaccctgctttcttggtcctgttaagtatctggctctgtgtgtccactataggatttggctttgtgctggacatgggattctttgagacaataaagcttctcctttgggttgtactcatagattgtgtaggcgttggtcttctgatagcaactttaatgtggttcatctctaacaagtatttagtgaaacgacagagcagagactatgatgtggaatggggctatgcttttgatgtgcatctcaatgctttttatccactcctggtcattttgcattttatccagctttttttcatcaaccatgttatcctgacagacacatttattggatatttagttggaaataccttatggttggttgcagttggctattatatctatgtaactttcctgggatacagtgcattgccatttttgaaaaatacagtaattcttctgtatccatttgcacctctgattctgctctacgggctttccctggcactgggatggaacttcacccatactctctgttctttctataagtacagagtgaaataaaaagtgagaagaagattcaatcgtaactgtgtcaacagtattgtgaagtgatcatttcttgtaaaacttgtaaataaactatcatctttgtagatatcttaaaggtgtaaagtttgcaaatttgaagaaatatatattaacactgtggtcaggtacattccttaaaactaattaaatgtacatttctataataaatattttttaaacta

SEQ ID NO: 353469 - DNA, 1117 bp, Homo Sapiens
  misc_feature (7)..(7): n is a, c, g, or t
  misc_feature (13)..(13): n is a, c, g, or t
  misc_feature (61)..(61): n is a, c, g, or t
  misc_feature (73)..(73): n is a, c, g, or t
  misc_feature (79)..(79): n is a, c, g, or t
  misc_feature (113)..(113): n is a, c, g, or t
  misc_feature (163)..(163): n is a, c, g, or t
  misc_feature (210)..(210): n is a, c, g, or t
  misc_feature (298)..(298): n is a, c, g, or t
  misc_feature (300)..(300): n is a, c, g, or t
  misc_feature (329)..(330): n is a, c, g, or t
  misc_feature (332)..(332): n is a, c, g, or t
  misc_feature (336)..(336): n is a, c, g, or t
  misc_feature (340)..(340): n is a, c, g, or t
  misc_feature (350)..(350): n is a, c, g, or t
  misc_feature (352)..(352): n is a, c, g, or t
  misc_feature (362)..(362): n is a, c, g, or t
  misc_feature (395)..(395): n is a, c, g, or t
  misc_feature (399)..(399): n is a, c, g, or t
  misc_feature (402)..(402): n is a, c, g, or t
  misc_feature (412)..(412): n is a, c, g, or t
  misc_feature (414)..(414): n is a, c, g, or t
  misc_feature (421)..(424): n is a, c, g, or t
  misc_feature (427)..(427): n is a, c, g, or t
  misc_feature (437)..(437): n is a, c, g, or t
  misc_feature (446)..(447): n is a, c, g, or t
  misc_feature (451)..(452): n is a, c, g, or t
  misc_feature (455)..(455): n is a, c, g, or t
  misc_feature (457)..(457): n is a, c, g, or t
  misc_feature (459)..(463): n is a, c, g, or t
  misc_feature (465)..(465): n is a, c, g, or t
tcactcncaggcntgagcagcctcagtacacacccgcggctcccggggccctctctggcgngtgtcccctcanagaaangcacatgtacgaggcccagagggtggcaggctgncctgcgccgcgtggaggccgcgggtcccacccgccaggaccccggtggcncgagccgcgtctgtgaagctgccgtgacatgggggtccttgtctcgngaaaagcgcgtctgtcctgtctctctcctaccaggcacaagtgcacggctctggttcggggggagtgttggggcgtggtgacgggtgngngcccctgtccctctttccagcgaaagaanncncggnaggnacatgtaaananacgccaagtngtggacccgtgaggctgtgggtggagggtgggnaggngcngggaggggcngngatggtnnnnatntgtggtgtgngatgaaagnnggcnngtngngnnnnngntcacatgatggagcagcatttacaacggtgcttcttcatgtcgaggtcctgggggtcgctggtggtggcctcgggccccgcctgattctcttccctggaggcggcctccgtgggaggctcggcagcactgccgttgggtggtgcaggctccttgggctcagccgcgtcttcgatgaccaccagctccgccgtgatggtatcttgaaggcccagcaccttcttggtctcggcctcatcctccacgttctggtaacccatgaagatcattgtgaccgggggctcctggccgggctggatccccggcgggccggacgtggcctcgcctggctgtgcctgcacaccggtgatctcccgccgggagggcgtggtccgggctgccccctccacagccccccgggtctctgccgccccggccgtggaccctgcctcgctcagcgtgacctcgtccgctttgtggatgagttcgtccacctcggaggagctcagggggtggatcccgttctcggcggtgccgtccacagcatggaccactgccttcatcatgggggagccgtcaaccgtcctcaggggcgtgttggagactcgcttgtctttgggcgtgcccaccggcgtctgctgtgaattcaatcccggaaattccggaccggtgcca

SEQ ID NO: 353470 - DNA, 1588 bp, Homo Sapiens
  misc_feature (78)..(160): n is a, c, g, or t
ggaggccaccaccagcgacccccaggacctcgacatgaagaagcaccgttgtaaatgctgctccatcatgtgagccgnnnnnnnnnnnnnnnnnnnnnnnnnnnnnnnnnnnnnnnnnnnnnnnnnnnnnnnnnnnnnnnnnnnnnnnnnnnnnnnnnnnagcctcacgggtccaggacttggcgtgttgttacatgttccttccgagttttctttcgctggaaagagggacaggggcccccacccgtcaccacgccccaacactccccccgaaccagagccgtgcacttgtgcctggtaggagagagacaggacagacccgcttttcccgagacaaggaccccccatgtcacggcagcttcacagacgcggctcgcgcccaccggggtcctggcgggtgggacccgcggcctccacgcggcccaggccagcctgccaccctctgggcctcctacctgtgcctttctctgaggggacaccccgccagagagggccccgggagccgggggtgggtactgaggcctgctcaggccctggaagtgaggctctatggggttccctggccaaggcgctggccccccaatctcaggcagttggggtgaggccgtgcctctttgggggctaaaggtcttgggtggaggacaggcccctctgctgtgcccctatgccctgtgtgggcccaaccagtggacaatggagtctgggggagggggaaccccggggacatgcccccacccgggaggggccggtaacccctgggctatcttctagacggggcgaaccaggggtcattgacctgccccctgcacagggcagggaccgagtgagccactccttgtcccgagctcccgcccccactgggccctccttcctcctggtgctaatttggggaccccaggggccgcccccggcctcttctccatcctgcttggaccagggtcctgggtcttcccaaccataccccgagatcaggccccacctgccagctctactgggcttggagcacgtccgggcagtggagggagggacacagcctgggacaggaagcctcttgggttggagcaggagaccctcatttgccacccagaccaatgtgagcctgcccccagccccctctcattggaagtggcaaggggcttccctcctgggggcagctacactcgtccccagaggcacattcgtgcacattctcacagacaccgtctcacacgttggctttggacaaccaggccccaacttggtccctgccctagggacctccagcctggtgcccagtgctcaggccacctcctggtccagtcaccacctgcagcctcggcagggcaggtacaggggccacctcggatgggagcctgggtccctgcctccgctctgcccctgggtggctgggaggagaggccctctcgggggtgacctgggcgtcagccgtggaaccccctcctcctccctggagtctgcctgagtccctcgagccgcgagccttcgctgaagtgcccttgctataaccccctctgcttctggtgtgtgacgaggcccccgatgttcttgattttcccagagaagcaaataaacagcgtgaacagccaaa

SEQ ID NO: 353471 - DNA, 1008 bp, Homo Sapiens
  misc_feature (798)..(937): n is a, c, g, or t
ggtctctcccgcacgtccgtggaccctgcctcgctcagcgtgacctcgtccgctttgtggatgagttcgtccacctcggaggagctcaaggggtggatcccgtttctcggcgggtgccgtccacagccatggaccacttttggtctcgtcctcgtagactttgatgcccagagggagcggctgccgagggagcagcgtggtgctggacagcaacctggtctcccctgtcaccttgtccttctccacagtgatctcaaccgagtacatggctgccttcatcatgggggagccgtcaaccgtcctcaggggcgtgttggagactcgcttgtctttgggcgtgcccaccggcgtctgctgtgaattcatcaccacctctgtcttgcgctcctccttggctggactcggggctggggcccggactgggctcggggccgccgcgttctccttggcagtggctggggcggagtctccacgctccagcacctcaatttccttctccaacctggacaccgagtcctccagcagccgtgtcttctgctcgtcgtcctgcatctgcctcctcaggtcctcatccccctctgaggccgaggacggcgtcccctccagcagccagcgctcccgcagtgccttggacttcaggtgctgcagctgcctccgctcgtcctccagctgccggcgcttgttctcgatctccgcctgccgcttccgcttctctgcgatggcctgcagccgctcctgctgggacgtggtctctgccgccaggacctccatctccccgccgaggtccgggtgggtccnnnnnnnnnnnnnnnnnnnnnnnnnnnnnnnnnnnnnnnnnnnnnnnnnnnnnnnnnnnnnnnnnnnnnnnnnnnnnnnnnnnnnnnnnnnnnnnnnnnnnnnnnnnnnnnnnnnnnnnnnnnnnnnnnnnnnnnnnnnncgccccgcgcaaagctgctgtttattgtccgggcggcggcgggatcccgggaattccggaccggtaccagc

SEQ ID NO: 353472 - DNA, 415 bp, Homo Sapiens
agaaaagcaagatactgaaatgtgatgaacatatccagaagcttggaagctgtattacagatccaggtaatcgagagacctcaggaaataccatgcacacagtgtttcaccgtgacaagaccaaagatacacatcctgaaagctgttgcagctctgaaaagggtgggcagccattgccttggtttgagcataggaaaaatgtaccacagtttgcagaacctacagaaacgttgtttggtcccgattccggaaaaggtgccaagagcttagttgaactccttgatgagtctgaatgtacttcagatgaggaaatctttatctcacaagatgaaatacagtcatttatggctaataaccagtctttctacagcaatagagaacaataccgacagcatctgaggggaatttaataaat

SEQ ID NO: 353473 - DNA, 930 bp, Homo Sapiens
  misc_feature (792)..(809): n is a, c, g, or t
gcaccagggatggacgtggccgacgcctacgtgactttcgtccgccattctcaggatgtcctgcgtgataaggtcaatgaggagatgtacatagaaaggttatttgatcaatggtacaacagctccatgaacgtgatctgcacctggttgacggaccggatggacttacagcttcatatttatcagttgaaaacactaattaggatggtaaagaagacctatgaaacgatccggaaccgtctcactgtggaggaagccacagcatcagtgagtgaaggtgggggactgcaaggcatcagcatgaaggacagcgatgaggaagacgaagaagacgattagaccatttggtcctagagtctgctgggacagagtcctgtaatcagtgcatgtccttagtctgttagttaaacccattaggaattttctgtcaactaccatgccccatgagatgtttatcaatacaactgccattttagctatgtggtaccaagattagcaaatgaccttcatatccactgatttcctgatgtccatgtctatatgtttacaagcaatatggagcaccattctttaaatactgttcatggagaatacatagtctaaccactaggcgtgtccctgttatcagcaaagatcaatgatgcttcattcatgtactatgtatgcattggtggtaaatggatgtgagggcaagtacatcaagtacattcactctgtttcacgtatgtggatgccagttaattaaatgagtacgtaaataaattaattaaaacacatagatctgctttgtgnnnnnnnnnnnnnnnnnngaaaaacaaaaggcaagtctccaacaattaacttttgatgctttctgttcccctaaaaccaaaaaatgaaccccttgtgtcgttgttaacccatcctttcatttactcatataattagcca

SEQ ID NO: 353474 - DNA, 503 bp, Homo Sapiens
  misc_feature (484)..(484): n is a, c, g, or t
taaagatttatccattagataaatttgccaggaaaaaatttatcatagaaaaactatttataaaatcctacaatctcaatgcccttcttagccaggcttgatttctggaaagaggaagcagttctaatatcaattcctaccagcccaggctgtggacagcaatcccatgcctacaaagctgatccagcagaagcatctcagggtgtgtgagggcaagtagagggtacaagtgaatggtaaacaaggaagagtggctgtctgaaaattcgttttcatgttttcctgtttctttacagaaacccgggatggacgtggccgacgcctacgtgactttcgtccgccattcttcaggatgtcctgcgtgataaggtcaatgagggagatgttacataggaaaggttattttgatgttaagttaaatgccttttcctccttggaaaacccagggaggaggaccctcccaaattgttgaccaaattaaggngacaggaggttaagttcac

SEQ ID NO: 353475 - DNA, 1860 bp, Homo Sapiens
  misc_feature (89)..(89): n is a, c, g, or t
  misc_feature (169)..(169): n is a, c, g, or t
tactctctcactcttggaaagggttttaatgaaagatattgttaccccagtgccacaagaggaggtaaaaacagttatccgtaaatgtntggaacaggctgcgttagtcaactattctcggctctcagagtatgccaaaatcgaagggaaaaagagagaaatgtatgancatcctgtcttctgcttggcctcccaagtgatggatttaaccattcagaatcaaaaggatgcagaaaatgtaggccggttaatcactcctgccaaaaagcttgaagatacaatacgtcttgctgaactagtcattgaagttcttcagcaaaatgaggagcaccacgcagaggcctttgcgtggtggtcagatttaatggtggagcatgcggagacgttcctgtcactctttgcagtagacatggatgcagccttagaggtgcaacctccagacacatgggacagttttccactatttcagctgctgaatgattttctccgtactgactataatttgtgcaatggaaaatttcacaaacacctgcaagacctgtttgccccacttgttgttagatatgtggatctgatggagtcctcaattgcacaatccattcacaggggctttgagcgggagtcatgggaaccagtcaataatgggtcaggcacctcagaagatctgttttggaaacttgacgcccttcagaccttcattcgggacctgcactggcctgaagaagagtttggaaagcacctggaacaacggctgaagttgatggcaagtgacatgatcgaatcttgtgtcaaaagaaccaggattgcatttgaagttaagctgcaaaaaaccagtcgatcaacagattttcgagtcccacagtcaatatgcaccatgtttaatgttatggttgatgccaaagctcaatcaacaaaactttgcagcatggaaatgggccaagagcatcaataccattcaaaaatagacgaactaattgaagaaactgttaaagaaatgataacactcttggttgcaaagttcgttactatcttggaaggagtgctggcaaaattatccagatatgacgaagggactttgttttcttcttttctgtcatttaccgtgaaggcagcttccaaatatgtggatgtacctaaacccgggatggacgtggccgacgcctacgtgactttcgtccgccattctcaggatgtcctgcgtgataaggtcaatgaggagatgtacatagaaaggttatttgatcaatggtacaacagctccatgaacgtgatctgcacctggttgacggaccggatggacttacagcttcatatttatcagttgaaaacactaattaggatggtaaagaaaacctacagagatttccgattgcaaggggtcctggactccaccttaaacagcaagacctatgaaacgatccggaaccgtctcactgtggaggaagccacagcatcagtgagtgaaggtgggggactgcagggcatcagcatgaaggacagcgatgaggaagacgaagaagacgattagaccatttggtcctagagtctgctgggacagagtcctgtaatcagtgcatgtccttagtctgttagttaaacccattaggaattttctgtcaactaccatgcccatgagatgtttatcaatacaactgccattttagctatgtggtaccaagattagcaaatgaccttcatatccactgatttcctgatgtccatgtctatatgtttacaagcaatatggagcaccattctttaaatactgttcatggagaatacatagtctaaccactagggcgtgtccctgttattcaggcaaaggttcaatgatgcttcattcatgtactatgtatggct

SEQ ID NO: 353476 - DNA, 791 bp, Homo Sapiens
  misc_feature (763)..(763): n is a, c, g, or t
agcgtgttgataaaggagaagcctttgcgtggtggtcagatttaatggtggagccatgcggagacgttcctgtcactctttgcagtagacatggatgcagccttagaggtgcaacctccagacacatgggacagttttccactatttcagctgctgaatgattttctccgtactgactataatttgtgcaatggaaaatttcacaaacacctgcaagacctgtttgccccacttgttgttagatatgtggatctgatggagtcctcaattgcacaatccattcacaggggctttgagcgggagtcatgggaaccagtcaagagtttaaccagtaacctacccaatgtgaacctacccaatgtgaaccttcccaaagtaccaaatctaccagttaacatccctctaggcatcccacaaatgcctactttttcggcaccgtcatggatggctgctatatatgatgcggataatgggtcaggcacctcagaagatctgttttggaaacttgacgcccttcagaccttcattcgggacctgcactggcctgaagaagagtttggaaagcacctggaacaacggctgaagttgatggcaagtgacatgatcgaatcttgtgtcaaaagaaccagggattgcatttgaagttaagctgcaaaaaaccagttcgatccaacagatttttcgagtcccacagttcaatatgcaccatgttttaatgttatgggttgatgccaaagcttcaatcaacaaaatttttgcagcnggggaattggggccagagcttcattacc

SEQ ID NO: 353477 - DNA, 632 bp, Homo Sapiens
cggacggtcctacttttcacagggatctttcctcttaaagccaacaaccatgaaaaattggcagccagattatttgggtttgggacagatggagggcaggtgaatggaagttagacgttgacagccactactccagctgactttgacaagcaatccccttctccaattagtttcaaactacagccaattgaaagagcagccatctacccttccctgagtctgtgtatggtggggagggtgtgcagaacctgtccagccacctatacttaccttttgacacaagattcgatcatgtcacttgccatcaacttcagccgttgttccaggtgctttccaaactcttcttcaggccagtgcaggtcccgaatgaaggtctgaagggcgtcaagtttccaaaacagatcttctgaggtgcctgacccattattgactggttcccatgactcccgctcaaagcccctgtgaatggattgtgcaattgaggactccatcagatccacatatctaacaacaagtggggcaaacaggtcttgcaggtgtttgtgaaattttccattgcacaaattatagtcagtacggagaaaatcattcagcagctgaaatagtggaaaactgtcccacctgtgaaagta

SEQ ID NO: 353478 - DNA, 619 bp, Homo Sapiens
  misc_feature (127)..(127): n is a, c, g, or t
  misc_feature (142)..(151): n is a, c, g, or t
gctggggtttcattttatttttggaaaaccaaaggcaggctccaaccattaacctttgatgcttctggtcccctaaacccaaaaatgaacccctgtgtcgtggttaaccccatccttccatttaccncatataattagcccnnnnnnnnnnggatggctacatacccaatggattgattctcttaattgccacggcaagggggcgatcctatcatgacttaacatcaagcgcgcagttcaaaactactgtcttctgtcaaagttttctccctcttaaatgttattttgcttttacgtctcaactgtgtatgtaaaaaaaacgaatatttaaattacaaccctagactaaaaatgtgtttataataagatgtggatatttccttcagtagattgtaaccataatttaaattattttgttccacactgttttttatatctgtcatgtacattgcattttgatctgtaactgcacaaccctggggtttgctgcagagctatttctttccatgtaaagtagtggatccatcttgcttttgccttatataaagcctacagttatggaagtgtggaaaactgtggcttctcaataaatattcagatgtcctaagaataaaaaaaa

SEQ ID NO: 353479 - DNA, 506 bp, Homo Sapiens
cgggcccccaagcccatcctgcacccgccgcccgtgagcaagagcgacgtgaagcccgtgcctggcgtgcccggggtgtgccgcaagaccaagaagaagcaccttaaaaagagtaagaatcccgaggatgtggttcgaagatacatgcagaaggtgaaaaacccacctgatgaggactgcaccatctgcatggagcgactggtcacagcatcaggctacgagggcgtgcttcggcacaagggcgtgcggcctgagctcgtgggccgcctgggccgctgtggccacatgtaccacctgctgtgcctcgtggccatgtactccaatggcaacaaggatggcagcctgcagtgccccacctgcaagccatctacggggagaagacgggtacgcagccgcctgggaagatggagttccacctcatccccactcgttgccggcttcctgataccagacatccgatcgtctatacatcccacagcatccagggcctagaccccaccccggag

SEQ ID NO: 353480 - DNA, 895 bp, Homo Sapiens
  misc_feature (806)..(806): n is a, c, g, or t
  misc_feature (880)..(880): n is a, c, g, or t
gtttgttgtttcaatccagctgccttgggaaggagaaaaccaaaaacacgaaagccagagctccgccggcttctggtacttaagagcaagcgttcccgggaagtccccattgtacaaaatgcccttttcctgtgcatggagcagcgttcggagggaaaggaactcctgcaaagtccgagataacagtcaagggtttcggcagtaagagaacagtcaggaacaggtttaaaagccaggagcgcatgtggtcttcctgcatcacactcctggcgggataaaaatgatctaccgcggcggttaccaaggccgatcgtgggatgctgatggggcctggattaaaaaggtcaccagcccgccaggtgccagaagccaccgggtatccttgcccacggcagggcccacccaggggtctaactgtcctcccacctcccctctctgcgtggtgatggtgtctggactcgccactcgaggtaggttgagatggaaggtatcctcagacatcaagtggtggtcgcactcagccaggtcggggggtgagagtgtcgggtcggtgagtggcccccaccctagatgtaggcctccttgctggtggagctgcccgcctggggctgctcaggaccattctctgggcgaacgatgtcttcgctgggctggaccatgacttggatgcgctgcttcagggagccctttaaggtgaggaacatgtaggccatgtacccggggatgaggaccatggaagacagagccatcagccagcccacaccctggccccacttggggaaaacatagtttcccatgggtgagtngcgtcatcttgcacagcactgaaaattgaacaaggccgccacaattgattgggtttgaagaaagaccagcagantttccaccagatgca

SEQ ID NO: 353481 - DNA, 815 bp, Homo Sapiens
ctacgcacagtcaagtttttggtcccgaacaatgtaacaataagcgaattgtcaaagatcatccgtgccgatgtcaggattgaccccacgcagccattcttcctactgatgaaccagcacagcatggtgagtgtgtccacgcccatcgaggacatatacgagcaggagaaagacgaggacggcttcctctatatggtatacgcctcccagaaaacattcggcttctgagccaccagtaggggggctcggcctgggagtcggggggccccggtcaggccctgcccagagagctcctggttcctgaactgagctgcctctaccgtggtgggctgggcaggcatgtgcccccctagtcagagggcaccaacccacctactctgcccctgggtggatcctgggccggtcgtgttagggttgtccctctgggtgctggctggtgggatgggggagggtggggagcagctcccagcacccctgctgtgtggttcatcttttttttaggcccctgccttctgcccatctgcccctcacccacccgaggctctgcccaccgcctggacctgcccacccctgaaagactggcccctggctccccgcccctcggtctccacgtggtgtatggatctgtggtcattgtccctctgcagaataaagattgctcaggcctgcctgcagaaacaacgaagagcaacagaagccgcgaaccagagaagcaccgaacaagagaacagcaaacaacaccaagaagcgcgaagcagcgacaccagaaaggcagcgaagcagacacagaagcgagaggagacagagcgacaggc

SEQ ID NO: 353482 - DNA, 860 bp, Homo Sapiens
cggttggtaagggacaaagggcagacaagcaggggccctaaaaaaaagatggaaccacacagcaggggtgctgggagctgctccccaccctcccccatcccaccagccagcacccagagggacaaccctaacacgaccggcccaggatccacccaggggcagagtaggtgggttggtgccctctgactaggggggcacatgcctgcccagcccaccacggtagaggcagctcagttcaggaaccaggagctctctgggcagggcctgaccggggccccccgactcccaggccgagcccccctactgctggctcagaagccgaaggtttcctgggaggcgtagaccatatagaggaagccgtcctcgtctttctcctgctcgtagatgtccgcgatgggcgtggacacactcaccatgctgtgctggttcaccagcaggaagaaggcctgcgtggggttcagctgcaggcggcgccggatgatcttgaccaactcgctcatgttgacatggtccgggaccaaaaacttggtcttgtccaggacgggcagctgcttctcacccttgtagcgctcgatgatcaccgggattttgctggggtgctggtcgcggatctgctgtacctccttacagcggtcggcgaagctccgccgctgcttgaaaggccggtctgagggcatcgcgcgggcccggctgggcgcgcaggccggggctctggggcgcggggatgtgtctgcggtttgggggctccgggggctccgcgcctcgcgctcaagggctccggggctcgcgctgagcacggcggctgcggctgcgggaggtaactcgcccggtgacgtcaggatccggagaattccggaccc

SEQ ID NO: 353483 - DNA, 2309 bp, Homo Sapiens
  misc_feature (47)..(146): n is a, c, g, or t
gctgggatgtaggcatacaccaccacgccccactaattttttgtatnnnnnnnnnnnnnnnnnnnnnnnnnnnnnnnnnnnnnnnnnnnnnnnnnnnnnnnnnnnnnnnnnnnnnnnnnnnnnnnnnnnnnnnnnnnnnnnnnnnngagtgagccactgcgcctggcccacttttctttctttccttcttattttgttatgctggcagccatttgcccctgcatggtatgggatcaaagaggacagcctttcctccctcaccttctccaaatctaggtgaaatcacagagtacaaaacgtgagaatgctgaatgtgtaaagttgcagagggatccctaatttgaagactttgacacagaactaacttcttttgacttaaatgaatttaaaatgagccaaaggaccctgaaaagaagacatgttgatttcccactcctagatgctaaagagacttggcaccagctttgttcaaactgtaaaaatagcaatttgcccctactcgctcagagtgggacagtagtgaacagagctgggattccatgcgacagcttgaatgctgaccttcagacatgagacatagggatttggaggccccttagaatgggtagatggtgttatgttccctttctggcatagcattcacttggtgctttggagattaggtgagggccctataggtagttggcctgttggcagaatttatttaggaacagcccttttgaaagtgtcccagtaacaaagcacccagctgcagcaaggaggtggggaaggagggcaccccaaaggacagcgccttcttctcttccacccatgcacggccttgggtgatggaggcgggttccctgtggctgcgtggatcccataggatcaagcccttctttgcatgaagcagtgttgtgactcttctctctccccttcctctgcacttcctttctgtaatccctactgttcttcttagtcccagcttctgcccagggaggcttctacccagacttcttttgcaatttgtccctgggaagagggggtctcccagtgcccccagcttcatcccagcagaaccagcaggatcctcctggtctctcactggccttcctccacacttggtttctatcctcaggggtagaagctcagagctttttatggcccaggagaaaatgtagaccctgagaaacctgtccctgcagaaaggttcccttgggccatgctttgggccctctgctctttatatgtttattctattctccatttttccaccccgtccttaccctaggcctaaacacaggtacagatatgtgcatgctcagggcagctcctaggcctggactgagctctcaggggggaattagataaatattccaacatcctcatgcctggcccatttagtttcatcctttagttacccaggccagtagctttgggttatcccttcctgtagctccaaacccagcacttggagcagcaaaatagggcactgacaggagatgaaactctctcctatctcagaatttgccaacttctgggctgggctcctaggaggtagttttcttgaaggggactgcatcctagttgacctgaattttccagaccaggagggactgctgtgctctcccttctcgccatcatactgtttggctagattcattcagcagtagaagctgtttgatctgttgaccccagcatactgctgtttcttcaccagcttcattgtgtcacagtagcttcctttgggaggatgatgtgatagaacactcagagagagggagggagaagagagatagtgggtatgcttctctagctccccatcttccaggtccacctcttgacttcctgttcccctaaacctgagcacatcacgccaggcctctttgctgccaggacagcatcagctcactcctcagcaataatctagggtatgtgggaaggtcagggctgtggtaaggaatagaatcaaagaggggagtgatacggggtgggggcacttggccgcctgctaaacttggacattaattttatatcatgacccccttttaagccagtgagctgggcttcagtttttcccaggccatgcacatttaatttatttcagagaaactctaattgtattttcactgcagtatcttgtattttttatttgtgatttaagaaatgtgaagagaaaatacacagacacaataatggctaacattgtttctttcattccttgttctagagctaaccactctaaaattgtttggtaatgtcacttagtgtaattaattgtaacatattcttttaaataaattgatttattgatcaaacactaaaaaaaa

SEQ ID NO: 353484 - DNA, 493 bp, Homo Sapiens
  misc_feature (21)..(21): n is a, c, g, or t
  misc_feature (29)..(29): n is a, c, g, or t
  misc_feature (38)..(38): n is a, c, g, or t
  misc_feature (54)..(54): n is a, c, g, or t
  misc_feature (81)..(81): n is a, c, g, or t
  misc_feature (121)..(121): n is a, c, g, or t
  misc_feature (201)..(201): n is a, c, g, or t
  misc_feature (241)..(241): n is a, c, g, or t
  misc_feature (246)..(246): n is a, c, g, or t
cagctggggtgccctttggtnaatggggnacaactttncaaaaaggggctggtnccctaaaaaaaattcctggccaaaaangccaaacctaccctaatagggcccctcaccctaatctccnaaagcacccaagtgaaatgcctatgcccagaaaagggaaacataaacacccatcctaccccattcctaaggggccctccnaaatcccctatgtcctcatgtcctgaaaggtccagcattncaaantgtcgccatggaatccccagctctgttcactactgtccccactctgagcgagtaggggcaaactgctatttttacagtttgaacaaagctggtgccaagtctctttagcatctaggagtgggaaatcaacatgtcttcttttcagggtcctttggctcattttaaattcatttaagtcaaaagaagttagttctgtgtcaaagtcttcaaattagggatccctctgcaactttacacattcagcatt

SEQ ID NO: 353485 - DNA, 1169 bp, Homo Sapiens
  misc_feature (768)..(776): n is a, c, g, or t
  misc_feature (1156)..(1156): n is a, c, g, or t
tggatagaaaagacaaggttagcaagttaaacatcgcagcatccactgtgagtagaatagtaatataaagcacattccctgctaagaacagtggttactccatgtagggtaaaatctcctgaagatctcctaaaatagttacatatgttcaaaatggaatgaatcattcacaatgttacatttttgttcatgaaagttcttcaaggacacccatcaaaaagttgagatataaaggaaaaccaataaaatattttagaacaacagagctgtacacagtatgcatatggtgaaacataaatgtgtgaatgtgaacaactgtttcagatgccatatgaagaccaaaaatattgagaaagtcagatttatcttgcactgtgaacacaaataaaatattgctatgaaatcttggatgtaccttaaaaatgattttttaaatctttactttttctgtgggatagtaaaagggcatttatgaagaaaatgattacatgagtgaggaaagtcacttgggaggggagagatggacaagtttgattcttcaaaagaaaaataataaaggagattgaaggaccttttttggcaggggaagaatttttctaaggactgtattcaaatccactttgtaggggaggaaaagctattccatttaatactttgcctgtactcaaagttaggttgttctaaagaaaggtctgcattcaactcaaaggttggcgaacctgctgaaaacatggatttgcagtttgttacatgatcagtgtttgaacnnnnnnnnnttagaacctaatattttatttctagctcctcagagacagaacagctaaagaccaactataacttgtattcagacagattactgacattctatgaatatggcccactgattggcagagctctaaaagtgtcaattactttgatatattgacataaagagttgatacgaccttaatataaaaatcacaaactatcctgtagtcttcaaaaacattgcaagtcttcaaaaattctgcaaaacgtctttccatctatcaccttgtcatatgtatggccctgttatatagtggggtctcaaagtgttcattatattaatgaaggaatgaatgaatcctgttcctacaaccacctggtaaaaataggtaaaatgagtacaactatnacgctcccgattc

SEQ ID NO: 353486 - DNA, 1412 bp, Homo Sapiens
agcggggtggcctaacaaccggcagcggactcctttggctatggcctccaactttaagaaggcaaacatggcatcaagttctcagcgaaaaagaatgagccctaagcctgagcttactgaagagcaaaagcaggagatccgggaagcttttgatcttttcgatgcggatggaactggcaccatagatgttaaagaactgaaggtggcaatgagggccctgggctttgaacccaagaaagaagaaattaagaaaatgataagtgaaattgataaggaagggacaggaaaaatgaactttggtgactttttaactgtgatgacccagaaaatgtctgagaaagatactaaagaagaaatcctgaaagctttcaagctctttgatgatgatgaaactgggaagatttcgttcaaaaatctgaaacgcgtggccaaggagttgggtgagaacctgactgatgaggagctgcaggaaatgattgatgaagctgatcgagatggagatggagaggtcagtgagcaagagttcctgcgcatcatgaaaaagaccagcctctattaagatcagtgtcttctttttctactgcaagcacatgtaactagatttagtgcctgccatggtgtgaaatctggcttttgagaacacaaacttttcccccacggacctccctttatcactttaatagtgaccttgagcctattttagccgtttggaagtgttctttgatattacagttctttgtaaaatgacctgcgaattaccctaattctcaaaagcaaaacaagagcacacaagcgtgaagaaaaggatcttaaagctttgagcacctgccattttgccttgcatcgtttccctcgtcatgcatttccacatatccacaaacacagaacgactttagacaagcacatgttacacctgtgttgccacaagcagtcattcttgacggctccagtttttatttgacacttgagtttagttttctcttttataaacccagtgaactcctgcactggcatttggatgtgtgttaatgctatttgttttgtcttaaaagtaaaacctttctcagtttgaacttgtattctctaaggatgagttctttagctttgcttatgagttcctcttctcaattattgtgttgaaggcagcctattagatacaaaactccttaccagcctatggacagaaaatgaataatcctttgctactttcctggcatgaattgctttttgccttggaaggctgctggtttgtaaaactagcagaatttttatatcacctaagcctaaatgatgctctaaaaatagttttggcaaagctaagactggaaaagagtcttgttagtaatttgtgcttgaataaaatggggagagccaggctaacgcaacactaggatggattcagccaaaaaaaa

SEQ ID NO: 353487 - DNA, 801 bp, Homo Sapiens
gggagtgtacacgtcggttgcctaacaaccggcagcggactcctttggctatggcctccaactttaagaaggcaaacatggcatcaagttctcagcgaaaaagaatgagccctaagcctgagcttactgaagagcaaaagcaggagatccgggaagcttttgatcttttcgatgcggatggaactggcaccatagatgttaaagaactgaaggtggcaatgagggccctgggctttgaacccaagaaagaagaaattaagaaaatgataagtgaaattgataaggaagggacaggaaaaatgaactttggtgactttttaactgtgatgacccagaaaatgtctgagaaagatactaaagaagaaatcctgaaagctttcaagctctttgatgatgatgaaactgggaagatttcgttcaaaaatctgaaacgcgtggccaaggagttgggtgagaacctgactgatgaggagctgcaggaaatgattgatgaagctgatcgagatggagatggagaggtcagtgagcaagagttcctgcgcatcatgaaaaagaccagcctctattaagatcagtgtcttctttttctactgcaagcacatgtaactagatttagtgcctgccatggtgtgaaaatctggccttttgagaacacaaactttttcccccacggaacctcccctttatcacctttaatagtgacctttgagccctatttttaacccgtttggaaagtgttcctttgaatattacaggttctttggtaaaatggacctggcgaaattaccccttaattcctcc

SEQ ID NO: 353488 - DNA, 1140 bp, Homo Sapiens
cccactgtgggctggggacgcctgcccttctgtctccggacgctctaggcgagttcagcttggggtgtgagtgagacagctcgccagctgcatccctgcagacagaggatgtgtgtccacatgagtgtttctgtgtgggaaatgcttcctggctctgggaaactttttctgcccattctgtggttcccagggagcgtggccctggtgggccaggggtggtttgacctcttcagcccgtccggtggcctggaggccggaggtctcctgagtgtctgcccctgcagtggcttcttgtcgcctgctgctgggcgtgatgtcgctggaggtgctggcagggactctgatttggtggtccgcgctgcccctgccctgcctctgtcctggctctgaactagtagatgatggtgccagagggcagggagctcgcctggggagagggctgtgccccgtagggacagtgcccaggtgaaggatgcccctggtcctccagggcactgactttgcccttttttcccgttgatagtcatggctcagaggtgcttgtaaatgtcttgggaagaggtttctgtaacccctgccctggtgtgaggaggaaatggctctggcctggctgcctggccgtggcttctctttggctcccaaagagaaggacagtgttgggagtatctgccgtggcttctctttggctcccaaagagaagcacagtgttgggagtatctgccggcgctgtccaggtcctttagtcagcgtcactccatctgatgtgcagaagctgggctgcacctgcgggggtgggcatagaccgggctgggtctgcagcagcccctggtcctgagcaggcggcagtgaacagcactggcccacctcccactcacagcccctctgtcccctctgcagtgcacccaggtgggcccctctgcgtgcctttgggtgctcccctctcgtggtcgttctggcccgaggcccttagagtatggaggctgagccaggccttgggtttccccagcacagcctcctgtcgctgcatgcgacgtgttgggatttttggatgaaagactctcccacgctctgttggtggacttagctgcctcactggaagtatgtgggggaaggggttgtatgtacctttccacctctatt

SEQ ID NO: 353489 - DNA, 1159 bp, Homo Sapiens
  misc_feature (648)..(685): n is a, c, g, or t
  misc_feature (692)..(692): n is a, c, g, or t
  misc_feature (701)..(701): n is a, c, g, or t
gtgcagaagctgggctgcacctgcgggggtgggcatagaccgggctgggtctgcagcagcccctggtcctgagcaggcggcagtgaacagcactggcccacctcccactcacagcccctctgtcccctctgcagtgcacccaggtgggcccctctgcgtgcctttgggtgctcccctctcgtggtcgttctggcccgaggcccttagagtatggaggctgagccaggccttgggtttccccagcacagcctcctgtcgctgcatgcgacgtgttgggatttttggatgaaagactctcccacgctctgttggtggacttagctgcctcactggaagtgatgtgggtggaaggtggttgtatgttaccttttccacctctcattgttttccccagaacattgtagatgggggttggcagagggagaaataagccagccacggcagtcgcttggtttcccaggtggaatgggctaacacaggagatgatgggaacctgtcccgcagtccctgcatgaccattggccctgctggcctgcccgtgtgggcatcctggggttcttagggtcccagaacaagccccaggcaagctgaaacttgggtggggaggggacatgaggaggataaacagctgactgtggcggcaaggannnnnnnnnnnnnnnnnnnnnnnnnnnnnnnnnnnnnngcaaggnggggggttnggatcaaaagtgtttaaaattaatatgttgtcagtgattagaacaacactgtttacataaaaaccatttttctaattctaacaagttagaatgtgaggaaggaatgaacatgagtgtttaggaacctgccctttggtgctgggctggcgtcccgcactggggtgtcctcgctgtctgggggctgctctgctgccccggcccaggtccccttgtggtgttgccagacgggcctcatggtctgctgtgcagagagaggcaggaaggatccctgaagagtcttggagaaaaggttctgtgccctcaggtggggcttaccccctcgtatttataatcttaatttatatagtgaccaccgtggaaacaaacgcctcttgtattgtcatgtacatagtccatacctgagtgctgtacataagttgttctgtgtataaataaaacaagcctgtttttgatcttca

SEQ ID NO: 353490 - DNA, 445 bp, Homo Sapiens
agttgattaagaacaacactgtttacaataaaaaacccatttttcctaaatcctaaacaagttaaaaatgtgaaggaaaggaatgaaccatgaagtgtttaggaacctgccccttgggtgcctgggcctggcgtcccgcactggggtgtccctcgctgtcctgggggctgctctgctgccccggccccaggtccccttgtggtgttgccagacgggcctcatggtccgctgtgcagagagaggcaggaaggatccctgaagagtcttggagaaaaggttctgtgccctcaggtggggcttaccccctcgtatttataatcttaatttatatagtgaccaccgtggaaacaaacgcctcttgtattgttatgtacatagtccatacctgagtgctgtacataagttgttctgtgtataaataaaacaagcctgtttttgatcttcc

SEQ ID NO: 353491 - DNA, 876 bp, Homo Sapiens
tctggaacttgactaatctcatgatcaaaaaccttagtggtggtatgagcaagggattagtcaagttccagaaaataacttttcagttcaacctacacatactgtctctcaagcatctggtgacacttcgcttaaacctgtgcttagtgcaaactcagagccagcatcctctgaccctgctcctagtgaaatgttatctccttcaactcagctcttattttatgagacctcagcttcttttagtactgaagtattgctacaaccttcctttcaggcttctgatgttgacaccttgcttaaaactgttcttccagctgtgcccagtgatccaatattggttgaaacccccaaagttgataaaattagttctacaatgttgcatctcattgtatcaaattctgcttcaagtgaaaacatgctgcactctacatctgtaccagtttttgatgtgtcgcctacttctcatatgcactctgcttcacttcaaggtttgaccatttcctatgcaagtgagaaatatgaaccagttttgttaaaaagtgaaagttcccaccaagtggtaccttctttgtacagtaatgatgagttgttccaaacggccaatttggagattaaccaggcccatcccccaaaaggaaggcatgtatttgctacacctgttttatcaattgatgaaccattaaatacactaataaataagcttatacattccgatgaaattttaacctccaccaaaagttctgttactggtaaggtatatgctggtatgtccaacagctgccttctgatacatttggtaatctactgatcattctgttcctcataaggacatggggcatgtttgccaattaacgagctgttactacccaccagaag

SEQ ID NO: 353492 - DNA, 1592 bp, Homo Sapiens
  misc_feature (46)..(82): n is a, c, g, or t
  misc_feature (1396)..(1404): n is a, c, g, or t
  misc_feature (1490)..(1490): n is a, c, g, or t
  misc_feature (1521)..(1521): n is a, c, g, or t
gatgtatacgatcactatggggaatgggctcacgcggggcggccgnnnnnnnnnnnnnnnnnnnnnnnnnnnnnnnnnnnnnatcaggccaaatcggccgagctcgaattcgtcgagagcggcgtggttagatgttcatgaaatgtgaccacctctcaatcacctttgagggctaaagagtagcacatcaaaaggactccaaaatcccatacccaactcttaagagatttgtcctggtacttcagaaagaattttcatgagtgttcttaattggctggaaaagcaccagctgacgttttggaagaatctatccatgtgtctgcctccatatgcatctgggcatttcatcttcagtcccctcattagactgtagcattaggatgtgtggagagaggagaaatgatttagcacccagattcacactcctatgcctggaagggggacatctttgaagaagaggaattagggctgtggacactgtcttgaggatgtggacttccttagtgagctccacattacttgatggtaaccacttcaaaaggatcagaatccacgtaatgaaaaaggtccctctagaggatggagctgatgtgaagctgccaatggatgaaaagcctcagaaagcaactcaaaggactcaaagcaacggacaacacaagagttgtcttcagcccagtgacacctctgatgtcccctggaagctttgtgctaacctgggactgcctgacttcctttagcctggtcccttgctactaccttgaactgttttatctaacctctctttttctgtttaattctttgctactgccattgaccctgctgcaggatttgtgtcattttcctgcctggttgctgagactccattttgctgccacacacagagatgtaagaggcaggctttaattgccaaagcacagtttgagcagtagaaaacaacatggtgtatatctcaaattgcctgacatgaagaggagtctaacggtgaagtttcacttttcatcagcatcatctttcacatgttcattatcatccgctcttattcttgcatgtttaaacacttaaaatttttagtataatttttagtgtgttttgaagtggtgactaggctttcaaaaacttccattgaattacaaagcactatccagttcttattgttaaactaagtaaaaatgataagtaacatagtgtaaaatattcctttactgtgaacttcttacaatgctgtgaatgagaggctcctcagaactggagcatttgtataataattcatcctgttcatcttcaattttaacatcatatataatttcaattctatcaattgggcctttaaaaatcatataaaaggatataaaatttgaaaagagaaacctaattggctatttaatccaaaacaacnnnnnnnnnccttcaatggaatcagaaagcttgtcaatcactcatgcgttttagagtaattacttttcaagtatcaattcaatcctcatacattngaattcaagttgttttttgtcaatttacagntgtcaattgatcttcaagctgcagggtgcctagaaatgggccgttgtctgtagccctggcatgtgcaccgg

SEQ ID NO: 353493 - DNA, 1847 bp, Homo Sapiens
  misc_feature (1173)..(1699): n is a, c, g, or t
ggcctgtaccggtccggaattccgggatatcgtcgaccacgcgtcggatattgaaacacagaaagtttacatatcctagcatgataaatttagctagttctctctaggcttgcctatcaatgggagctctagctaaatttatcatgctaggatattgaaacacagaaagtttacatacatttatgaagggtcaatttagttggacagtgaggtattgtcttagtggaaaaaaggagaattagtctgatcaaatcgtgaagtaatacagtgaacttgcaggtgcacaaaataagagggccacatctatatggtgcagtctggaattctgtttaagtttgtaggtacctcttggacttctgaattgatccagttgtcatccaccacagacatctcacatcagatacagaacagtttccaagagtggacaacagagaacaacctgctggaaagacctgggcagaaatggagagccctgcgggaaccatgctacatgctcatccaaagagagaatgcacatctgatgagactgaaagttctttgttgttttagattgtagaatggtattgaattggtctgtggaaaattgcattgcttttatttctttgtgtaatcaagtttaagtaataggggatatataatcataagcattttagggtgggagggactattaagtaattttaagtgggtggggttatttagaatgttagaataatattatgtattagatatcgctataagtggacatgcgtacttacttgtaaccctttaccctataattgctatccttaaagatttcaaataaactcggagggaactgcagggagaccaacttatttagagcgaattggacatggataaaaaccccagtgggagaaagttcaaaggtgattagattaataatttaatagaggatgagtgacctctgataaattactgctagaatgaacttgtcaatgatggatggtaaattttcatggaagttataaaagtgataaataaaaacccttgcttttacccctgtcagtagccctcctcctaccactgaaccccattgcccctacccctccttctaactttattgctgtattctcttcactctatatttctctctatttgctaatattgcattgctgttacaataaaaattcaataaagatttagtggttaagtgcnnnnnnnnnnnnnnnnnnnnnnnnnnnnnnnnnnnnnnnnnnnnnnnnnnnnnnnnnnnnnnnnnnnnnnnnnnnnnnnnnnnnnnnnnnnnnnnnnnnnnnnnnnnnnnnnnnnnnnnnnnnnnnnnnnnnnnnnnnnnnnnnnnnnnnnnnnnnnnnnnnnnnnnnnnnnnnnnnnnnnnnnnnnnnnnnnnnnnnnnnnnnnnnnnnnnnnnnnnnnnnnnnnnnnnnnnnnnnnnnnnnnnnnnnnnnnnnnnnnnnnnnnnnnnnnnnnnnnnnnnnnnnnnnnnnnnnnnnnnnnnnnnnnnnnnnnnnnnnnnnnnnnnnnnnnnnnnnnnnnnnnnnnnnnnnnnnnnnnnnnnnnnnnnnnnnnnnnnnnnnnnnnnnnnnnnnnnnnnnnnnnnnnnnnnnnnnnnnnnnnnnnnnnnnnnnnnnnnnnnnnnnnnnnnnnnnnnnnnnnnnnnnnnnnnnnnnnnnnnnnnnnnnnnnnnnnnnnnnnnnnnnnnnnnnnnnnnnnnnnnnnnnnntgtaaagttgtaaagaaggaacggagaaagtcaaaggaatcgccctagggacctggaagtgtaccgttaacgttggcgaaacaccaaacccgccgagttaatgccccgtacaggcgctaagaggcattttcgggatgtggggcctttg

SEQ ID NO: 353494 - DNA, 1385 bp, Homo Sapiens
ttcccccaaccccttaaaaatgggtttattgaatttattattattccccctaatttactttaaaaccttggattttccccaaaaggaaataaaaggcaaatgcaatttttcccacagacccaatttcaataccatttctacattctaaaaacaacaaagacttttcagtctcatcagatgtgcattctctctttagatgaaaatgtagcatggttcccgcagggctctccatttctgcccaggtcttcccagcaggttgttctctgttgtcaatcttggaactgtctgtatctgatgtgagatgtctgtggtggatgacaactggatcaattcagaagtccaagaggtacctacaaacttaaacagaattccagactgcaccatatagatgtggccctcttattttgtgcacctgcaagttcactgtattacttcacgatttgatcagactaattctccttttttccactaagacaaatacctcactgtccaaactaaattgacccttcataaatgtatgtaaactttctgtgtttcaatatcctagcatgataaatttagctagttctctctaggcttgcctatcaatgggagctcttagatcttcttccttcttgatttaattaacaatgtaaatttgggctaaaagtcaattaattaattttgccagtttgaaaaactcgactactgatttgcttactaattcatctatctcctttatgttttttattttgctccctttctaacttctttagatatcaaattccattgatttttttcctttcttatgaataaagccatttttgttggaaaatgccaaaaaaaatttaaaggatccaattaacataaatttgattaacaacaaaataaatcaattgagtgaaaggaaacttaaccaaacttcaaaactatagaataataaatttagaattacttatccttaacatctacatttatagatagcatatatagcaatagagcatagtacacactgccaaaaagttaatcacaagctttagtaaacagccaaatgtggatcagggactttctgagttgttaacccacagcagcatattttccctaatcgttcttgtcgttggtgaacttctccagacttttgcttgcagtggtggcaaatgtccgtgtgcacatgccagggctacagacaacggcccatttctaggcaccctgcagcttgaagatcaattgacaactgtaaatttgacaaaaaacaacttgaattcaaatgtatggaggatgaattgatacttgaggtaaacagaagtgactcttcaaaatagttcagaagcacaaatgcaccattttaaaagtaattactctaaaacacatgagtgattgacaagctttctgattccattgaagga

SEQ ID NO: 353495 - DNA, 1155 bp, Homo Sapiens
  misc_feature (137)..(200): n is a, c, g, or t
  misc_feature (911)..(911): n is a, c, g, or t
cccttagctatttgtgtgcattagggcaccatagtaattatttcatgcaacggattgaggagaagtgggaaacccatccactactgagtatttcatgtttctagagcctcttagaatattatctcacaagaaaattnnnnnnnnnnnnnnnnnnnnnnnnnnnnnnnnnnnnnnnnnnnnnnnnnnnnnnnnnnnnnnnnggttaagcatgaactggttttgtgccttgacgagaataaaaactagccattcgttacaataaattaacactatgtacaatcatttcacaggctttgttccactaaaattattaacatccctaccatccatccatccatccatccactcggggataagaaaggacgcgctgggtgggtccaggttctagagtcaacatcctatggttaatgtggaggccgagacttggcgggtcggaatcgctgctgcctgacaggactgcccaggtctcctaaaggtgaagagtttcattacaagaaagagaagtaggaggtaagagaaagacgagggggaggggaattgtaggaggataactccacagaagaagagtaagtaggaaaaccaaaaggtttacagcaaagttgaaggtcggtgagctaattgcagagactgctgtgcaaaaaaggttaaaatcacgctcggagacctgcacttattcgctgcagacggccatcgagggtcaaataaaatgagtgggtgcgcaaggaggagtgtggggaggcggagctggggaagagctgtgaggggctggctgggggtccgggccgcggcggggccgggcgggtaggggcggcctagctgtgcgagtagaagccatagtagccgctaatgtccttggcgcagttcttctcgcagtcccgctgggccagcacctcgctcttgagcggggacgnaactctcggacacgggcgtgtcggccggcgagatccgcctccgcttggcctgctcgtaaatccccgagtcgctggagtcgatggacttgatcgaggagggcgtctcgatccagctggaatcggacaggtccttgggcttggcgtcctcggcggcgccgggcggcagcggcgagcgctcggcggccaggccctcggcctcctcgcccaggtagggattggcgccggccatgcgcgcggcggccgc

SEQ ID NO: 353496 - DNA, 2368 bp, Homo Sapiens
  misc_feature (57)..(57): n is a, c, g, or t
  misc_feature (323)..(538): n is a, c, g, or t
cactttaaattacaatggtactttattttaataatcacaagatttaacacgtaaaanaaaaagatagcactaataaataacaaaagtggaatgcttatcaaagtaacgacataatgttcagttgagaatcagtcacttcaacagagtaaagctctaaagacaccagacgaaccaatacttgttggaatatgccatacaactttcttactgtggggattacaggggcagccctggttctgtgtggtcagagttatagtcagacagattcagcacaattgtgtttcagactaaattgtttttgagacacggtcttgctctgtccnnnnnnnnnnnnnnnnnnnnnnnnnnnnnnnnnnnnnnnnnnnnnnnnnnnnnnnnnnnnnnnnnnnnnnnnnnnnnnnnnnnnnnnnnnnnnnnnnnnnnnnnnnnnnnnnnnnnnnnnnnnnnnnnnnnnnnnnnnnnnnnnnnnnnnnnnnnnnnnnnnnnnnnnnnnnnnnnnnnnnnnnnnnnnnnnnnnnnnnnnnnnnnnnnnnnnnnncagactaaattttgaagttgtggatcatctacataagatgtcgaggatgcccctcctggaataaattaaaacctgactgactgctagaatttccagtagccaatatgggtgttcttacattcctgaaaacagcaaaatgaaacctaataggtgctggtattcacctctgatgtatcaggtttactgtgtgacaagtcttaatgctcctaggtttacattgtataggcagcagagtatttttaatgtgttcaagtagaatacggggaaaattaggatcaaatgagaattcatttctctagtgtcaataaccctcaactcctcagggaacagttaagccatcaaaactaaaatagctttatattcaaatgcttcagtaacatgttaaagtcactaaaaactaaatgtgtaatttactttgtagaggtaagaacacacaggaatgaactgacaaacagaacaaattatgaaaaacgctaatcccctaagcatctgcatgtccagcccttgtgtctactgtagtctacccaccccactccaaaaaaaggttcaggttatatcccaaagtgacctgttgctgaattactttcaaataagcaaagtgctctgtagtgtataagctactcaggtctacacattctagaatgatgcacttctgtagtcctggctgtaaaatttggaaatctactcaggttccgactccgtttaaaaccctttccaatgaacagaatttgtgatccctgggttcagacagtacaattaaaataccccaagaggtgaaaatttcatatttttaaataaaagccatggaaggattcttatggctaaaagctaaatctgaattatccgtgtctggcattgtataaacatctttttaagttcattttgctggacttgattaatgatttcaggttctggaggactcttctgaacttttgacactgcaaagtttatcccatgggttaatccagcttgggtaatactagcaacctggaccatggaacttcgaatcttggcaaagggagagactgctctgctgctactgctctctgaaggagaaggagttacatgaagccctgtctcaagttcaagcatgctggaagcggaggtgggggttttttgagatgcaactgaatgcgctggctcaactgacaaaaactgtgggcctgttgcagaaagagagacatctaattgcgatggccgagaaggtgtctgttctgttgattctgattgggtttcatttgaaacttgattggtcatttgatttctttcctgactagcctgctgagacacagatctggtctctgataggtgggtcactttgttctgttgcatcttgcacaaatctgtggcagtaaatatccataggcttggcaaagccagtcaatatgtgtacgtcgccagcagaaggacttttcttcgaaaggatgactcctggccttttccaagcccactcccatgaccaacactaatctctgaaggagcatgcacgctactatctgtgctgctaagagactgggaccgactgccccatcgaggcgctgaggcaataataccaccactaggaagaacgttatctattggccctacactctctaatgagcttagctaactgcctgtcttcatccgacttagaatttgtaaggattcactcagagtggtatgagtcattatctgaagacatgtccccatcagactctgcctgaaccttatccatcactcctgtcttttccatagtttcaagactactatctgatttcctaagatttactcttaagtttgcttttagaaagttaactatcatttcagtttgataaagtttcctagcattcg

SEQ ID NO: 353497 - DNA, 1485 bp, Homo Sapiens
  misc_feature (1376)..(1376): n is a, c, g, or t
  misc_feature (1388)..(1434): n is a, c, g, or t
  misc_feature (1443)..(1443): n is a, c, g, or t
  misc_feature (1446)..(1446): n is a, c, g, or t
  misc_feature (1470)..(1471): n is a, c, g, or t
  misc_feature (1475)..(1475): n is a, c, g, or t
ggcgacttcctgtctctccactttctttccctctccgttttggtgggctggttgaagatgaaatccactgaggagggaagtccagcaccctgtgtgccagtccagaactggcccatctgtagaccccctgaaaatcatatgggcttggatttggatattctcaacagaaagggttaaaggctgatggtacctaaagcctggtacttgaattttgatcaagataagctgccttaagttctcttcattacacaaatgatcctagataattgatagatcctgtggttcaactggatttctagatagaagctggattcatgtgatgccagaggagtaaaatttcaagagactgaaaccagatctgagtttcgctgttccagtctggacctctttggtgctgtaaatcctggatatactgtagatgagtactgcgtttttcttttatggactctcttcagcttctggagacctcactatcctattatgtctttgtgtgaagacatgctgctttgtaattatcgaaagtgtcgcatcaaactctctggctatgcatgggtcactgcctgctctcacatcttctgtgatcagcatggcagtggtgagtttagtcgctcaccagctatctgtcctgcctgcaacagtaccctttctggaaagctagatattgtccgcacagaactcagtccatcagaggaatataaagctatggtattggcaggactgcgaccagagatcgtgttggacattagctcccgagcgctggccttctggacatatcaggtacatcaggaacgtctctatcaagaatacaatttcagcaaggctgagggccatctgaaacagatggagaagatatatactcagcaaatacaaagcaaggatgtagaattgacctctatgaaaggggaggttacctccatgaagaaagtactagaagaatacaagaaaaagttcagtgacatctctgagaaacttatggagcgcaatcgtcagtatcaaaagctccaaggcctctatgatagccttaggctacgaaacatcactattgctaaccatgaaggcacccttgaaccatccatgattgcacagtctggtgttcttggcttcccattaggtaacaactccaagtttcctttggataatacacctgttcgaaatcggggcgatggagatggagattttcagttcagaccattttttgcgggttctcccacagcacctgaacccagcaacagcttttttagttttgtctctccaagtcgtgaattagagcagcagcaagtttctagcagggccttcaaagtaaaaagaatttgagccacgcatagtgtcacgcacctgtgatcccagctacttaggaggttgaggctgggaggatnacttgagcccannnnnnnnnnnnnnnnnnnnnnnnnnnnnnnnnnnnnnnnnnnnnnngcgtgggcnacnagagtgagaccctgtttctaaaannaaanaaagataatt

SEQ ID NO: 353498 - DNA, 1234 bp, Homo Sapiens
ccagacgcaggtttgtaaacgacggcagtactatacggtcctaaggtagcgaggctgggtggcgaatcggcacgagggctggttgaagatgaaatccactgaggagggaagtccagcaccctgtgtgccagtccagaactggcccatctgtagaccccctgaaaatcatatgggcttggatttggatattctcaacagaaagggttaaaggctgatggtacctaaagcctggtacttgaattttgatcaagataagctgccttaagttctcttcattacacaaatgatcctagataattgatagatcctgtggttcaactggatttctagatagaagctggattcatgtgatgccagaggagtaaaatttcaagagactgaaaccagatctgagtttcgctgttccagtctggacctctttggtgctgtaaatcctggatatactgtagatgagtactgcgtttttcttttatggactctcttcagcttctggagacctcactatcctattatgtctttgtgtgaagacatgctgctttgtaattatcgaaagtgtcgcatcaaactctctggctatgcatgggtcactgcctgctctcacatcttctgtgatcagcatggcagtggtgagtttagtcgctcaccagctatctgtcctgcctgcaacagtaccctttctggaaagctagatattgtccgcacagaactcagtccatcagaggaatataaagctatggtattggcaggactgcgaccagagatcgtgttggacattagctcccgagcgctggccttctggacatatcaggtacatcaggaacgtctctatcaagaatacaatttcagcaaggctgagggccatctgaaacagatggagaagatatatactcagcaaatacaaagcaaggatgtagaattgacctctatgaaaggggaggttacctccatgaagaaagtactagaagaatacaagaaaaagttcagtgacatctctgagaaacttatggagcgcaatcgtcagtatcaaaagctccaaggcctctatgatagccttaggctacgaaacatcactattggctaaccatgaaggcacccttgaaccatccatgattgcacagtctggtgttcttggcttcccattaagtaacaactcccagttttcctttggataatacaccctgttccgaaatcggggccgatgggagatgggagatttttcagtttcaggaccatc

SEQ ID NO: 353499 - DNA, 251 bp, Homo Sapiens
cggatgcccctcagccttgctgaaattgtattcttgatagagacgttcctgatgtacctggttccaaaagaaaaaagatttttaaggtattgggtacaaagttatatattgtaaaatgttatacaaacacaaaaggaaaagaaagatgcttatatagggatgttattttatcatttagaacccagtttaagaagcaatcaggatacacaatgaggcacagaaaacaataagttatgttactaaatgcatag

SEQ ID NO: 353500 - DNA, 1363 bp, Homo Sapiens
ggcagtaccccagcggtctaaggtagcgaggcctgggtggcgaattcggcacgaggcttccttctcgagcccggagccgctgccgccgcccccagctcccccgcctcggggagggcaccaggtcactgcagccagaggggtccagaagagagaggaggcactgcctccactacagcaactgcacccacgatgcagagcatcaagtgcgtggtggtgggtgatggggctgtgggcaagacgtgcctgctcatctgctacacaactaacgctttccccaaagagtacatccccaccgtgttcgacaattacagcgcgcagagcgcagttgacgggcgcacagtgaacctgaacctgtgggacactgcgggccaggaggagtatgaccgcctccgtacactctcctaccctcagaccaacgttttcgtcatctgtttctccattgccagtccgccgtcctatgagaacgtgcggcacaagtggcatccagaggtgtgccaccactgccctgatgtgcccatcctgctggtgggcaccaagaaggacctgagagcccagcctgacaccctacggcgcctcaaggagcagggccaggcgcccatcacaccgcagcagggccaggcactggccaagcagatccacgctgtgcgctacctcgaatgctcagccctgcaacaggatggtgtcaaggaagtgttcgccgaggctgtccgggctgtgctcaaccccacgccgatcaagcgtgggcggtcctgcatcctcttgtgaccctggcacttggcttggaggctgcccctgccctccccccaccagttgtgccttggtgccttgtccgcctcagctgtgccttaagggactaattctggcaccccctttccagggggttccctgaatgcctttttctctgagtgcctttttctcccttaaggaggcctgcagagaaaaggggctttggggctctgccccccctctgcttgggaacactgggtattctcatgagctcatccaaagccaaggttggacccctccccaagaggccaacccagtgccccctcccattttccgctactgaccagttcatccagctttccacacagttgttgctgcctattgtggtgccgcctcaggttaggggctctcagccatctctaacctctgccctcgctgctcttggaattgcgcccccaagatgctctctcccttctccaatgagggagccacagaatcctgagaaggtgaatgtgccctaacctgctcctctgtgcctaggccttacgcatttgctgactgactcagcccccatgcttctggggacctttcctacccccatcagcatcaataaaacctcctgtctccagtgaaagaa

SEQ ID NO: 353501 - DNA, 380 bp, Homo Sapiens
  misc_feature (55)..(100): n is a, c, g, or t
atttacgataagtattctattggggaggaaaggtaactctgatctcagttacagnnnnnnnnnnnnnnnnnnnnnnnnnnnnnnnnnnnnnnnnnnnnnncagtcctatttatctgcagtcgtattaagtcctattgctagaataggttactacaaaaaaggttatattctgaaagaaaaataactgacattatatataaccaattaatttaaagtattgccatttaaattacacactgagagcatgtcctatgcagacatagatttttctgttcatttatttttcttcattgcagtggattgatttgataaatagatgtgttgaattactacatttgctgtacatattatttaataaactttattcagaattgcgtggc

SEQ ID NO: 353502 - DNA, 345 bp, Homo Sapiens
  misc_feature (4)..(5): n is a, c, g, or t
  misc_feature (12)..(12): n is a, c, g, or t
  misc_feature (21)..(22): n is a, c, g, or t
  misc_feature (27)..(27): n is a, c, g, or t
  misc_feature (38)..(38): n is a, c, g, or t
  misc_feature (47)..(47): n is a, c, g, or t
  misc_feature (67)..(67): n is a, c, g, or t
  misc_feature (81)..(81): n is a, c, g, or t
  misc_feature (89)..(89): n is a, c, g, or t
  misc_feature (154)..(154): n is a, c, g, or t
agtnnaatgatnataataatnnagtanaccaattttanggttagaantaaaattttgcacatatgcntcttgataatctgnaaatgtantctgtggcttaattatcttattcatacacatttcacttggctttttacccctaggaaataattgnccaagtatatatctcgtcttctttcttgtaactttgattaaactgcttacttcaacttacaacattgtaaagccagaatacctcattttaacagtgaaaaaaaatatgatgacctgatgtgttctcttgtatttgatttgaactacctaaataggcttaactgtaataataaatatacaattttggcaggc

SEQ ID NO: 353503 - DNA, 1613 bp, Homo Sapiens
  misc_feature (929)..(929): n is a, c, g, or t
  misc_feature (932)..(932): n is a, c, g, or t
  misc_feature (940)..(940): n is a, c, g, or t
  misc_feature (948)..(948): n is a, c, g, or t
  misc_feature (977)..(977): n is a, c, g, or t
  misc_feature (1007)..(1007): n is a, c, g, or t
  misc_feature (1035)..(1035): n is a, c, g, or t
  misc_feature (1279)..(1279): n is a, c, g, or t
  misc_feature (1294)..(1294): n is a, c, g, or t
  misc_feature (1315)..(1315): n is a, c, g, or t
  misc_feature (1323)..(1325): n is a, c, g, or t
  misc_feature (1343)..(1343): n is a, c, g, or t
  misc_feature (1355)..(1362): n is a, c, g, or t
  misc_feature (1364)..(1364): n is a, c, g, or t
  misc_feature (1366)..(1366): n is a, c, g, or t
  misc_feature (1371)..(1372): n is a, c, g, or t
  misc_feature (1381)..(1384): n is a, c, g, or t
  misc_feature (1387)..(1387): n is a, c, g, or t
  misc_feature (1403)..(1403): n is a, c, g, or t
  misc_feature (1478)..(1478): n is a, c, g, or t
  misc_feature (1545)..(1545): n is a, c, g, or t
  misc_feature (1548)..(1548): n is a, c, g, or t
  misc_feature (1558)..(1558): n is a, c, g, or t
  misc_feature (1610)..(1610): n is a, c, g, or t
cacgaggctccctggtgtttggcaccatagcgttgtcacttacaaccattgccttgggacacacagagtgaactgtttgagtgataagtaatttaggtagaaactttacccttaatttcaaatgataccaaacagctcattactaccccaagggacgctctccgtagcttctggattccccagtttccttctagaaacaaggactccaatagcactataaccctaaacaggccctaacccagaagaatacaccacaaaatgcgattgattttctcaaaatatcacagtcttagacactatacaaataattcaagaaaattctttctaccctgcagtggatatagtattctattatattctccagcaaaacttttaggacttttcaaactcatttctaagccaaatagtttagataaatatttacccttatattgggggggaattcaggctcaccatttgccgaggcaagcccatcaacagtctagaggcatattctgtgtcattccttcccgtctccttcatagaatactactttttccttttgtctcctggccattctccatcatctgctgattattgctaaccacaggatgctggcaaagcttacagtgataggcacatgtgttcagtgatgtccaatacactcttatcacagtgggtattgcttcttactcttttcaaatgcattattctacccctcaacctacatccaatcattaggactataccttgactggagcccagaaactggggaccaatacttaattcaaatagcagggggcttgctcacaaactttaagcccaacaagaagcacagcactttgaaaagtcaaataggcctttggtagctctgtacatttgcaattttacatttgttattagtttatagcactaataacacttcagtcgtgaatctacagtctcaatanganaaaaaaanagaaaatnaaatagaaatagtggtaccttgctgctantatacttagtaacttataccccaatataanaataagtattaaatacagattgtgtatncatatctttgtgtgtatatgccaactgtactacttaacctcactgatgagcaaatagaaaaatacacaaattgtcatagtgaaaataagtcttggtcaattcagatgatacgtgaacctgataaatgctctaatagatatgctattttgtcctgtattgcttgttttacagtatggtgcatgttgtttgctaagtaaaatgataataataataaagtataccaattttaaggttagaattaaanttttgcacatatgcntcttgatattctgaaatgtantctgtggnnnaattatcttattcatacncatttcacttgnnnnnnnncncngcggnnagaattggnnnngcntatatctcgtcgtctntcttgtaactttgattaaactgcttacttcaacttacaacattgtaaagccagaatacctcattttaacagtgangaaaaatatgatgacctgatgtgttgtcttgtatttgatttgaactacctaaataggcttaactatnatnataaatatanaattttggcaggcattttttcctttgtttggatgaacattttgttattggtntac

SEQ ID NO: 353504 - DNA, 1007 bp, Homo Sapiens
ccctgtcctctgtggaagccaatggctgttattcgcagggaattgtagcttcctccccagaaggtcttcttttttccattaagtcctctccgcaagctgtttggagcccctcaccggggagatggcgctttcttttccttttcttattttttacagcgcggagggaggagaggaaggagggggatcagagctgtcccaaagagggaaagcggtgaggtttgaggaggggcagaagcagggccggcaaaggttgtaccttcataaggtggtatggggggttggggtcaggccctgaacatcgtcctacttgagaatctgtcaggggaaaaagtcaaggggagcaggaggaagagccaggagggccagaggcagagaagagatggagtcttaggggccagggtgagcgaggggtccagggcctaaaggtgcttcctgggggcgggggaatgcagccagtgtccccctcccctcttccaccccagctccagccctggtcttgtcttttcatccctcttccccacgacagaagaagttgtggccctggccatgtcatcgtgttcctgtgtcccctgcatgtaccccaccctccaccccttccttttgcgcggaccccattacaataaattttaaataaaatcctgtttctggctctggattgaatgaattgccctcaataagaactgccgccaaccccaagggtttcttctcggcctggtgtccgtcaatccagccttgctctgccctgtgaggctgtgaggttctggctccgccctccccaggggcagccttactggcggcagcacagatacagggccccttttttgagccttccagcgccagtttctgccgctccgtttctgcaggctccattctctccaaaccccaccctgctcctcctctgcagcctccccgcgtcttgccccatcttccttgccctcctgctcgtagggacgcctccacccggtcctgcctgtctcactggtcccgtctcctcgcagaaccatccc

SEQ ID NO: 353505 - DNA, 567 bp, Homo Sapiens
gtgtggggccctcaggcacttctggtaaagacattccacctgcaagcagcattttgagtaaagcactgctgtggtttgccgatttatggtccatttaatgttaggctaaagcacctttaatcatttttgttgttttaagataatgtatttgtgaagtggataaacactggaaatagggtgcttccttctggaaagttcagtgtaaaacacaaacaaggctttggcgggtttatctggctttataaacaagtctgaaaaatggatgaaagctaaatatataaagcagttggttgtctatcttttatcatttttactcagatctgtatttaacacttatttatttgttagtttttacattcaaaagaaatacactttgaactttggctaacattgtaggatattttttaattgtttctacatttttaaagcatgattcatcatttttgtaaacttagatcattttttaattgtcttttcttttccaatagaccagttaccactcatgtgtctgcagaacctctttattgtattcctataataaatgtaaaatatttgtagcaaaaaaaa

SEQ ID NO: 353506 - DNA, 529 bp, Homo Sapiens
  misc_feature (14)..(14): n is a, c, g, or t
caaagctttccttnggtgtctgcttctgtattctaaactggaagtagacatcatatcccagctaaacagggaaagttttagaactttgggaatagtttggtctatgcatgtataatgctgagaagggtctgcagtgaagaagataagatagacttctccagcacaactattactcatttgataattcagtttcatttttgctcacataatctaagtaaagccatatcagaaaccaagtttttctgtatgttacactaaattttaagaacaaagtctatatttaaaataatccaaaccccaaatttgctcatccaaattatgtcttggccagcaagttttacattagaagttttgagacttccatttatttgtgtcttttacagaattgtgtgacaatgacttttggacatttgttctttcggctttggaatatttacacaagaatggagaaggaacattcaactggagcataattgtcaaggcaatagagaatttagagaaataaaatagctgcatatctcaaaaaaaa

SEQ ID NO: 353507 - DNA, 904 bp, Homo Sapiens
gacttgatttgcttttggaaaaagaaatgcttaattaattattctgtatttggccttattcgggcattaggaaatctagagatctaaagggttgaatgacaatagtgcccccgtttttagcagaccagccttaactctgggtttgaatcctaaggagattgccacagtgagacttaaggaaatgtttggttggcagatgagcaccaatgactgcagcgtggagtgacgcactgcatggtctgtttattctctaattccaatatgtcttttgcttccagaagcaagaaaagtttcttctctcccctccttcccacccttttttcaaaggcaccacaagtatagacagttgcactacatcaaatctttttttgacacttgtagaaaccagtacacttttagattagacagtatcttcttttaatattttgatttgttttcctttagtttgaaaagttgtataatacttaactgactgtagcaaagttttatatgtggtagcatacctttaatttatcctattacaaaactgttctgaattttcttttggtttttaaaaaacaaaacttgttgcttagaagccatgaattattttattttacttcaactgtcgaaacttccttgttttaaaaaatgatcatttgggttcactcaggaaatgcatgtcaggaaacttgtattataagtttattagttgtgatgtatcagtaactgctgttacccctttttcaaagaaatgtaattgattttgaagttttctagattgtcacatgctttgtgactaatgcaagaaagcaagtcctgtgttgtatttgttctagtcatttttattcaggctatatattgtagcttaatttttatttgcaattaatttatttaaactaagtaaatacttttcaaaatacat

SEQ ID NO: 353508 - DNA, 1681 bp, Homo Sapiens
  misc_feature (1105)..(1210): n is a, c, g, or t
  misc_feature (1531)..(1539): n is a, c, g, or t
atcaggccaaatcggccgagctcgaattcgtcgagagcgggcaaagccggtggcgcccggaggctgcacggagagcggtgcccgcgtcagtgaccgaaggaagagaccaagatgaatacagagcccgagaggaagtttggcgtggtggtggttggtgttggccgagccggctccgtgcggatgagggacttgcggaatccacacccttcctcagcgttcctgaacctgattggcttcgtgtcgagaagggagctcgggagcattgatggagtccagcagatttctttggaggatgctctttccagccaagaggtggaggtcgcctatatctgcagtgagagctccagccatgaggactacatcaggcagttccttaatgctggcaagcacgtccttgtggaataccccatgacactgtcattggcggccgctcaggaactgtgggagctggctgagcagaaaggaaaagtcttgcacgaggagcatgttgaactcttgatggaggaattcgctttcctgaaaaaagaagtggtggggaaagacctgctgaaagggtcgctcctcttcacagctggcccgttggaagaagagcggtttggcttccctgcattcagcggcatctctcgcctgacctggctggtctccctctttggggagctttctcttgtgtctgccactttggaagagcgaaaggaagatcagtatatgaaaatgacagtgtgtctggagacagagaagaaaagtccactgtcatggattgaagaaaaaggacctggtctaaaacgaaacagatatttaagcttccatttcaagtctgggtccttggagaatgtgccaaatgtaggagtgaataagaacatatttctgaaagatcaaaatatatttgtccagaaactcttgggccagttctctgagaaggaactggctgctgaaaagaaacgcatcctgcactgcctggggcttgcagaagaaatccagaaatattgctgttcaaggaagtaagaggaggaggtgatgtagcacttccaagatggcaccagcatttggttcttctcaagagttgaccattatctctattcttaaaattaaacatgttggggaaacnnnnnnnnnnnnnnnnnnnnnnnnnnnnnnnnnnnnnnnnnnnnnnnnnnnnnnnnnnnnnnnnnnnnnnnnnnnnnnnnnnnnnnnnnnnnnnnnnnnnnnnnnncccttgtgggcccccctcggcccctcaaaaacctttttaaaaacattcctgttgggcgccggggccccagaagggaagggaacctgggcccatacctggttcccaaggaaaaccccgggcctagacatagggcttgggattctccccccaaataaaaaaacgcccggggggaaaaccagaggggtttttaaacaaattcccaaatgggagtttctggagggtccttttcggggattttttccaacggggagtccccaagcggaacccccaattattaaaattatacccccccgccccgggcccattttattggaaagaaannnnnnnnnaaattccctttaaaaaatttttttgcgccaacattgtggaaacccccttccacaaaacgcgggtagtgtgataaaacctctgagaatcccgccgacggggggaaatctcaaaaacccttgtgtcccccctcttggcggtaaa

SEQ ID NO: 353509 - DNA, 470 bp, Homo Sapiens
  misc_feature (20)..(20): n is a, c, g, or t
  misc_feature (36)..(36): n is a, c, g, or t
  misc_feature (41)..(41): n is a, c, g, or t
  misc_feature (47)..(47): n is a, c, g, or t
  misc_feature (58)..(58): n is a, c, g, or t
  misc_feature (69)..(69): n is a, c, g, or t
  misc_feature (83)..(83): n is a, c, g, or t
  misc_feature (138)..(138): n is a, c, g, or t
  misc_feature (274)..(322): n is a, c, g, or t
agaatccgccccaggtggcnctaacaaagaacggancactnccttcnagagttctganaaaatgtccgnggaacagtctgggnggaatggggctgaaaccatgtgcaagtctgtgtcttggcagcccaagaagtgacnccgagatgttaattttagggacccgtgccttgtttcctagcccacaagaatgcaaacatcaaacagatactcgctagcctcatttaaattgattaaaggaggagtgcatctttggccgacagtggtgtaactgtannnnnnnnnnnnnnnnnnnnnnnnnnnnnnnnnnnnnnnnnnnnnnnnncataactatttaaggaaactggaattttaaagttacttttatacaaaccaagaatatatgctacagatataagacagacatggtttggtcctatatttctagtcatgatgaatgtattttgtataccatcttcatataataaacttcc

SEQ ID NO: 353510 - DNA, 916 bp, Homo Sapiens
acgcaaacccaaggaggtcccaaattgttaagcaagggattccaaaaggggaacccagtattttaggtgaaaactggccaggtacaagtgacaagccttttccaacctaaaaattttaaggtagggccaaacccaccttcaaactgtaagcctgtggccaaacataaaaaaaggcaggcttccatttctggcactggctaagtccaattaccttgtgaacttgttcaagtaaatggtgggaactgtacatttttgaaaagacctcaaaaaatacttcattctgctgctgttcagttggctttttaaaactgtctgcagtaggacactgaaaacagcaagaacttcggggtgaacacccgctgatcctttaacaaggatttctggcaggaaactcacaaaaaggagaactgaaaatttagacatacagttggccattgtaaaaaacatcagtttcctctcatacattccaagtaaaccaagtaaaataagtgttggagtaacacttgcataaaagaatttaaggagtgatagctctttctgttctgccattcccaacattcctgggggaaaggagactcaatgagttaatactatttcactgagcccaagatggaaacttggtttgacctaaaacatctgattaatataggctagctgatttcttaaaaattcgttgcattgaaggatattttgcatgtctgtaacacctgtcaatacttgtttgtattgatttctgatattcttgcagctgactacgtgtaattgggcagatcagctttgcagtagattatgctgcatcctcgtggcaaaattctgtattcttagtgattgttacaaacccctttattgctgtctgagaaagtgaaagattgtgtatttctattaaaacatttacaatcaaaaagaaagaagacag

SEQ ID NO: 353511 - DNA, 372 bp, Homo Sapiens
  misc_feature (11)..(11): n is a, c, g, or t
ccccccaacanccccccgggggaaaggagaccccaaggagttaaatacctatttccactgagccccaagatggaaacttggtttgaccctaaaacatcctgattaatataggcctagcctgaattccttaaaaaatcgttgcattgaaggatattttgcatgtctgtaacacctgtcaatacttgtttgtattgatttctgatattcttgcagctgactacgtgtaattgggcagatcagctttgcagtagattatgctgcatcctcgtggcaaaattctgtattcttagtgattgttacaaacccctttattgctgtctgagaaagtgaaagattgtgtatttctattaaaacatttacaatcaaaaaaaa

SEQ ID NO: 353512 - DNA, 891 bp, Homo Sapiens
  misc_feature (790)..(814): n is a, c, g, or t
atttctttgttcaggcgcagccttggaaggccacctaaggcctgccagcagaggagatgagctctggtctaccaaccccaaacaggccctgactctccttccttagaacgatgccctctggctggggtggcaagagggctgtgagtggaaacaagtcagccagtcaactgtcccttgggccttggttgttccaaaaaagtctggggacaagaaaagctagaacatggggccctcccttcccaggagtgctagcgaaccctcccagatagcctttgcctgtttggaaaagaatgtaatccatcagaacgtgagctccttgtgcttccagtgacaagcgggccacagtgctagtggcatgttgcttccctcacagccctgcccaggggtaggaccaggcccgccccttgatggatgtgctgttgattgtaatatacttctgttgccaaataatggtactgtttaattttccataaaagagagactatattgtctgatatgtaatgttaatggaattctaagaattactagacactattataaattgtagacttacgtatttgtctaaaggtttgatgaagcagggccaaaacattgtttcttcttttttgtttgaaagaagctgaggtttgtttttgctgtttgagtgttcctttggcaacttattatgtgtgaaatgttaaattttaccgattaagatgatggtaactgagacctttctttaaaccagtagcaacatcagtacaaattgctcttcctgtgtatcttgaacctaaaaagaacaatctcttcnnnnnnnnnnnnnnnnnnnnnnnnnaactctttggtcattttgacctgtgtggtttaaattcaaatagtttcatgaataaaaggattccaacccaaaaaaaa

SEQ ID NO: 353513 - DNA, 1130 bp, Homo Sapiens
ttgaccgtcttctgtttctcacggaataaacaaattatcgagacatgggagtgaccagcaccttttctttaaatggtggaacctggtttccttttaccatgaaattgtcttacttgaaaatattgatcctgatgagagagaagatggtgccaaggctgtctttgtataatggggctcaaattctctacctcttcagggctaatacttttaactgagctgctgcctatagtgtcttttggaaaactacttaaagggtgattttctgttactttttagcaaatttttttaatcacctcttgctacacccattcttttcatgtgcagccgactcaaaaattaccagttttggtgaaaggctaaattagataatttggaaccaggatactaatgatttctcatctttacttttttttaatcctaatataaagtgaatttgattgaaaaggcaaatagctattagggaagcagtttgccattgttgcagagttatctgtactttgtttaactgaaaaaaatgtagaaatatatgtaaagaatttaagacaagagtactgaatggatgatttgtcataggctttcccctttctttctgttctagcagcaggaaaagtttctctatatcctctccctctacctgtaacaattttgttttctactgttaattacattgtgtatttatagttctatgcttactgttgtgcatatactggcaataaaactgtacataacattacttgaaaaagttaataatgtatatcagtttttctgtctcactgtgtaacaagtcactcagttttattttaactttagacggtcttgtatcagtggtggtctcttgaattttgtaagttcatctgaggagaaaagatttttcaggtgtagctaccacaatcaaaggtatatagctacatacgcatgtatatattacagcttatctgtaagaagaaaatgcattttaaaacacaactcttctcagtagcattttatgacctttggatatgtttgtaatcatttcgaatcaaaatattgatttaattttgacctctggtttaagatactgctttaactactgttgacaaccaagtagagtgacttaagctgaacagtaactaactggaaaattagataag

SEQ ID NO: 353514 - DNA, 1283 bp, Homo Sapiens
  misc_feature (10)..(10): n is a, c, g, or t
  misc_feature (12)..(12): n is a, c, g, or t
  misc_feature (15)..(15): n is a, c, g, or t
  misc_feature (39)..(39): n is a, c, g, or t
  misc_feature (142)..(142): n is a, c, g, or t
aaaataatgncnacngtttttattaaaacataagaaacnacacccccaaaataagactttcattcacattcacaaagcaaacatctagtacatgtctttcattcactttatgatagtgtattggatgatttgggcattacgntcacctcttaccacagcacagaacatacattcttcaacagcattaacggagtttgccaagtgcattaaagaggtcacgtggagggtacgttcatatgaaacaatctgcagaaagtggggtaagaaagggcacatggcacagttaaagttgtagaaatcaaattactatcattttttgttgccaaaacaaagtcttacatttaacccccctttctaccacccccctccacacttcacgtcagctacatagtttccacagggtaattcactaagagcttgtggagcttggttttaaaatccttagcctggctctgactttagggcatagcttccagttcttccttccttgtcctggtttcttgttcagcttttacttctaatccaacaacaaaagaaatgtctggctgggtctcagctagagtctgatgtgtcttagagcatgtgtgccgtatctaaaccatcattccctgctctcatctcagctccctccaggcctgagcaccggttccttttgtcccatacgtcatgaagtcacactattgggaaacctgtgcttccctctccatggcttaactccctgtcagtgtcggagtgtataagaatgcttgtaaatactgtaatatatttattaatatttgaaaggcattcattcagtggacagtgggaattaactctcccaaggcaagtgaaaatgaatgattgacgtacgttgatttaacaatcttactagattttaattcttaaggatttcaaatgaaaccagaaggtggttatgtaagaggcttaaaatgatcttatgtttaaagagattctgttattagcaccatgaactcgtactatgaaatttttaagccttttatttttctaactatattactgtaggactggatattaggtgtcatataggaaacacaaaagttattgctgtttgctaaagcaaaatagcagaaaattttgtatatgcaaaactgttgaaggaccatagagaaatgtgtactactgacggggcttttactaggcttcctgcgtgtgtaaaagtcgaggtattgctggcattcagggtgacatgatggtactaaatgttttccattaaagtcttctattttaaaatttagagaaaaataaaatgaataaacatcagt

SEQ ID NO: 353515 - DNA, 1262 bp, Homo Sapiens
  misc_feature (16)..(16): n is a, c, g, or t
  misc_feature (29)..(29): n is a, c, g, or t
  misc_feature (55)..(55): n is a, c, g, or t
  misc_feature (1189)..(1189): n is a, c, g, or t
  misc_feature (1217)..(1217): n is a, c, g, or t
ggagttcaggacaagnagccaaaagttgncaagccgtgaccgtatttgggtaccnatgagaagggttgtgacagtgtacagtggcagctgttggccacgctgcagaaatgagctggagctcatgggttttcagctacatttttccataactttgtagtacatcccatccttgagtaaattaagcccacaatttggtacctagggtctcaaactaaaatttatttttataaatgaattttaaaagaaaaaatatctacttcttttaaagttagaagaaaattaacctgctgacaggcaacatttttggggtgctttctgcactagttttccttgtaaatgatttgagtgagtaggtttggtttctgacgaaagtagactggagggtagcattgtatgcctcaaatgtctcagtgtgtttggctcatacgtgggctatactgtattattttggtatgcttacaaatgactaaccaatcaaattgtcattaatgtttggaaaatctgttaatgcacatgcacaataatttcctgaaagccataggacatgtctgtagtcagcaccacgatagcaccgtttcatgaaaggcatggcggctgcatttcataccacatcaaaatacagtaacatttctatactaaattaacagtaatacctcaaaactgctccggtagtagtttttaatggattgaaatttacagtttagtaaaaggcttaaaattacttatacttatgaaataaactttaccagttgactaaaataatgcatgttaacagttggtctgtatttgcatgtaaaagtgggccaccagagaacccttattgattacttaagtgtttacattattttaaagactcctgtttaagagctttcagaattgtactgggtgaatctcatttataaaacttcctaagagactatctgaactctatactccagacagttaggtgggagtataaatctaccccttttgatgaccccaggcttgagtttttaaaatgactacccagaagggcacaagggggaaggaaatggtatttgtatatgtatataaatatgcacctaggagaatgtgctttttaaaataatgactactgtttttattaaaacataggaaactacacccccaaaataaggactttcattgcacattcacaaaggcaaacatctagtacatgttctttcacttncactttatggatagtgtattggggtggntttggggcattacggtgcacctctttacccacaggcacaggaacc

SEQ ID NO: 353516 - DNA, 490 bp, Homo Sapiens
  misc_feature (27)..(27): n is a, c, g, or t
  misc_feature (41)..(41): n is a, c, g, or t
cccccccaggcaagtgaaaaggatgantgcccgtccgtganttaaacaaccctaccggatttaaaacccctaaggaatttccaatggaaccccagaaggtggttatgtaaagaggcctaaaaatgaccctatgtttaaaagagatcctgttattagcccccctgaactcgtacctatgaaatttttaagcccttttatttttcctaactatattactgtaggactggatattaggtgtcatataggaaacacaaaagttattgcctgtttgctaaagcaaaatagcagaaaattttgtatatgcaaaactgttgaaggaccatagagaaatgtgtactactgacggggcttttactaggcttcctgcgtgtgtaaaagtcgaggtattgctggcattcagggtgacatgatggtactaaatgttttccattaaagtcttctattttaaaatttagagaaaaataaaatggctttcccatcagaaaaaaaa

SEQ ID NO: 353517 - DNA, 283 bp, Homo Sapiens
  misc_feature (148)..(165): n is a, c, g, or t
ctcatttatacctgtgtattttttaaagctacaatctgttcaatgtttttaaaaatctgtttatatgacattgttaaaataaagttggtcttttgacgagagggaggatgtcacggtcagttgtaactttgccttcacaaggcaactnnnnnnnnnnnnnnnnnnagtgtgcctccttgacatttcgttcaagttatagattcaatggagctatgtcttgttttaagttgctttaatgcattgtattagatcttcaaacagaataaaggttgttttgaaactg

SEQ ID NO: 353518 - DNA, 1043 bp, Homo Sapiens
  misc_feature (11)..(11): n is a, c, g, or t
  misc_feature (18)..(18): n is a, c, g, or t
  misc_feature (26)..(26): n is a, c, g, or t
  misc_feature (36)..(36): n is a, c, g, or t
  misc_feature (38)..(38): n is a, c, g, or t
  misc_feature (42)..(42): n is a, c, g, or t
  misc_feature (44)..(44): n is a, c, g, or t
  misc_feature (50)..(50): n is a, c, g, or t
  misc_feature (88)..(88): n is a, c, g, or t
  misc_feature (92)..(92): n is a, c, g, or t
  misc_feature (101)..(101): n is a, c, g, or t
  misc_feature (250)..(306): n is a, c, g, or t
  misc_feature (550)..(550): n is a, c, g, or t
gagacatcatnaatccanattacaanagttctctcnantacncncggtgnagcaggctcaagtccagcaccgtggtctcgtgaccctnaatnacatgaagnccaagcaggaggctctggtgaaggagcgggagaagcagctggccaagaaggagcagtccaaggagctgcagatgaagctggagaagcttcgagagaaggagcgtaagaaagaagccaagcggaagatctccagcctgtccttcaccctnnnnnnnnnnnnnnnnnnnnnnnnnnnnnnnnnnnnnnnnnnnnnnnnnnnnnnnnngatggaaagggaagagatcaccacgaagaagagaaaactggggaagaacccagacgttgacacaagcttcttgcctgatcgagaccgtgaggaggaggagaatcggcttcgggaagagctgcggcaggagtgggaagccaagcaggagaagatcaagagtgaggagatcgagatcaccttcagctactgggatggctctgggcaccggcggacagtcaagatgagaaagggcaacaccatgcanagttcctgcagaaggcgctcgagatcttcggaaagacttcagtgagctgaggtccgcaggggtggagcagctcatgtacatcaaggaggacttgatcatccctcaccatcacagcttctacgacttcatcgtcaccaaggcacgggggaagagtggaccactcttcaactttgatgttcatgacgatgtgcggttgctcagtgacgccactgtggagaaggatgagtcccatgcaggcaaggtggtgctgaggagctggtacgagaagaacaagcacatctttcccgccagccgctgggaaccctacgaccctgaaaagaagtgggacaagtacacgatccgctgagcatccaggaggctgcgcggccccggctcctcagctccctcagtgtgccccgtggtgtcaccgggactccaggcacccgctcccctgcgaccatgccaggcacgctgggaggaggacggcagctgctcgtgtcctgcccctgccaca

SEQ ID NO: 353519 - DNA, 999 bp, Homo Sapiens
  misc_feature (33)..(33): n is a, c, g, or t
  misc_feature (37)..(37): n is a, c, g, or t
  misc_feature (40)..(40): n is a, c, g, or t
  misc_feature (48)..(48): n is a, c, g, or t
  misc_feature (54)..(54): n is a, c, g, or t
  misc_feature (58)..(58): n is a, c, g, or t
  misc_feature (72)..(73): n is a, c, g, or t
  misc_feature (109)..(109): n is a, c, g, or t
  misc_feature (241)..(241): n is a, c, g, or t
  misc_feature (551)..(608): n is a, c, g, or t
tttcaggtcgtaggttcccaccgctgcggaaanatgnctnttcttctntaccanctcncacaccacctcgcnncatggactcaccctctccacagtggcgtcactgagnaaccgcacatcgtcatgaacatcaaagttgaagagtggtccactcttcccccgtgccttggtgacgatgaagtcgtagaagctgtgatggtgagggatgatcaagtcctccttgatgtacatgagctgctcncacccctgcggacctcagctcactgaagtctttccgaaggatctcgagcgccttctgcaggaactgctgcatggtgttgccctttctcatcttgactgtccgccggtgcccagagccatcccagtagctgaaggtgatctcgatctcctcactcttgatcttctcctgcttggcttcccactcctgccgcagctcttcccgaagccgattctcctcctcctcacggtctcgatcaggcaagaagcttgtgtcaacgtctgggttcttccccagttttctcttcttcgtggtgatctcttccctttccatnnnnnnnnnnnnnnnnnnnnnnnnnnnnnnnnnnnnnnnnnnnnnnnnnnnnnnnnnnagggtgaaggacaggctggagatcttccgcttggcttccttcttacgctccttctctcgaagcttctccagcttcatctgcagctccttggactgctccttcttggccagctgcttctcccgctccttcaccagagcctcctgcttggccttcatgtcattcagggtcacgagacccacggtgctggacttgagctctgcctccaccgcgtcgtagtgcgcagagaacttcttgtcaatgttggatttcatgatgttctcctccgcgatgcgctgcttcatctgctccatctgctcgcgctgcttctcccgcttcttcatcaggtgcatggcgcggccggcctcgctcgcggcgcccttgtattgagccatgcggttcttgcggccgcagt

SEQ ID NO: 353520 - DNA, 746 bp, Homo Sapiens
  misc_feature (25)..(25): n is a, c, g, or t
  misc_feature (27)..(27): n is a, c, g, or t
  misc_feature (272)..(272): n is a, c, g, or t
agatgagaaagggcaacatcatgcnanagttcctgcagaaggcgctcgagatcttcggaaagacttcagtgagctgaggtccgcaggggtggagcagctcatgtacatcaaggaggacttgatcatccctcacgtgagtcccttcagccccagtacccgcagtgggtgcagcaccctgggctttggctcaggctggtgggggcagtgtgcgcaggcggggggtgtggggaggccccgagatggaccatcaagacgccgctttcctgcccttngctcccagcatcacagcttctacgacttcatcgtcaacaaggccacgggggaagagtggaccactctcaaacctttaatgttcatgacgatgtgcggttgctcagtgacgccactgtggagaaggatgagtcccatgcaggcaaggtggtgctgaggagctggtacgagaagaacaagcacatctttcccgccagccgctgggaaccctacgaccctgaaaagaagtgggacaagtacacgatccgctgagcatccaggaggctgcgcggccccggctcctcagctccctcagtgtgccccgtggtgtcaccgggactccaggcacccgctcccctgcgaccatgccaggcacgctgggaggaggacggcagctgctcgtgtcctgcccctgccacatcagtgactgctttattcttttccaataaagaagtgcacgtgtcagagctggagcgcctgcattgtgagaaaccaac

SEQ ID NO: 353521 - DNA, 838 bp, Homo Sapiens
gggaagaagagggaggcgaggaggaagaggaggcggccatgtatgaggaggagatggaaagggaagagatcaccacgaagaagagaaaactggggaagaacccagacgttgacacaagcttcttgcctgatcgagaccgtgaggaggaggagaatcggcttcgggaagagctgcggcaggagtgggaagccaagcaggagaagatcaagagtgaggagatcgagatcaccttcagctactgggatggctctgggcaccggcggacagtcaagatgagaaagggcaacaccatgcagcagttcctgcagaaggcgctcgagatccttcggaaagacttcagtgagctgaggtccgcaggggtggagcagctcatgtacatcaaggaggacttgatcatccctcaccatcacagcttctacgacttcatcgtcaccaaggcacgggggaagagtggaccactcttcaactttgatgttcatgacgatgtgcggttgctcagtgacgccactgtggagaaggatgagtcccatgcaggcaaggtggtgctgaggagctggtacgagaagaacaagcacatctttcccgccagccgctgggaaccctacgaccctgaaaagaagtgggacaagtacacgatccgctgagcatccaggaggctgcgcggccccggctcctcagctccctcagtgtgcccccgtgggtgtcaccggggactcccaggcaccccgcctccccctgcggacccatgccagggcaccgctggggagggagggaacggccaagcttgcctccggggtcctgggccccccttggccacaattcaagtgggaccttggct

SEQ ID NO: 353522 - DNA, 1658 bp, Homo Sapiens
  misc_feature (1431)..(1499): n is a, c, g, or t
  misc_feature (1530)..(1558): n is a, c, g, or t
ggagggagggaaggagcgctgagcccggcccggaagctaggagccattccgtagtgccatcccgagcaacgcactgctgcagcttccctgagcctttccagcaagtttgttcaagattggctgtcaagaatcatggactgttattatatgccttgttttctgtcaagacaccatgattcctggtaaccgaatgctgatggtcgttttattatgccaagtcctgctaggaggcgcgagccatgctagtttgatacctgagacggggaagaaaaaagtcgccgagattcagggccacgcgggaggacgccgctcagggcagagccatgagctcctgcgggacttcgaggcgacacttctgcagatgtttgggctgcgccgccgcccgcagcctagcaagagtgccgtcattccggactacatgcgggatctttaccggcttcagtctggggaggaggaggaagagcagatccacagcactggtcttgagtatcctgagcgcccggccagccgggccaacaccgtgaggagcttccaccacgaagaacatctgaagaacatcccagggaccagtgaaaactctgcttttcgtttcctctttaacctcagcagcatccctgagaacgaggcgatctcctctgcagagcttcggctcttccgggagcaggtggaccagggccctgattgggaaaggggcttccaccgtataaacatttatgaggttatgaagcccccagcagaagtggtgcctgggcacctcatcacacgactactggacacgagactggtccaccacaatgtgacacggtgggaaacttttgatgtgagccctgcggtccttcgctggacccgggagaagcagccaaactatgggctagccattgaggtgactcacctccatcagactcggacccaccagggccagcatgtcaggattagccgatcgttacctcaagggagtgggaattgggcccagctccggcccctcctggtcacctttggccatgatggccggggccatgccttgacccgacgccggagggccaagcgtagccctaagcatcactcacagcgggccaggaagaagaataagaactgccggcgccactcgctctatgtggacttcagcgatgtgggctggaatgactggattgtggccccaccaggctaccaggccttctactgccatggggactgcccctttccactggctgaccacctcaactcaaccaaccatgccattgtgcagaccctggtcaattctgtcaattccagtatccccaaagcctgttgtgtgcccactgaactgagtgccatctccatgctgtacctggatgagtatgataaggtggtactgaaaaattatcaggagatggtagtagagggatgtgggtgccgctgagatcaggcagtccttgaggatagacagatatnnnnnnnnnnnnnnnnnnnnnnnnnnnnnnnnnnnnnnnnnnnnnnnnnnnnnnnnnnnnnnnnnnnnngactgcttccttatagctggacttttatttnnnnnnnnnnnnnnnnnnnnnnnnnnnnntccctaaacattcaccttgaccttatttatgactttacgtgcaaatgttttgaccatattgatcatatattttgacaaaatatatttataactacgtatt

SEQ ID NO: 353523 - DNA, 325 bp, Homo Sapiens
  misc_feature (99)..(138): n is a, c, g, or t
  misc_feature (199)..(226): n is a, c, g, or t
  misc_feature (303)..(303): n is a, c, g, or t
ggtgagtatgataaggtggtactgaaaattatcaggagatggtagtagagggatgtgggtgccgctgagatcaggcagtccttgaggatagacagatannnnnnnnnnnnnnnnnnnnnnnnnnnnnnnnnnnnnnnngttcccatccactcacccacacactacacagactgcttccttatagctggacttttatttnnnnnnnnnnnnnnnnnnnnnnnnnnnntccctaaacattcaccttgaccttatttatgactttacgtgcaaatgttttgaccatattgatcatatattttgacnaaatatatttatactacgtatt

SEQ ID NO: 353524 - DNA, 748 bp, Homo Sapiens
  misc_feature (12)..(12): n is a, c, g, or t
gtgtctgcttcncattgtaaccacaaggctgtgcatggctaatgaagatcatatacgtgaaaattatttgaaaacatataaagcactatacagattcgaaactccattgagtcattatccttgctatgatgatggtgttttggggatgagagggtgctatccatttctcatgttttccattgtttgaaacaaagaaggttaccaagaagcctttcctgtagccttctgtaggaattcttttggggaagtgaggaagccaggtccacggtctgttcttgaagcagtagcctaacacactccaagatatggacacacgggagccgctggcagaagggacttcacgaagtgttgcatggatgttttagccattgttggctttcccttatcaaacttgggcccttcccttcttggtttccccaaaggcattttattgcttgagttatatgttcactgtcccccctaatattagggagtaaaacggataccaagttgatttagtgtttttacctctgtcttggctttcatgttattaaacgtatgcatgtgaagaaagggtgtttttctgttttatattcaactcataagactttgggataggaaaaatgagtaatggttactaggcttaatacctgggtgattacataatctgtacaacgaacccccatgatgtaagtttacctatgtaacaaacctgcacttatacccatgaacttaaaatgaaagttaaaaataaaaaacatatacaaat

SEQ ID NO: 353525 - DNA, 543 bp, Homo Sapiens
ttctgcaagtttgatgggtaagaggtagccttttttcaaagtaggatttcctttttcaactgttccaggaaagaatctctaagactgggtagctcacagccagccaaaggcagctacatttccacagaagcccgtccgctgcctccgtggcttctccagccattgaactggtcccacacgcaccccaggccccactcctcggcagtttcaggtgtagctgtggggcccgttcctaggtctgtactcactttagggaggcttcactgactaggctttcctcctgcatgttgaatttccttcagctttaagaggaagagtggaataaatattctaagtgatttaatgcactttgacttgtataaaactttctgtgttagcgacggtatctatagccctttatacgagcgatggatcttgagctctccttccatgttgtaaatagggattgtattcttgaaaactgctgtagcaaattcatctgtggtgcaatacactttttgattaaagctcttcaatccagatgcaactacaatggattttact

SEQ ID NO: 353526 - DNA, 556 bp, Homo Sapiens
  misc_feature (38)..(38): n is a, c, g, or t
  misc_feature (88)..(88): n is a, c, g, or t
accgactctgagtgctaggaacctcattgtccatgtgnaaacgctgtatcccaaggcctgtgaatggcagcctgaggaagtttgcatncaggctgtgtttcgagcaggactaacaactggaaataagcaaaaaactgcatcgatccccagcctggtgttgttcttccctatacttcacactgaactcaggatgggaagaaaaaggaaacaagctttggctttttccatctcaaaagtattgtggcacctcaacatttcagtgttttgctttttaaaaaatgccctattgtaagttgttggtttatactgtataagtaacactagtagctgttttgaataacataggtgctcttcctcatctcatctcctacaccgtggtgagcatacagagtgtcctgatttgtgttaagtgactgagaagatgttaattacttttgaaaaaggatcatggtttttgctctactttataatcaagacaagtgtttattaaaatactgttttggaatgttggctgtaatgtaacagcaattttcataataaaaggcattcatcttta

SEQ ID NO: 353527 - DNA, 595 bp, Homo Sapiens
tatgggctaaagtaccagcttagtcaggtaagagccctgacccacttcagatggtaacaccacttctcactgccttcagatggaatcacagatttcagtcacggcgcataacaaattgatcagtgagtggctaggcatctgcagataaattgtttcagccatagaagctccattagcacatatgcttccttttccccccttcctttaaaatcatctggaaagaaactattttgtgcccttggggactcctgtctgtctgttacagtttaccaagatggagctgggttaggaaagaagtgagggcccattttgtggttcaagtgcactagacagctgctggggtaggaagcacaggcaatgtctgtaatcagctgtgggagagcagtgactgagaacagtctgaggcctggctccacttggaagtatctggggtgcgatgaaatcacaattatcttgaagcctaaagagggaactacaagactgttaactaagatcaatgtgggcacctaaaagggtatgttaaaatcaccatttctcaggtcaaaatactgtgaataagtcttcaataaaatcactaatggttattgtggctgtt

SEQ ID NO: 353528 - DNA, 916 bp, Homo Sapiens
agctagctgtgtggtcacagttttaacaatagttcaataataattccacgtgcaatccattttgaaggccctgtaaacttttaacaatcccatccatatctgtaattctctgatggcaagaatggatggagcatttctcagttaacagtgctgaacagtatcgtactgggtgtcataaactctttatcaatggtaatattatgtaaattgaaatctggccctcaaactatattacagctttcaccagtatgtttaaagacctcttttgttaatgattctgtaatgtatcaattatgttcttgagtggttaaaaaagaatatcaaggcttgataattatttattgggtaaagtcaggaaattgtagtgaaagaactaatggttttgttttttggaataaaggcacctaagctattgctaattgaattgctgctagaattagaaattatgctttagaatagaattggtatttctgtgattctttttgcttcttggtattttctcttgtatctatgtatctagtattgaggcttgctctttcatgtggctttatcctctctttaatagctgttgtaaaattcctgagtaactggctgcttcaggatcagcttgcagagtcttgcttttaggttagatacaaacaaagtaaatcatagttggtgtaaatccagcaaaaaacagctggctttggaatggagaacactacaattcaaatttgaagtatattcagaagaaaactttggaattagctttacatttgtttgtaaatctaaacaaatatgcaaaattggtcaaaatgtaagtatatagcatttttaaagattaatggttccttttatgtgctgatttctttgtattctgttctctgcattcatcattcaggaataccaccaataaatgtatttatatatcccttaa

SEQ ID NO: 353529 - DNA, 748 bp, Homo Sapiens
agcggtgatgtttttctagagtgaattatagtattgacgtgaatcccactgtggtatagattccataatatgcttgaatattatgatatagccatttaataacattgatttcattctgtttaatgaatttggaaatatgcactgaaagaaatgtaaaacatttagaatagctcgtgttatggaaaaaagtgcactgaatttattagacaaacttacgaatgcttaacttctttacacagcataggtgaaaatcatatttgggctattgtatactatgaacaatttgtaaatgtcttaatttgatgtaaataactctgaaacaagagaaaaggtttttaacttagagtagccctaaaatatggatgtgcttatataatcgcttagttttggaactgtatctgagtaacagaggacagctgttttttaaccctcttctgcaagtttgttgacctacatgggctaatatggatactaaaaatactacattgatctaagaagaaactagccttgtggagtatatagatgcttttcattatacacacaaaaatccctgagggacattttgaggcatgaatataaaacatttttatttcagtaacttttccccctgtgtaagttactatggtttgtggtacaacttcattctatagaatattaagtggaagtgggtgaattctactttttatgttggagtggaccaatgtctatcaagagtgacaaataaagttaatgatgattccaaaaaaaa

SEQ ID NO: 353530 - DNA, 401 bp, Homo Sapiens
agtgcgggaatccagggcccacccagaagaccgtgaacagttccttagcctcccacccccaaggcagctcttttcatccaactcagtttacaggcgtggtttgtttttcaaactgggcttcctggatgtacaaatggaactgtggtgagggtgcgggctggggttttctcctgggcgtcaccaagggcagccctgggctctggctggggatgaagacgaaacccgatcgggaaagtaagtggagcccccggccccgccgagccacagccccccaactgcctattcccactgcccagttgtttgtccacatcaggagttgctgattgaattcttgctactcttctggctctggggtcggccagtggattcaggagttgaaacaataaagcgcgcgtcacgat

SEQ ID NO: 353531 - DNA, 912 bp, Homo Sapiens
ccgaatataaggaaaaaatggtggcgtgcctctaaaacctgtcgaatagaataatggccaaatattacagtttctcactttcctatcaatactggcactctctattttcatgtttatatccgagtttctatgcataaaaatcccagtaagactgaatagtttaaagatcagtccatttttctccaacaaaacccctaacttctagattttaaaaattgcactcttgcttttgcattttagtacaaacaaaacacaaatatatttcttttatatcagtgcaaccagttaataggcatgttattttttaaaaagtaataaattttgtgaatgttgtcatttttaaaaatcctatacagaatcacaacactgtcagaatctatgtagtgcacccacaagtgccttattgttttgaattcacagtccttttctcacaaaaaccttaagagttcaaagaattcataatacacaccatgtggataatttggggttaaaaaacccatggctctgggcaacaacaatgacagttaataacatccacccacaaagactgtttctaaaattttcaacttagtttgctataaataaaccattctgaagtaaagccttttgcacactgacaatacttatcagacatcagcgaggccacagtgaaggggagtgacttacattaaaaggacagggtagcagctggttttgggatggcacacctcgtacattctgctcagaaaacacgaaggcatttatagaaaactcaattatgcactgaaaaatgtggagggtttctctgcactatcaacagtgatatcggtccccagtatttaaaaagcaaaaataccttcacaacacaactgaagatggaggctctacctaggagaatgcatacaacaggaacacactactagtactttgttc

SEQ ID NO: 353532 - DNA, 699 bp, Homo Sapiens
ggatggttctgtgacccatctgtagtaatttattgtctgtctacatttctgcagatcttccgtggtcagagtgccactgcgggagctctgtatggtcaggatgtaggggttaacttggtcagagccactctatgagttggacttcagtcttgcctaggcgattttgtctaccattggtgttttgaaagcccaaggtgctgatgtcaaagtgtaacagatatcagtgtctccccgtgtcctctccctgtcaagtctcagaagaggttgggcttccatgcctgtagctttcctggtccctcacccccatggccccaggcccacagcgtgggaactcactttcccttgtgtcaagacatttctctaactcctgccattcttctggtgctactccatgcaggggtcagtgcagcagaggacagtctggagaaggtattagcaaagcaaaaggctgagaaggaacagggaacattggagctgactgttcttggtaactgattacctgccaattgctaccgagaaggttggaggtggggaaggctttgtataatcccacccacctcaccaaaacgatgaagttatgctgtcatggtcctttctggaagtttctggtgccatttctgaactgttacaacttgtatttccaaacctggttcatatttatactttgcaatccaaataaagataacccttattccataa

SEQ ID NO: 353533 - DNA, 846 bp, Homo Sapiens
  misc_feature (411)..(411): n is a, c, g, or t
ggcagtgttcaaagaagttcttgtttctaaactgattagaacttctagctaatgctcaggtgagatcatagcttaaatacattgaaaaaactaaagtaccacaatagctgtatttttcccaatccccttaacgatcataaaagaggcaagttaagtatttctggcactgaagaaatatcttttttctttgattcatttttgaataaatataaaatgaataactattaaggtagaaaatattctcagaacattctagaggaggtaaaggttagtaggagggcgttggccatctctacattttgtgaggtgagagaaaactaatgtttactttctgctgtgaactgaactgcagctatagaatgtttcaaatgcttaaatatataatacatttttttccatggaagtgagggnaatatttcagtttcctgaagtatgacacaaatactcatatactgtcttttagagtcagtatagttggagctgttttcatttagtgctttgataatgatttacttatttttccaaatttcgtttgaattttctttcatatgattgcattgatctatgcagcatttaccagaaaagagtattcctgggatagcagaatgcataacactgagtgttaattcttgtgaaataaataagctagactgccttctctttaattagacatattttaaagtatttattatagttgtcaactagtaactcaatgaaaaagttgatgcccaagggagaaatgagaattagcttaattgctgcctttaatgtgtttttgaggaacttaaaattttctttcatgtcgctgatcatattaccaagttcaaataaaatttttataatcgg

SEQ ID NO: 353534 - DNA, 695 bp, Homo Sapiens
  misc_feature (87)..(123): n is a, c, g, or t
  misc_feature (193)..(193): n is a, c, g, or t
  misc_feature (661)..(661): n is a, c, g, or t
  misc_feature (682)..(682): n is a, c, g, or t
  misc_feature (691)..(691): n is a, c, g, or t
taaactctgagggtaatatgcctctgccctttagtcagactctgtgcaaattgtgaaatattattttattattttaccaagattatnnnnnnnnnnnnnnnnnnnnnnnnnnnnnnnnnnnnntaattttgagctacctgacgacaaatcatatctttaaccagccagttttccaaggcattgtaaatttcancttaaaccctgttggttatgaaaatttgaagatccatttccccttaaattatcctcagcttttaacttcatttaaaaagacttttgtcctaagaagaatattattattatatgttctttcaacacccccaggattaaaaaaaatgattatgcaagcaattggaatataagtattaaattatagcatttgcaaatattaatataaaagcacaacaaaatgtagtggaaaatgacaaagcttgttttttaaaacaattctgtagaaatgtttgtgcaaattcagtaattcaacttaaaatataattttacagctatgttcaataaagcctctttccaggtaaggtatgacaagcagtatgtgtgtttgttgagcaatgttcacttatcactaaaatgaaattagttatacaatttattggttaccatggggataaatcttcagtgctccacataccttaatgtctgcagnaaagaaattttaataggaacnccctggatncacc

SEQ ID NO: 353535 - DNA, 538 bp, Homo Sapiens
  misc_feature (61)..(61): n is a, c, g, or t
  misc_feature (71)..(71): n is a, c, g, or t
aagaaattcatcccaatagtacgtataaaagccttatattaaagccataaatccacaaaangcacttcaanatgtctggtccaaaactatttcccagaagacccccaaagccccacacccttttgttcccaaatgtaaattatgacaactacaacaaaagcagtaaaaagccaagacaagaaaaccttagtcattttcaaatgatttcaaccccattccttgggagaacaggtaatcaaagtatgttgcaggttgtgcttgtttttaaacagatgtcatccgggaccataggctataagtagtttcagattttttcattatcatcattgttgttgatttttttaaatgcgactgggcttgcttgcttcaaagaagttttggaaacatctgtgtgcatcgtggacatggctattgtttcataatcatcatcccgagaccggaaatcacaaaagttgaagaagaactgcaagtctctctggaagtttttgttcaggaacccataaaatatggggttgacacaagtggatatcattgctgt

SEQ ID NO: 353536 - DNA, 695 bp, Homo Sapiens
tatagaacctgtggatccttcgggctgcaggatttcggctttagctggggtgctacctgacacctgtgcaaagaaaaggaggaaaacttagaagaaaaggcagagacaggcaagacagcatctcacagcttgtcaggatcagggcattaccgactattttttcttaccaaaagagcactgaatttcctaggggaaggtgagccacctttacacctcctgtcctccctcccagcccgtcaagcgatcccatcacccagcctcatcactcagcttcttcctagtacaaaactgccatcggttgtacgtcctgagctgtgggacgtcagctttaaccctagcctgtctcagggcctcgccctccagccccccgccccttagggtgatcgtgggtttcttcccttcctcctgcacaatcgcttcccttcactgaattcccttcaaagccaaagtttcttgagcactttttcttgtgtgcagtcttgtgtgtttgggtgttggtgtttttaaatttgctttctattcccccctgcctctctccatgtcgttacgcagctgagcactggttgggatgcattcgaatgacttcagcaagatcctgctttcctcagcccccgctctgttttatttattgtttaatatttccaatgatccaaatcaaagtgaataaacaaagagctattttaatggaaaaaaaa

SEQ ID NO: 353537 - DNA, 752 bp, Homo Sapiens
  misc_feature (14)..(14): n is a, c, g, or t
  misc_feature (16)..(16): n is a, c, g, or t
  misc_feature (19)..(19): n is a, c, g, or t
  misc_feature (35)..(35): n is a, c, g, or t
  misc_feature (96)..(96): n is a, c, g, or t
  misc_feature (118)..(118): n is a, c, g, or t
  misc_feature (140)..(140): n is a, c, g, or t
  misc_feature (165)..(165): n is a, c, g, or t
  misc_feature (190)..(190): n is a, c, g, or t
  misc_feature (205)..(205): n is a, c, g, or t
caccactgcttttnangcnggagttacagacaccngtttctcggaaaacggagagaagcggactttgcacagacgtcgtcaattaagtcccaattngccactcggtattgagtacacnggaccctgaccactggctctcnggcaaacgtccttcctacggggcgnctccgccaagccggcccagctgcanccctcccttcccggngggatggccagggaaggagaaaacagagaactgacacctttgaaaccacagaatgtgttacatgcagactcgctcaagggcataagttattgtgaacgtttttgccaatcactgctcaacagccctgctagattttgtatgatgctgaattattatgcagactaattccacccagttgagacacaccatgcttgttcacttgtatttattgaaactgtggattcttgcccgtgctgtcccttgtatttactttaagcactgatcacttatcattcattcggtatggttttccctgtcccttgtacacattctggtatgaatttgtaaaaataacctgctacaaattggttgaatgtttctgtctgtggtgcgaaccagcattaacggatggggcacgtgcccaactgaggaacaggagaagaaatcaccaatttgggctctcagagctaagacacacttattgattctgttgcacattttgcactggtttatggcgattgttttcttggacggatagtgtaaaataaacttctctgttctctatcct

SEQ ID NO: 353538 - DNA, 1294 bp, Homo Sapiens
  misc_feature (46)..(46): n is a, c, g, or t
  misc_feature (379)..(379): n is a, c, g, or t
  misc_feature (632)..(751): n is a, c, g, or t
  misc_feature (758)..(783): n is a, c, g, or t
  misc_feature (1158)..(1200): n is a, c, g, or t
aaacagggctaataatggtaatcacatctaatttatagggtttttngggaggattaagtcaatccgtgtaaaattcttaattatctgacacatactggtcactcagtaaatgtgagcttttaccattgttataggtaaaatcccattacaaaaatacaaaaatattttttgtaacagttattttcctgccctcttggatgacctaaagtaatagtgttttatagatttcactaaattttcagtgtaatatcagatgttttctctggatgcagaaagaccatctttccataattaaagaacctgggggggtgtgcactatgagattggagaaatgaattaagttgacttgaaattattttacttttattaatcacaggtnatctcaacctgcctttgtttcaccctacttcaagtacacttccacaccaggaaaacagacccaaattccataaacagaactgacgttaaaatatgcgaaagattcagaacctaggtttagggtacatgtttttctctgtttcatgaacttacagtgtggtttgagcactgggttcttttagccaaattccatacaaaaagaatttggatgttttccagcatttattaccttactttgctataagtaagagtgnnnnnnnnnnnnnnnnnnnnnnnnnnnnnnnnnnnnnnnnnnnnnnnnnnnnnnnnnnnnnnnnnnnnnnnnnnnnnnnnnnnnnnnnnnnnnnnnnnnnnnnnnnnnnnnnnnnnnnnnatttgannnnnnnnnnnnnnnnnnnnnnnnnnttaaaaagtgaatataatttgaggcacagaagaatattcttaaaaccttttgtattatacaatagaaataaaggttttatttttattaaatgctttgctaaaatgatagtggataatagacaaagtgaaaacatttaaaaaggaagagaaacttcagcctttctaagttgatagcatgtttattaacttttagataacagatccttatagactgaacagaatgtagcctctgcattaatggtaaatggtctagaagttttcgtttccactgaggcttccgccactcgcttttttaaacttcctgctatggttctggatatggttggtcctcaccaaaagtcatgctgaggcctgagtccccagtatagatagagnnnnnnnnnnnnnnnnnnnnnnnnnnnnnnnnnnnnnnnnnnngattacaggctttctcatgaggctcagttagttctggaatgcattcgctcttgcacgactggcttgaattctcacaaagaatggatagtattga

SEQ ID NO: 353539 - DNA, 974 bp, Homo Sapiens
ctgagaactctgctgtttcagatatgccataacatacatctgaaacacatgtgtaacaatcaaaatggtgggctctagaatggttttggagctcgagatcttcatgggttagacttgctggtcagacccaggagcacctgtggctcacaccttctgttcccctcctggcctgtgcagaatgtaaacagcagactcatactcaatgggcactacaggccttatcagacgttttatacaagcctggattgcttagtaggggaataaggcattctctgagggggctttccacttagattgagaattttatttgaaaagaatctggtttaaatggcattgtggtccgaggtagctgctctccccactgagagctgagccgaaatataagaataatatatttgtgcttcgagttggtgtttctttcagtgtaatgcatgcagtggtcacaacccagttactcataatatttggattgtatttgttcgtaagatatgcccaagaagactagagaattagtgttatataccatatagaacttactgtcagtcaactataaacaggcccaattaaaaactgttccattactacgcaaacacatattagaggcctttgctgatgacacattagctggatcttagccaccccagaaagggtttgatttgaagctgattgttgccagatatgcatattggaatcccatctacccatagttcctctgaaggtgattttgtaatttgcaaaagggtataggaaaatatacctaaaagcgaatttgtggctgagaggataaacagaagctgtttgctcatgttctgtgccccacacccaccaatacctaaatctgttaaggaagacagaaaatgttttctttgtgctcattgagtagttccagacagaagaagaatatactctttaaaatgtatttacctgttagttggaagtacccaggaattattcaggaaacggatgcaaaaaaa

SEQ ID NO: 353540 - DNA, 923 bp, Homo Sapiens
gtctggactgcggaggccggggcggtggcgtgcagggtgaggtctcccgggctggcgcgcgtgcaagccccctgctgctacctcgcgctaggccagctccaggagggcaacagacgacaggacatttcaaaagggccacttaaattttccttcgagtaaacagaacacctgccaagaccctcgagcctgggcgtgccccaagacaggtggttggggtctaggagtcggctgcagctggcgatgctctgaggggacgtcagggcctcaggatcgcccctatgaagacgaagtgcatctgtgaactgtgctcctgcgggcggcatcactgtccacatctccctaccaagatttatgatgaaacagagaaaccatgtcttctctccgaatataccgagaactaccctttctatcactcctacctgcccagagagtccttcaagccaaggcgggagtaccagaaagggtctataccaatggaaggcctgactacatcaaggagagattttgggcctcacaaagtggcaccagtgaaggtccaccagtatgaccagttcgtcccgagtgaagagaatatggatttgctcacgacgtataagaaagattacaatccctaccctgtctgtcgagtggaccccatcaaacctcgggacagtaaatatccatgtagcgacaagatggagtgtatgcctacttactaaagctgattatttgccttggaaccaaccaaggcgagagccacttcgtctggaacacaaatacccagccggcatcagtcaggttgataaccagaacacacaccaggacgattaccccataaaaggccttgtgaagaccaataagctgtaacctctggccatgccaaagtctgttacatccccttggagggattgtgacctactacaagatgagctaggtgggccaca

SEQ ID NO: 353541 - DNA, 3425 bp, Homo Sapiens
  misc_feature (1143)..(1143): n is a, c, g, or t
  misc_feature (2814)..(2934): n is a, c, g, or t
  misc_feature (2951)..(3011): n is a, c, g, or t
  misc_feature (3016)..(3167): n is a, c, g, or t
  misc_feature (3179)..(3190): n is a, c, g, or t
  misc_feature (3207)..(3331): n is a, c, g, or t
taaaagggggcccgccccttttttattttcaaaaagtccaggtccggcaggaattaaatttggggcccacctaagggccatgtgtaaggggggcttcccccttttttcagaagattccatcccgttctttggggagggacgttagggtaatgggaactttggaagaacttccgggggccattggccaagcttggtaactttatctcgaaaattcagtggtgttaacagaaaggccatgtctagccccagggaggcctgggctagagtttcaaagctccttggcaggctcccccattcagggccccggtaggatttgtttttgagtggtaagccttcaaaaggggatttcacagggcttgaacttctctgcttcatgcacaaagcgcttctccacggggtggcccacatagctcatcttgtagttagtcacatctcccaaggggatgttacagagctttggcatggccagaggtttacagcttatggtcttcacaaggccttttatggggtaatcgtcctggtgtgtggttctgttatcaaacctgactgatgccggctggtatttgtgttccagacgaagtggctctcgccttggttggttccaaggcaaataatcagctttataagtaggcaaacactccatcttgtcgctacatggatatttactgtcccgaggtttgatggggtccactcgacagacagggtagggattgtaatctttcttatacgtcgtgagcaaatccatattctcttcactcgggacgaactggtcatactggtggaccttcactggtgccactttgtgaggcccaaaatctctccttgatgtagtcaggccttccattggtataggccctttctggtactcccgccttggcttgaaggactctctgggcaggtaggagtgatagaaagggtagttctcggtatattcggagagaagacatggtttctctgttttatcataaatcttggtagggagatgtggacagtgatgccgcccctagcaaccgcaaacccagctgcaacagaacaaaagaccgaagtcctcgagcttcccttccatcttagggctcacgccgccccggttagggttcattagagcagcggcttttcaaggctcgtcgggcacggagggcggangagggagctctcgcgagatcgccgccggaagtgggtggtggcggggacgcagcggctccctcccggaaagcgagcgtatctcccgagccgttgccactgacagccgcgggcgctcccatctgagtaagagccagcccgtccgcggcctctccagccccgggttcgcgctctcgactctcctgcctgcccagctgcgcggcggagcggagcgaggcgcggcctgcgagtccccggcagcccccgacccctccctcggcgctgcgtgtaggccgcgccctcaggcccagtccgcggtgccccggcgggtgatgccaaatacagccatgaagaaaaaggtgctgctgatggggaagagcgggtcggggaagaccagcatgaggtcgataatcttcgccaattacattgctcgcgacacccggcgcctgggggccaccattgacgtggaacactcccacgtccgattcctagggaacctggtgctgaacctgtgggactgtggcggtcaggacaccttcatggaaaattacttcaccagccagcgagacaatatcttccgtaacgtggaagttttgatttacgtgtttgacgtggagagccgcgaactggaaaaggacatgcattattaccagtcgtgtctggaggccatcctccagaactctcctgacgccaaaatcttctgcctggtgcacaaaatggatctggttcaggaggatcagcgtgacctgatttttaaagagcgagaggaagacctgaggcgtctgtctcgcccgctggagtgtgcttgttttcgaacgtccatctgggatgagacgctctacaaagcctggtccagcatcgtctaccagctgattcccaacgttcagcagctggagatgaacctcaggaattttgcccaaatcattgaggccgatgaagttctgctgttcgaaagagctacattcttggttatttcccactaccagtgcaaagagcagcgcgacgtccaccggtttgagaagatcagcaacatcatcaaacagttcaagctgagctgcagtaaattggccgcttccttccagagcatggaagttaggaattccaacttcgctgctttcatcgacatcttcacctcaaatacgtacgtgatggtggtcatgtcagatccgtcgatcccttctgcggccactctgatcaacattcgcaatgcccggaaacactttgagaagctggagagagtggatggccccaagcacagtctccttatgcgttgaatattgccaaatgctctttctgaaaatgctgaattgccttttttgtttgcatcctttatttttaatattcataatgtcgtgtgcttaaaagtgggctttgaagtgtgtgctgcttactcctttcatctttctccccgcttccccagtctttaaacattggacgctatttactcagctacccagtagagcttgaagctgacctttctgagaagttggtatggtgtaacactaaagtaggtggttcgtgtgtgttctcattacctggttatgatagatatgcacatcaaagcctttaccagtatcttcctgtattccgtatcagattgcaaagacggaatgttactattttatcagcaaggtattaaaatgcatttataaattcttcttggcttcattcataaataaacgtgttagcaatttnnnnnnnnnnnnnnnnnnnnnnnnnnnnnnnnnnnnnnnnnnnnnnnnnnnnnnnnnnnnnnnnnnnnnnnnnnnnnnnnnnnnnnnnnnnnnnnnnnnnnnnnnnnnnnnnnnnnnnnnnccttttggggccccccnnnnnnnnnnnnnnnnnnnnnnnnnnnnnnnnnnnnnnnnnnnnnnnnnnnnnnnnnnnnntgggnnnnnnnnnnnnnnnnnnnnnnnnnnnnnnnnnnnnnnnnnnnnnnnnnnnnnnnnnnnnnnnnnnnnnnnnnnnnnnnnnnnnnnnnnnnnnnnnnnnnnnnnnnnnnnnnnnnnnnnnnnnnnnnnnnnnnnnnnnnnnnnnnnnnnnnnaaatttaatttnnnnnnnnnnnngggcactttttgggaannnnnnnnnnnnnnnnnnnnnnnnnnnnnnnnnnnnnnnnnnnnnnnnnnnnnnnnnnnnnnnnnnnnnnnnnnnnnnnnnnnnnnnnnnnnnnnnnnnnnnnnnnnnnnnnnnnnnnnnnnnnngggggaaaacacggggggacaaaaaaagtttccctatttggcccccgttttaaaaacaacagggggggaacaccctcccccggggttgtggggg

SEQ ID NO: 353542 - DNA, 479 bp, Homo Sapiens
  misc_feature (346)..(346): n is a, c, g, or t
  misc_feature (406)..(406): n is a, c, g, or t
  misc_feature (419)..(419): n is a, c, g, or t
acatcactacctgtcatgatgtgctcaatgaaaccctgctcgaaggctactatccctactacttctcagccttctctgctgtcttcttttttgtgccgctgatcatttccacggtctgttatgtgtctatcattcgatgtcttagctcttccgcagttgccaaccgcagcaagaagtcccgggctttgttcctgtcagctgctgttttctgcatcttcatcatttgcttcggacccacaaacgtcctcctgattgcgcattactcattcctttctcacacttccaccacagaggctgcctactttgcgctacctcctctgtgttctgtgtcagcagacataaggtntggcattcggaccccctaaatttactattacgggtttcctctggagtgccaggagggtangtctacagtatcntatggttggcaaaggaaagtttccgattcccaggcagttattaacaggcagtgggggcag

SEQ ID NO: 353543 - DNA, 346 bp, Homo Sapiens
ataacgcccacttcctttaacaagtgaaacaagtaaaaaataaacaaatgaaagaaaaggggagacaggaagaaggggggaaagaagacaaggagggcaggaaagaagaggagagacgcactcccatgctcagagccccatggccacacagggtccctgcccaggtgacgcggccgctcaggagcacggaggcttctcaccaactgcgtcaggaaaacaccaggaccacctggggaagataaaactttttttctttaaataaatctataaagtaaaacactgttacaaggggaaagaaagcccacggaagatctaaatggaacctagctaagtcttaacctcgtgc

SEQ ID NO: 353544 - DNA, 1032 bp, Homo Sapiens
  misc_feature (90)..(90): n is a, c, g, or t
  misc_feature (101)..(101): n is a, c, g, or t
  misc_feature (107)..(107): n is a, c, g, or t
  misc_feature (984)..(984): n is a, c, g, or t
  misc_feature (1021)..(1021): n is a, c, g, or t
acggagcagacgcgcgccgggagccgcgggccgggccagccgggccgccggggcccagtgcgccgcgctcgcagccggtagcgcgccagncgtagcggcgnctcggnagccgcggggccctaggccgtgccggggagggggcgagggcggcgcccaggcgcctgccgccccggaggcaggatgagcatcgagatcccggcgggactgacggagctgctgcagggcttcacggtggaggtgctgaggcaccagcccgcggaactgctggagttcgcgctgcagcacttcacccgcctgcagcaggagaacgagcgcaaaggcaccgcgcgcttctggccatgagggcaggacctggggggacctgggcgccgctgccgggggcggcacccccagcaagggggtcaacttcgccgaggagcccatgcagtccgactccgaggacggggaggaggaggaggcggcgcccgcggacgcaggggcgttcaatgctccagtaataaaccgattcacaaggcgtgcctcagtatgtgcagaagcttataatcctgatgaagaagaagatgatgcagagtccaggattatacatccaaaaactgatgatcaaagaaataggttgcaagaggcttgcaaagacatcctgctgtttaagaatctggatccggagcagatgtctcaagtattagatgccatgtttgaaaaattggtcaaagatggggagcatgtaattgatcaaggtgacgatggtgacaacttttatgtaattgatagaggcacatttgatatttatgtgaaatgtgatggtgttggaagatgtgttggtaactatgataatcgtgggagtttcggcgaactggccttaatgtacaatacacccagagcagctacaatcactgctacctctcctggtgctctgtggggtttggacagggtaaccttcaggagaataattgtgaaaaacaatgccaaaaagagaaaatgtatgangctttattgagtcactgccattccttaaatctttggngtttctgaacg

SEQ ID NO: 353545 - DNA, 1060 bp, Homo Sapiens
  misc_feature (775)..(837): n is a, c, g, or t
ttgtgagggaggtgcagacgcgcagccagaggattgacataaaactgaaaaggagtctgtctgcatgagaaaggatggcaagtctctgagagtgacctcagggtggaattctctgttaagtccaccctgccccagagtgctcctaccctcttggtccttttaaagccaaggtgcgatttgggcacctgactgtccagtttaccttaacaagtttgggaatccatgtgatgtttttgatacttcttcctcatttgggacattcagtaggagcatttgggcttccggggcccctgagaccaaagaagaggggccaagtaccctgggaaatcagctgaaggtcaacaaaagactggttgtgagttgcagctgtcccgaaggccccagttgggaagccatgggcagtccagatcaagccaccacgtgccctacgatggccctaacaggaagtgcccattggcagattacacatgtaaatatgacctcagacaaaaaggaaccagaggcccaagggcaataataaggtggaatttgcaggtcagcccaggaattggcagaggaagtaggtgtctgataaccctttgtggagaatgagattccccccacctgtgtgagaaaaataaacagctctggagtcttgttcctgactccagaggaacgagagcattccaggaaagagagattccctggaaaattgaaaatgtgaatcctagggggaaattggggattgtgtctttccctgttgaaaatgtttggatgggaataaatatcttcaggnnnnnnnnnnnnnnnnnnnnnnnnnnnnnnnnnnnnnnnnnnnnnnnnnnnnnnnnnnnnnnntcagaggggggggcgcgaaaagaaacccgcagagggggaccaaaaaatcgcggaacacaaatatattgagaaaagagcggcccccacaaagaggagcgacacaataaagagaaagagaaagagcgcagcatattaaacaacgcgaggcaggaaaaacgagcagcaccggaacattcgtgagaaaaccccactatcggggacacacaatggggacacaaccacg

SEQ ID NO: 353546 - DNA, 634 bp, Homo Sapiens
  misc_feature (65)..(77): n is a, c, g, or t
ggaatcttgattacagcactcacggcatgcaccctactcagtgtgggtgtcttcgtttgggggcnnnnnnnnnnnnngcacttctgaggctagatatgtctggctgaagatttgatgtggttcctccttaagctatgcgtcctgttaataataggtactgtactgggctctgtgtaagtgtcgttggggtaggacctatattttaatactgttcctaacatttcattttactagcgagaaatctttgatttcattttattctttgtaattctagacactagattgtagtttagccataactgatgttttttaaaaagggatatattttcttgcacagttgttcaaaaaagagacaagtttcagtcctcaatgctgtcctttgttttacaggtacaagttttctagctcagacaaactatgaaaaactgtagactattctcaaggtattaactcgcagaccctctgggggtaggggctgttttctaagttacaggcagagtgggactgagatggtacagtgtgcacagacaggtactgagctgacagactgggattttctgtactaaaatgttactttgtatcaaaagttaaacaggctttagtacaacaaataaaggtcaatttctgtaaaaaa

SEQ ID NO: 353547 - DNA, 1522 bp, Homo Sapiens
  misc_feature (1519)..(1519): n is a, c, g, or t
atcaggccaaatcggccgagctcgaattcgtcgagagcggtgtgtggcaagccagtggtcaaaatatatcacaacaggctttgcaaaatcttcagttgcagctgaatcctggaacctttttaattcaggcacagacagtgaccccttctggacaggtaacttggcaaacgtttcaagtacaaggggtccagaacttgcagaatttgcaaatacagaatactgctgcccaacaaataactttgacgcctgttcaaaccctcacacttggtcaagttgcggcaggtggagccttcacttcaactccagttagtctaagcactggtcagttgccaaatctacaaacagttacagtgaactctatagattctgctggtatacagctacatccaggagagaatgctgacagtcctgcagatattaggatcaaggaagaagaacctgatcctgaagagtggcagctcagtggtgattctaccttgaataccaatgacctaacacacttaagagtacaggtggtagatgaagaaggggaccaacaacatcaagaaggaaaaagacttcggagggtagcttgcacctgtcccaactgtaaagaaggtggtggaagaggtaccaatcttgggaaaaagaagcaacacatttgtcatataccaggatgtggtaaagtctatgggaagaactcacatctgagagctcatctgcgttggcattctggagaacgcccttttgtttgtaactggatgtactgtggtaaaagatttactcgaagtgatgaattacagaggcacagaagaacacatacaggtgagaagaaatttgtttgtccagaatgttcaaaacgctttatgagaagtgaccaccttgccaaacatattaaaacacaccagaataaaaaaggtattcactctagcagtacagtgctggcatctgtggaagctgcgcgagatgatactttgattactgcaggaggaacaacgcttatccttgcaaatattcaacaaggttctgtttcagggataggaactgttaatacttccgccaccagcaatcaagatatccttaccaacactgaaatacctttacagcttgtcacagtttctggaaatgagacaatggagtaaatattacacaaatacttattcattgtggttatttttatacagtagtgagaagaatattgttcctaagttcttagatatctttttattgatgtgcaaaaatttttggattgacagtaacttggttatacatgacactgaaatgccttactttgtatgatattccatagtatattaaaaatggtaaaattgcatgggttttgtaggtacttttggaatctagaagaaatgaaattttaccaagttatataaagagaaaattgaatttaacaatgcgaatggtagtctaaccaaatgcatcaatcctgtgtggtttagtgtaaaaatgagaacatgttggtatttatctattgtaagataaaaaagctggtgggtgaaagaaatcatgttatgataaaaanttt

SEQ ID NO: 353548 - DNA, 808 bp, Homo Sapiens
  misc_feature (276)..(276): n is a, c, g, or t
gtattctctcccttagggggaaaaaccagggtcttgttggagcccagtggtttccaccctataccgctaacttgggggccccccgcgccccccaaacgcgaaatggttctaagaaaaggctttttcgaagggccccgaaggccgtcccgccaatgtatggggggggagggtattctccgcggttggttaggtggcaatatgttacactttacgggtaatttacatgatggcttttaaggccctggggagacatggtttttggaaacaagattggantaaaaatcactgctaagacgcaatacaccttatttttttggtcctccaatagtcaagaaaagggataattcactataacattctcttaccacccaaatgcctcaacttatacattttaaacttttttaaacattggttatattgcccaacttcgttattgaaagaatattaacaagacattattttggcaaattaaatcttaaacatggcttttcaacaggatttaaaaggtgactatccctagagttccatgttaaaatgtagttttcaaaatcttacaagagtaatgcttaaaatattgtacatagttaacctaattaaaataattagcttcaaaatgacaaattgataagctaagtaaagcctacactatgtaacatttgcttggaaacttgatttgtcagttatgcataataaaaattccagtcatcaagaaaattacaaaattttttatcataacatgatttctttcacccaccagcttttttatcttacaatagataaataccaacatgttctcatttttacaccc

SEQ ID NO: 353549 - DNA, 235 bp, Homo Sapiens
  misc_feature (66)..(66): n is a, c, g, or t
aagaaatggccatacttcaggaactgcagtgcttatgaggggatatttaggcctcttgaatttttnatgtagatgggcatttttttaaggtagtggtaattaccttttatgtgaactttgaatggtttaacaaaagatttgtttttgtagagattttaaagggggagaattctagaaataaatgcttacctaattattacagccttaaagataaaaatccttgttgaagtttttt

SEQ ID NO: 353550 - DNA, 2365 bp, Homo Sapiens
  misc_feature (2361)..(2361): n is a, c, g, or t
ggcctgggtggcgaatttggcacgaggggcgctgggcctggctcccggctccggtttccgggccggcgggtggccgctcaccatgcccggcaagcaccagcatttccaggaacctgaggtcggctgctgcgggaaatacttcctgtttggcttcaacattgtcttctgggtgctgggagccctgttcctggctatcggcctctgggcctggggtgagaagggcgttctctcgaacatctcagcgctgacagatctgggaggccttgaccccgtgtggctgtttgtggtagttggaggcgtcatgtcggtgctgggctttgctggctgcattggggccctccgggagaacaccttcctgctcaagtttgactggattcgagaccagctcaacctcttcatcaacaacaacgtcaaggcctaccgggacgacattgacctccagaacctcattgactttgctcaggaatactggtcttgctgcggagcccgaggccccaatgactggaacctcaatatctacttcaactgcactgacttgaaccccagccgggagcgctgcggggtgcccttctcctgctgcgtcagggaccctgcggaggatgtcctcaacacccagtgtggctacgacgtccggctcaaactggagctggagcagcagggcttcatccacaccaaaggctgcgtgggccagtttgagaagtggctgcaggacaacctgattgtggtggcgggagtcttcatgggcatcgccctcctccagatctttggcatctgcctggcccagaacctcgtgagtgacatcaaggcagtgaaagccaactggagcaaatggaatgatgactttgaaaaccactggcttacgcccaccatttccgaagtcctgtccacggcggggcctcaacaaaactctctgactggggcccctggcccggccccacccagccgacatgttttctttggcctgggtggtttataccctgagccaacctttaaaaattggtagatttcacataaaagtccagatccacagcttctcttgaagaatgaccacctggctacgccggctcttcggtggcaacactacctgggacactgcctccccagtcaccaagggccccagctggcccgttctactcacctaagtgccgcctgacccttgtacactaggagctggcctcccacctctgcagggttatttcctgcacctcgaggccgctgcgggccaatctggagtgaaacacggggacctgaaggatggagaggctggaccccgctttgaagagggtgcagcctgggaagggcggccttgctggggactgcggtgggagtagagtgcccaggagagggtctgaggggtgggatgggggtcaggacaattttgcaaaagaagtagctggaagccatgggactggcgggagcctgtttgggggatctggatggttgactcctaggagtcaagttcagcatcttcgccgtggctgcagagctgcctgatgggcactagagggcacgccagccccacactccctgggtctggcttcctcccgcaacctcactctagtagagcctgtgcctgcctactagcgctctggggttcggagaggttgggaatttctcagagccaactggctcaggcttgggaaggctggctgctgccctcagctccgcctcatcagctatgtgaaggggtgtgtatggagtgatcctgccgccccctccctgggctcgtccagagatctcaaactccgatgcccctggggccacgtatgttgtgtaaatggatgaaacaggcccttgagttgggagcctgcttcactttgactttcccactgttgctggagacaaagacatcgtgatgagagaaagttcgcacaatctagtcggtaacagccactttccttgagaccaagagagtgcggtggggatgggggggagagcacgggtccccgtctgacagtggccgctgccatattcaggtgtagctaattgctctggtgtgggaatgcaggcctaatgacagaaatctggagaagccagaaatacagatttgtatgtgagatgtcctgattttttaagttgttggcagaaattaattcagaaatcaaatctgcaggccaaacaaggtgcaggacccagctttggccccatgcccctgtaggtccctctgggacagtcaccgctggggtcctggctgctctgtcattgagggatgctgggcactgctgccgggtggccagggtatggggcatgtgcccagcaatgtggctccttggccccgctggccagtgtcctgggcccctgacaggcgctggctgtgagtggtttgtacatgctacaataaatgcagctggcagcaaaaanaaaa

SEQ ID NO: 353551 - DNA, 988 bp, Homo Sapiens
acaccgacctaattaaaccacacctaccctcaaaactcgtcacaacaggctggtaccggtccggaattccttggatgcccgaccggcgctctgtgtggccgaggccatgaagccgcagccgcccggctaggccccgggcggctctagcccagggcggcccgcggggcgctgggcctggctcccggctccggtttccgggccggcgggtggccgctcaccatgcccggcaagcaccagcatttccaggaacctgaggtcggctgctgcgggaaatacttcctgtttggcttcaacattgtcttctgggtgctgggagccctgttcctggctatcggcctctgggcctggggtgagaagggcgttctctcgaacatctcagcgctgacagatctgggaggccttgaccccgtgtggctgtttgtggtagttggaggcgtcatgtcggtgctgggctttgctggctgcattggggccctccgggagaacaccttcctgctcaagtttttctccgtgttcctcggtctcatcttcttcctggagctggcaacagggatcctggcctttgtcttcaaggactggattcgagaccagctcaacctcttcatcaacaacaacgtcaaggcctaccgggacgacattgacctccagaacctcattgactttgctcaggaatactggtcttgctgtggagcccgaggccccaatgactggaacctcaatatctacttcaactgcactgacttgaaccccagccgggagcgctgcggggtgcccttctcctgctgcgtcagggaccctgcggaggatgtcctcaacaaccagtgtggctacaacgtccgagctccaactggagctgggaacaacaaggccttcatcccccaccaaaggcctgcgtggggcccagttttgaaaaaatggcttgcaaggaaaaccctgtattggtgggtgggcgggaaacctttcatggggaatccgacccttccttcca

SEQ ID NO: 353552 - DNA, 474 bp, Homo Sapiens
  misc_feature (14)..(14): n is a, c, g, or t
  misc_feature (44)..(44): n is a, c, g, or t
  misc_feature (100)..(100): n is a, c, g, or t
  misc_feature (135)..(135): n is a, c, g, or t
cgtggataaagcantcagaagacccaagaggttttactaatgangccttagggtcgtctgaccttggctggccaatagaacctacacgggccaaattaanttacgagagtaataatttttcaaaagccaattttntttctgtattttctgtatgaaactgccaatatcatgaatagaaagggagaaccataaaggagaaagaacgtgatgttctgttatgttcatgtaaacctaaagaaacagtgtggaggcaggcgcgatcagccgaactctagggacttggtgttgcttggaaggcatccatacctgcattttgcattcttcgtatgtaatcatattgccaaagacaaactatttcatcatttattgtaaataacacttttccccagacctaccataaagtttctgtgatgtattgtcttccagttgcaataaaaattactgagttgcatcaattgaagaaaaacgaaaaaa

SEQ ID NO: 353553 - DNA, 2118 bp, Homo Sapiens
cccgggttgagtgaagagagagatgatctgaaacttctttgtgaacaaaatgaagaagaagtctctccacagttgtttactttccacgaagctgtttcacaaatggtagaaatggaagaacaagttgtagaagatcacaggacagtgttccaggaatctattcggtggttagaagatgaaaaggccctcttagagatgactgaagaagtagattatgatgtcgattcatatgctacacaacttgaagctattcttgagcaaaaaatagacattttaactgaactgcgggataaagtgaaatctttccgtgcagctctacaagaggaggaacaagccagcaagcaaatcaacccgaagagaccccgtgccctttaaaccggcatttgctgctaaaggatacccagaaccctcactactgtaacatacaacggttcagctgtaagggccatttgaaagtttggaattttaagtgtctgtggaaaatgttttgtccttcacctgaattacatttcaattttgtgaaacactcttttgtctacaaaatgcttctagtccaggaggcacaaccaagaactgggattaatgaagcattttgtttcatttacacaaatagtgatttacttttggagatccttgtcagttttattttctatttgatgaagtaagactgtggactcaatccagagccagatagtagggggaagccacagcatttccttttaactcagttcaatttttgtagtgagactgagcagttttaaatcctttgcgtgcatgcatacctcatcagtgattgtacataccttgcccactcctagagacagctgtgctcaccttttcctgctttgtgccttgattaaggctactgaccctaaatttctgaagcacagccaagaaaaattacattccttgtcattgtaaattacctttgtgtgtacatttttactgtatttgagacattttttgtgtgtgactagttaattttgcaggatgtgccatatcattgaacggaactaaagtctgtgacagtggatatagctgctggaccattccatcttatatgtaaagaaatctggaattattattttaaaaccatataacatgtgattataatttttcttagcattttctttgtaaagaactacaatataaactagttggtgtataataaaaagtaatgaaattctgagaagagttttatcttaggaaaatacatatatatgcagtgtgtgtgccagtgtggtattaacaagactaatagtgcagtttgatccttaccaatatcattacttaatttgaagtgttcattagcaccccaaaatataccttttctatgtactgttaaaagaaattggcttctgatgcatgaacatttacatgtacattgaaagtagtccataatagaagttagtttaagccaagtgtagacagtacattactcccttgaaaaagaattaagttgaaagagttgactttgccttaaaaggcagatctaacccaagctccatccagtaccaaatgtgaaacttcattgttgtttggtgagaatcgccaaattctcactaatacattggtatggtgtagggcatgctactttttaaacagcagcacttatttttacagattgctactccaaggaagaaaactggccacttttcatgtaaatattttgttcaaagatttgtatatctctctaggagttttccctcagttcccaggatggggtccaggagtagattaacagctaaaaatctcccaaggatatcttgttttgatttatttactccagggaactatcagctccttcacaggagccaaaggggagctatgaatagagggtcacatgagccagattctttactgttcataaaacccagagagtagttgtgaaagatcctaatacaattgtgaaaagctctgtaaacatgaaatctaaaacaaatgtagattttcacaatatgcttattaataaatgaagtctatggaataagttttagagataatttacttcagtcacctttgttttggaaaggactcaggttttcttgcagctgtaagatatattctatttgtgtttatttcaaagggaagaggaaggatggagaactgttacaattg

SEQ ID NO: 353554 - DNA, 958 bp, Homo Sapiens
  misc_feature (913)..(913): n is a, c, g, or t
acagcccatctccatgagtcccggcaagctctgggtcatgcccttccctggtcacccatctgcccctcacctcgtcatccagggacccagaccctgcaccttccatgtgggcccacagatccttggcaggtacctgaggtgcaccattgagtgtcggatttggggttagcatccagaaagaagaatgcgcatgacgctctgtgaaggctggaactcaggtcttcagggagagaaaggaagactggattgcaccttgatgcctcctgaggaggcggcccccctcttgaggtgggcgtgggcccggcccagccttatccaagtcgctctgtccacctcccccttcctggcccccaccccactcctgtgcctcccaggagccctccctgtgctccacctgcctccgcagaaggaagcctctttctctgtttccctgggtgagggggctggcaggtggctaaccccatttagcatctccaggccctgccatggtgtctcatcttgctgttatctctagctctttccctcctcccatttcctttagtagttgaattttgcaaagcttgtagcagtagctcagttgcctgcagcatccttgtgtgtagataaattagtcgacagaaactcagcactggggacaggattgcaaagtcggggacatagatgcagacagttgttgagatttggggatagccgggcttgtgagcggtgcccatttccagatgaagcctttcagcccttctgagtccccggcccttggtgcgatgtctgtgagtttgacctgcccagcgtgtgggctggctcaatgctgaataaagtgggtttgtgtcagctcgtttgcttcgtctccgtgtgtccacctggcctcttccccctgccctggccaccctccagtgtcaaaggaaacttcctcgtnacacgtgctaaagcatggtgaggaggactttgattggggaccatt

SEQ ID NO: 353555 - DNA, 1952 bp, Homo Sapiens
caggaacttgcacggtgacgtgcgccgctgccaggaccttgcaggtggagagcatagttgcccaaatcaaggcggaggagcgcaccgccgctaggatccaggcggagaagcccaccgcggccaggacctaaggatgcagtacactgctgccaggatcttgtctgtggagcgcagcgcgggccaggacctccggctgcagcacaccgctgccaggatcttatcggcagagcgctccgcggtccggaccccgccccgtgcgcgtccccgaccccgccccgtgcgcgtccccggcgttggcgtcttcgtcctgttgctggtctccgtccggtcgccggccgtctaggtctccggccctccccagccgctcctgcgcccttgccggccccgccgcccgcagccctggcgctccctgcgggccccgccgaggccgcctgcgccctgtgccagcgcgcgccccgggaaccggtgcgcgccgactgcggccaccgcttctgtcgggcgtgcgtggtgcgcttctgggccgaggaggacgggcccttcccgtgccccgagtgcgccgacgactgctggcagcgcgccgtggagcccggcaggcccccgctcagccgccgccttctggcgctcgaggaggcggccgcggcgcccgcgcgcgacggcccggccagcgaggccgcgctgcagctgctgtgccgcgccgacgccggcccgctctgcgccgcctgccgtatggctgcgggccccgagccgcccgagtgggaaccgcgctggaggaaggcgctgcgcggcaaggagaacaaggggtctgtggaaatcatgagaaaggacttgaatgacgcccgggacctgcatggccaggcagagtcagcagctgcagtgtggaagggacacgtgatggaccgtaggaagaaggcactgaccgactacaagaagctgcgggccttctttgtggaggaggaggagcatttcctgcaggaggctgagaaggaggaggggctccctgaggacgagctggctgaccccactgagcggttcaggtcactgctgcaggcggtctcggagctggagaagaagcatcgcaacctgggcctcagcatgctgctgcagtgatggcgccaacccgtggcagtcccagagctggaggcaggaggatggatcctcatctccatgggaagtgtcagcgtgtggctgccagggaagcgtggcaggcgcctggccttgggtccatctacatagttgcgtgtttcaacaatgtccatttatccttcaccccgaggcgtgttttgggggctgcaaacacctcccggtagaggctggacctgaggacccttcccacctgtgcccgtcccttcctgaagtcctagccacagcccatcctccatgagtcccggcagctctgggtcatgcccttccctggtcacccatctgcccctcacctcgtcatccagggacccagaccctgcaccttccatgtgggcccacagatccttggcaggtacctgaggtgcaccattgagtgtcggatttggggttagcatccagaaagaagaatgcgcatgacgctctgtgaaggctggaactcaggtcttcagggagagaaaggaagactggattgcaccttgatgcctcctgaggaggcggccccccctcttgaggtgggcgtgggccccgcccagcccttatccaagtcgctcttgtccacctccccccttcctgggcccccaccccactcctgtggccttcccagggagccctccccggggttccaactgccctcccgcagaaaggaagccctctttccccgggatcccctggagggaaggggggctgggcaaggtggctgaaacgccaatttagccatctcccaagggccctggcaaggggggtcccccacccttgagggagaaacacctgacagctcttgtcgcccgccccacagatccccggccgaagga

SEQ ID NO: 353556 - DNA, 431 bp, Homo Sapiens
  misc_feature (26)..(26): n is a, c, g, or t
  misc_feature (71)..(71): n is a, c, g, or t
  misc_feature (114)..(114): n is a, c, g, or t
  misc_feature (138)..(138): n is a, c, g, or t
aaaggcccacccaaacccggcctaantttttgtaatttttgggggaaaatgggggtttccacccatgttgnccaaggcccagtctgaaacccccgggctcaagtgaaccccccngcctttggccccccccaaaatgcngggattaataggcatgaagccgctgcacttggccctgatactgatttttattcccttgcgttatcacatagtgttgtatttgaaacatagttcatggttttatcaaagaactgaagatgagaatactggtcatctaactttgtaatttgatttgattatactgtaaagtttgacagtctcattttaacactgcgtttgtatctattactaaaatgtattttttgacctcttactgattcattgttggtatgtacaaactgttgacttgtaaaatcaataaagtcttagttgga

SEQ ID NO: 353557 - DNA, 747 bp, Homo Sapiens
acctgttgaatctgacagaaaccagaaacgcacttttgagaaaaagacatttgtaattcactccagttttccatacacatttagccaggttcaaagcccatctgtggaatccctaaactgccttcaaagaaagggagttccccgatctaaaatggtcgattatatatttgtgtcaagaattagaaggcaagggtcactaaatattttaaggattaaggtaccagaggcatcagtgtataaggatggagtctggtctttaattacgacaagggtattgcttacattctactctctggttttcaaaaagatctgaacatgctgacaaatcccagctcctcacaaatcttgtttgaaggacttgtgggaagtgatattccttactattagatcacgccccttataactacatgttaacatccagccttttatctgtttgagtaattgtagggatagaaagtgaagcccccagagttaggtgcaagtatagcacccagctgaaaggcatcatggagtctaagggccttctacagaaggggcaatcctttgggttatttctggtgtaccactgtcttctctacctcggtccaacaccacctctcttggacaaaaaataaaacaagcaacagccatcagatgagtgaatagatttgaatgatttttcccacagggaatcagcctcaaatgttcatgtttcaccccgtcccctttaaataaaaagaatctctgtgttctctttgggcaaaatgt

SEQ ID NO: 353558 - DNA, 1742 bp, Homo Sapiens
  misc_feature (1441)..(1477): n is a, c, g, or t
cttctccaaaaactcttgtgaaatcgcacagtttggcacagccgcctgagtttgacagtggagttgaaactttctctatccatgcagagaagcctaaatatcaaataaataatatcagcacagtgcctaaagctattcctgtgagtccttcagctgtggaagaggatgaagatgaagatggtcatactgtggtggccacagcccgaggcatatttaacagcaatgggggcgtgctgagttccatagaaactggtgttagtataattatccctcaaggagccattcccgaaggagttgagcaggaaatctatttcaaggtctgccgggacaacagcatccttccacctttagataaagagaaaggtgaaacactgctgagtcctttggtgatgtgtggtccccatggcctcaagttcctgaagcctgtggagctgcgcttaccacactgtgcgtccatgactcctgacggttggtcttttgctctaaaatcatccgactcctcgtcgggtgatcctaaaacctggcaaaacaagtgtcttcccggagatccaaattatctcgttggagcaaactgtgtttctgtccttattgaccacttttaactcttgaaatataggaacttaaataatgtgaaactggattaaacttaatctaaatggaaccactctatcaagtattataccttttttagagttgatactacagtttgttagtatgaggcatttgtttgaactgataaagatgagtgagcatgcccctgaaccatggtcggaaaacatgctacacactgcatgtttgtgattgacgggactgttggtattggctagaggttcaaagatattttgctttgtgatttttgtaatttttttatcgtcactgcttaacttcacatattgatttccgttaaaataccagccagtaaatgggggtgcatttgaggtctgttctttccaaagtacactgtttcaaactttactatggccctggcctagcatacgtacacattttattttattatgcatgaagtaatatgcacacattttttaaatgcacctggaatatataaccagtgttgtggatttaacagaaatgtacagcaaggagattttacaactgggggagggtgaagtgaagacaatgacttactgtacatgaaaacacatttttcttagggaaggatacaaaagcatgtgagactggttccatggcctcttcagatctctaacttcaccatattaccacagacatactaaccagcagaaatgccttaccctcatgttcttaattcttagctcattctccttgtgttactaagtttttatggcttttgtgcattatctagatactgtatcatgacaaagactgagtacgttgtgcatttggtggtttcagaaatgtgttatcacccagaagaaaatagtggtgtgatttggggatatcnnnnnnnnnnnnnnnnnnnnnnnnnnnnnnnnnnnnngacaaggggcaatggtggttttctgttctttctggctatgcatttgaaaattttgatgttttaaggatgcttgtacataatgcgtgcatactacttttggtcttgggttgtaaattaacttttataaacttttacctttttaatcataaacaagaccacgtctcttaaaggtacctttggtatctttcctgtacctttgagccttgactttgacctttgagtataaagtattggttctattaacattgaagacatttttctaaaa

SEQ ID NO: 353559 - DNA, 465 bp, Homo Sapiens
  misc_feature (19)..(19): n is a, c, g, or t
ccacaaacatgcagtgtgnaccatgttttcccgaccagggttcagggggcatgcctcactcacctttatcaagttcaaacaaatgccctcatacctaacaaactgtagtatcaactcctaaaaaaggtataatacttgatagagtggttcccatttagattaagtttaatcccagtttcacattatttaagttccctatatttcaagagttaaaagtggtcaataaggacagaaacacagtttgctccaacgagataatttggatctccgggaagacacttgttttgccaggttttaggatcacctatgagagaaaagaagttgatgtcatttacagttcagtaaactgctatccgtaatgctttgcaattatagggcaaatacgtatatttagacataattttcttctgtttcttcagcatattgaatttgtatcaaaacacattgctgtatttcaaagcagcc

SEQ ID NO: 353560 - DNA, 935 bp, Homo Sapiens
agcggaatgtcttcaaaaactcccacttctccaaaaactcttgtgaaatcgcacagtttggcacagcctcctgagtttgacagtggagttgaaactttctctatccatgcagagaagcctaaatatcaaataaataatatcagcacagtgcctaaagctattcctgtgagtccttcagctgtggaagaggatgaagatgaagatggtcatactgtggtggccacagcccgaggcatatttaacagcaatgggggcgtgctgagttccatagaaactggtgttagtataattatccctcaaggagccattcccgaagagtttgagcaggaaatctatttcaaggtctgccgggacaacagcatccttccacctttagataaagagaaaggtgaaacactgctgagtcctttggtgatgtgtggtccccatggcctcaagttcctgaagcctgtggagctgcgcttaccacactgtgcgtccatgactcctgacggtgatcctaaaacctggcaaaacaagtgtcttcccggagatccaaattatctcgttggagcaaactgtgtttctgtccttattgaccacttttaactcttgaaatataggaacttaaataatgtgaaactgggattaaacttaaatctaaatggaaccactctatcaagtattataccttttagaagtgatactacagttgttagtatgagggcatttgtgttgaactgataaaagatgacgtgagcatgccgcctgaaaaccaggtcgggaaaacatgctacacactgcatgttgtggattcgcacggactgtcgggtatcggctagaggttcacagaatatgtggccttggtgatctggtaattttcattggccatgcttaactcccatatggacttcgttaaataccagcataaggggtgcattgaagctgtattttcc

SEQ ID NO: 353561 - DNA, 904 bp, Homo Sapiens
  misc_feature (451)..(488): n is a, c, g, or t
  misc_feature (800)..(800): n is a, c, g, or t
agcggcatacgtacacattttattttattatgcatgaagtaatatgcacacattttttaaatgcacctggaatatataaccagtgttgtggatttaacagaaatgtacagcaaggagatttacaactgggggagggtgaagtgaagacaatgacttactgtacatgaaaacacatttttcttagggaaggatacaaaagcatgtgagactggttccatggcctcttcagatctctaacttcaccatattaccacagacatactaaccagcagaaatgccttaccctcatgttcttaattcttagctcattctccttgtgttactaagtttttatggcttttgtgcattatctagatactgtatcatgacaaagactgagtacgttgtgcatttggtggtttcagaaatgtgttatcacccagaagaaaatagtggtgtgatttggggatannnnnnnnnnnnnnnnnnnnnnnnnnnnnnnnnnnnnnggaccaggggccgggggggttccgggcctttcgggctatgcttttgaacaatttggatgttgaaggatgcttgtacataagtgcggtgcatacccctttggtccctggttgggacaattaacttttataacctttaccttttttatacttaaacaagaccccgcttctaaaggggaccttgggatactccctcgtgacctcttggagcgctttgagaactttgggacctcctggccgggaattaaaagccgcggttttcttatgaaccccatttgcaaggggcgcatatttgtacaacaacaagggggtgcnccagaaggtgttcacacttttaaagtggctcgcggctttacacagataacaggtactccaagagattccctagtcgggagtaaaatcctgtcggcaaggttctc

SEQ ID NO: 353562 - DNA, 825 bp, Homo Sapiens
  misc_feature (45)..(45): n is a, c, g, or t
  misc_feature (220)..(258): n is a, c, g, or t
ctaacttcaccatatttaccacagacatactaaccagcagaaatnctttaccctcatgttcttaattcttagctcattctcctttgtgttactaagtttttatggcttttgtgcattatctagatactgtatcatgacaaagactgagtacgttgtgcatttggtggtttcagaaatgtgttatcacccagaagaaaatagtggtgtgatttggggatannnnnnnnnnnnnnnnnnnnnnnnnnnnnnnnnnnnnnngacaaggggcagtggtggttttctgttctttctggctatgcatttgaaaattttgatgttttaaggatgcttgtacataatgcgtgcataccacttttgttcttggtttgtaaattaacttttataaactttaccttttttatacataaacaagaccacgtttctaaaggctacctttgtattctctcctgtacctcttgagccttgaactttgacctctgcagcaataaagcagcgtttctatgacacatgcaaggtcattttttttaagaaaaaggatgcacagagttgttacatttttaagtgctgcatttaaaagatacagttactcagaattctctagtttgattaaattcttgcaaagtatccctactgtaatttgtgatacaatgctgtgccctaaagtgtatttttttactaatagacaatttattatggcacatcagcacgatttctgtttagataatacaccactacattctgttaatcattaggtgtgactgaatttcttttgccgttattaaaaatctcaaatttctaaatctccaaaataaaactttttaaaat

SEQ ID NO: 353563 - DNA, 260 bp, Homo Sapiens
gcacgagccagcctgggcaacaaaagcgaaattccatctcaaaaaaagaaaacgcgccccatctcgctccaccacaagcgcctttatatactcaatgatgggtggaggaaaagggcccaagggctcacaccgcacaggagcctttactcaagtttcagctagttttccttcccctgcattttgaactccttttagttgttggtgatatcctttggtgttcactgcctttgtaaaacaagtaaataaagtaagcggaagat

SEQ ID NO: 353564 - DNA, 1251 bp, Homo Sapiens
gaaattattaatccctgcctgtgctctacatagcctcatgggcatcattggatagctcagagggcccttgattctggcaaggcaaataaagccagaatgagaaattaccatcttctactagagaaaaccaagagaaaaatttttatgctaggatgcctttatgaccacttaattttttaatcttagtttaatggtctctccctggtgctaactgctgacagtggccacctcttttttgggggttgaggggcctacataactagctggccttaccccatatctttggttccaaacataataccatcttttggcttcttctgaactttagatctccataacacatgtactgtagaatgtgatggaaaagcattgatgagaatttatgggcagttcagatggtgtttcccaacttaggctctttattaactgggttaaggtttctccaaaaagggcatttcaacaatgggaattatttaatgtaacagtgggcacagattacttatcttccttctctgctttgtgactcaccagcagtaacacacacaatccacatcttgtgcacctcaaatgaacagacttggtttccttgctttcttgacatttccatgactgtttcacatacaaactattgggtgaggtttttcagctgttaccgacccacgtcctgctgtctctgtgtggtcctacaaaaactgtccattcccacccctttgctttgccatttgcaagagtctggaattgtcaggtctcagcttcgaaaagtcctggttccactgacaggacacattctttagtgggaattaagacctacaaagtctagtttgtatgtaggtatgaagggaattttttaaataaattgaaaagctgtgaacagcattagaactttgtctatttcttaattttaaaatatgctgatatgccttaaactgtagttgtagatccttgtcattttgctgtttgaaaataaccaatgtgttttctaaaactgtcgtgtaatctactttcattgttaatgcagaattgtcatatatgtaagctgcatgttagacatttgtcttttttaaactaaagtaattgtattgatgtgaagcatatcattttttcaaatatgaaagtgatcacttagcaacatgcttggtaatttggcatctgttaaggtaggagagtggtgaacagataatctatgcatatatcactagtgccaagacataaagcgggggaaaatatatttttacccaaacattaaaaaaa

SEQ ID NO: 353565 - DNA, 644 bp, Homo Sapiens
  misc_feature (22)..(22): n is a, c, g, or t
  misc_feature (27)..(27): n is a, c, g, or t
  misc_feature (144)..(144): n is a, c, g, or t
aatggcaaagcaagggggtggnaatgnacagtttatgtaggaccacacagagacagcaggacgtgggtcggtaacagctgaaaacctcacgcaatagtttgtatgtgaacagttcatggaaatgtcaagaaagcaaggaaaccnagtctgttcatttgaggtgcacaagatgtggattgtgtgtgttactgctggtgagtcacaaagcagagaaggaagataatggagaaaaccttaaccaattaataaagagcctaagttgggaaaacacaatctgaactgccaataaattctcatcaatgcttttccatcacattctacagtacatgtgttatggagatctaaagttcagaagaagcaaaaagatggtattatgtttgaacaaaagatatggggtaaggccagctagttatgtaggcccctcaacccccaaaaaagaggtggccactgtcagcagttagcaccagggagagaccattaaactaagattaaaaaattaagtggtcataaaggcatcctagcataaaaatttttctcttggttttctctagtagaagatggtaatttctcattctggctttatttgccttgccagaatcaagggccctctgagctatccaatgatgcccatgaggctatgtaga

SEQ ID NO: 353566 - DNA, 427 bp, Homo Sapiens
ctctaaagccatgtaaaacccgaaggcattaaaatttattaaatgatgcaataacaacagaattctttatttacaatagcattatttaacatcaaataagcaaatagcatcagcaaagcaatattaacttgcataaatgtatttaaaatttctctgaatatatctacctttgcataaactgctcacactagaaatacaaacatcaatgcaggtgaacaaagtgatgttcagagtcaactccattttgaaaataaatcacaacctgaaacactgtaagctttctcctgaagaaccatagttaatatattgcttaattttacccttgtataatcttttcatatacacacatctcagatgcaacttcatgaggaactgtacaaataaaactcacaaatgacaaaggaaaaaaatgacagttaaatgtctg

SEQ ID NO: 353567 - DNA, 517 bp, Homo Sapiens
  misc_feature (104)..(130): n is a, c, g, or t
taaataagacattttaattttgttataatggacaatttagaagtttgattaattatattatctatttaggcattaatataaaagaggtaggagtctgttatttnnnnnnnnnnnnnnnnnnnnnnnnnnnctgtcttgtctacttttagcttcattctcccatattttgaagggtgtgtaacttcagctctgcaggattgcatggggtaaaacttgttaccaacacatgtgaaccattgctacattgtaggttgtgatcattttgccccactgaagcccatgtatctgaccttacgtgccttttgaactaggagaatcgggctaatttattaatgatgataattataatgtatctgtacagcactttttacatttgcgaagtgctttccaatccatgttagttactagttattacagctgtaaggataaaacacgtcatgtggattcattttgaattggtgctattggtatttcctctgttattgctaataaatgaaaatggtggtatgaaaaaaaa

SEQ ID NO: 353568 - DNA, 1240 bp, Homo Sapiens
  misc_feature (377)..(403): n is a, c, g, or t
accaccattttcatttattagcaataacagaggaaataccaatagcaccaattcaaaatgaatccacatgacgtgttttatccttacagctgtaataactagtaactaacatggattggaaagcacttcgcaaatgtaaaaagtgctgtacagatacattataattatcatcattaataaattagcccgattctcctagttcaaaaggcacgtaaggtcagatacatgggcttcagtggggcaaaatgatcacaacctacaatgtagcaatggttcacatgtgttggtaacaagttttaccccatgcaatcctgcagagctgaagttacacacccttcaaaatatgggagaatgaagctaaaagtagacaagacagnnnnnnnnnnnnnnnnnnnnnnnnnnnaaataacagactcctacctcttttatattaatgcctaaatagataatacaattaatcaaacttctaaattgtacattataacaaaattaaaatgtcttatttaaggtgacagcaaattttgttactttctatgagctgatatttcagataccattagaatttcaaagcattctgcaacttcaaagaggtcagattggtaaaatttgtgcttgcacaccctcatggaatattgtcagtattcattccaagattgttactagaaccaaacagctttatccattcccttgccagcagaagtcttggcacgagatggctcttggctggaccataaataaaattccttgaatcaccagtatcttgatttaagaaagaaattttactgtgtctttcatacacaaaagctgattaacaatggttaaaaaaacactactccactttttcacaggtgtacaaaaggaaatataatggaattacattcaacaataaagcttaaagttcactctaggtaatagttgcattaacattcacatacacaagcacagagtaagtatatttcaggagtcttagcatagcatacagcatacatatgggagattgatttcaggtaacatcataggtgttagtaagattagcaattcagagtgttatagaaaaggaaaactaaaccaaagagaaggtgtaggctagcacaccaagacaagtcacagaattagtagattgaaaaatctgctcactgtatgagaaaacaatatttttcttcaatttttgggtcttgatatatagttggttagagaaggttgtgtatcaaagtgcacataattgtttcttagaaaagag

SEQ ID NO: 353569 - DNA, 1503 bp, Homo Sapiens
  misc_feature (257)..(320): n is a, c, g, or t
caggagggcctgatcagcagtggccaacagtatccagtgcaacaccagaaccagaggcaggagaagtgtcccctccagtcggtgcgggtgtcaacagcaacagctggacctttaaatacggaccaggcaaccccaaacaatccggtcccggtgagttgcccgacaaattcattatcccaggatctcctgcaatcatctccatccggcaggagcctactaacagccaaattgacaaaagtgacttcataaccttcggnnnnnnnnnnnnnnnnnnnnnnnnnnnnnnnnnnnnnnnnnnnnnnnnnnnnnnnnnnnnnnnngagaaagggaacagcacgactgacaacagtgaccagtgaggtcctcaaatggaaacaagccacttagccagtttttgtaataatggcaaatctctcccatgtagcaattccctgctcctttttcctatctacatgagccctcttagagacctcagaaatctgcagaaagttccctgtgtctgtctagaacgcatttaacaggttttgtcgtaaaagctttactaagtctggtgttaactctttctctccactctggcttgttttcagaacctaaaaagcagacccaagtttcctttctcctccgccgcaaaggagaggctgcccagccccgccagtgagaggttggactctctgcccctgtgctccggggatcctgtcttgatgacacttgcagggcaggctgaaaagttttgagattgagcagcttgggagtttgtggccactgggtatgtgtggctaccgcgggtatgcgagtgccagatattggctgagacgagccagcttagactaattggtacaaggaaggcaagaaaacaaagacaaataaacagcggaagttatcagtatggaggggaagtgtaaacttaaagggaccagactttctaaatcttacaactcaagaggtggcagccaccctctaggagacaaaactacccccactgacaaggctttaggagaccctaaagtctgttggctgtgacgtcattatacctaaaatctgcatcatacctgcaagccaacagttcagtgttttaacagagaaccaccctgggaaacagaagcagatctgatgtgtttcctatacatgtcctgtgctcactttattaaaaattcttttgcacacaatgtttatgaaaaggccagatccttttccaatacttatgcaaaagcaaaagaaaaccccgacacctcacctttcgctgtttgttgtttcatagatttatttaaaaaaagagaaagtctatagctataaatctttaaagagaaatatgaatacaattcccctaaactctcctcaaaagagaattcagtctacagccatttaaatgatcattgctgctacagaagtgctttaagagaattgcctgaaacatctgtattatatcggccacctgccaatcacagctttactctttcaggtcactctggggctgcctcttgcatgtattactaaataaaatga

SEQ ID NO: 353570 - DNA, 872 bp, Homo Sapiens
  misc_feature (52)..(88): n is a, c, g, or t
gggatgtatagatcactatagggcgaactggagctcaccgcggtggcggcgnnnnnnnnnnnnnnnnnnnnnnnnnnnnnnnnnnnnnatcaggccaaatcggccgagctcgaattcgtcgagagcggtcgcgggcgtcagtgggtgccacgggccccgaggtgacgctggtggatgtcaacgtgtacctgatcatcgccatctgcgcggtgtctagcctgttggttctcacgctgctgctgtacactgtgctgcggtgctcggcgatgcccaccgagggcgagtgcgcgcctggcaagccgacgctggtgtgttctagcgcggtggggagttggtcgtactcgcagcagaggaggcagagggtgtgctctggcgagggtccgcagaagaccgacctcatggccttcagcccgggcctttctccttgtgctggatctacagagcgaacgggagaaccctctgcttcctcagattcaactgggaagccacgatagcccaaccctgactggcgttactctgcctccctgagagcaggcatgcacagctctgtgcacctagaggaggctggcattctacgggctggtccaggagggcctgatcagcagtggccaacagtatccagtgcaacaccagaaccagaggcaggagaagtgtcccctccagtcggtgcgggtgtcaacagcaacagctggacctttaaatacggaccaggcaaccccaaacaatccggtcccggtgagttgcccgacaaattcattatcccaggatctcctgcaatcatctccatccggcaggagcctactaacagccaaattgacaaaagtgacttcataacttcggcaaaaagggaggagacaagaaaaaagaagaaa

SEQ ID NO: 353571 - DNA, 273 bp, Homo Sapiens
ggagggtactgacggtgagtcaggtagatcataggtgtagtaggatggagagtgcagagtgttgtagaatgaggaaaagtacaccgagagagaaggggtaggctagcgccaccaagacaagtcgacagaattagtagatggaaaaatctgctcacggtatgagaaaacaatattttgcttcaatttgggggtcttgatatatagttggttagagaaggttgtgtatcaaagtgcacataattgtttcttagaaaagagcggaatgtatcgtta

SEQ ID NO: 353572 - DNA, 263 bp, Homo Sapiens
  misc_feature (55)..(55): n is a, c, g, or t
tttgcccccactgaagccccatgtatcctgacccttaacgtgcccttttgaaccnaggagaatcgggctaatttattaatgatgataattataatgtatctgtacagcactttttacatttgcgaagtgctttccaatccatgttagttactagttattacagctgtaaggataaaacacgtcatgtggattcattttgaattggtgctattggtatttcctctgttattgctaataaatgaaaatggtggtatgaaaaaaaa

SEQ ID NO: 353573 - DNA, 1752 bp, Homo Sapiens
  misc_feature (1733)..(1733): n is a, c, g, or t
agcggagtgccaggctggaggcggcagcggttggaggcttcgcccggctttgcagcggggacttcggcggcggcgcctcaggcacctcggcccggacacgatgaggcgagtggtacgacagagcaagtttcggcatgtatttgggcaagcggtgaaaaatgaccagtgctatgatgacatccgggtttctcgtgtgacctgggatagttccttttgtgctgtcaatcccagatttgttgccataatcatagaggcaagtgggggaggagcgttccttgtcctccctctgcacaagactggtcgaattgacaaatcttaccctacagtatgtggccacacaggaccagtgctggacatagactggtgcccacataacgatcaggtcattgccagcggttcagaggactgcacggtcatggtatggcagatcccagaaaatggactcaccctttccctgactgaacctgtggtgattttggaaggccactcaaagagagtcggcatcgtggcttggcatccaacggcccgcaatgtgcttcttagtgcaggctgtgataatgccattatcatctggaatgtgggaacaggggaagcccttataaacttggacgatatgcattcagacatgatttacaatgtgagctggaaccggaatggcagtctgatctgcacagcttccaaagacaagaaagtgagagtcattgatcccaggaaacaagagattgttgctgagaaggagaaagcacatgaaggagcaagacccatgagagccatcttcctggccgatggcaatgtcttcaccactgggttcagccgcatgagcgagcggcagtgggctctctggaatccgaaaaatatgcaggaaccaattgctcttcatgagatggacactagcaatggggtgttgctgcctttctatgaccctgacaccagcatcatttacttatgtggaaagggtgacagcagtattcgctattttgagatcacggatgaatccccgtacgtccactacctcaacacattcagcagcaaggagcctcagagagggatgggttacatgcccaagaggggacttgatgttaacaaatgtgagattgccagattcttcaaacttcatgagagaaagtgtgaacctattattatgactgttcccaggaagtctgaccttttccaagatgacctgtatcctgacacagcggggccagaggccgcgctggcaggcagaagagtggttcgaagggcaagaatgcagacccaatcctcatctccttgacagcacgggtacattccaggcaaaaacagggatctcaaggtggtcaagaagaacattctggatacgcaagcccactgcaaacaagaagtgcgacctgatcagcatccccaagaaaaccacagacacggccagtgtgcaaaatgaagccaagttggatgagattttaaaagagatcaaatctataaaagacacaatctgcaatcaagatgagcgtatttccaagttagaacagcagatggcaaagatagcagcctgaaggtcccacccccacccctacagaaaaaatgggagcaagaacttgtgcttgggagctggttattggtgtggtcctagggagggcggaaagggaggcactgccatttggagacattccatttcagatttgtcaaccagcgataggccacattccagtaagaactcaatttgtctcccaaatttgcagaaacaaaacgtgatttanaagctgagctttttatcag

SEQ ID NO: 353574 - DNA, 1034 bp, Homo Sapiens
agctgattctagagtatccctctctgcccagattccatgtttcaaagacgactttacctcctgcctttggattgaccctgcatttgaccacggactccagtctgtgtgtagggagagagctgagtaggaggcctccactccggatcgaggcctgtatagggctcgtttccccacacatgcctatttctgaagaggcttctgtcttatttgaaggccagcccacacccagctactttaacaccaggtttatggaaaatgtcaggccttccccacaactcccgtctaactgctgtcgcccccctacttgctggctctcagaagcctaggggagtccctgtggtcctgaattctttccccaaagacgaccagcatttaaccaacctaagggcccaaaggccttggacaactgcatggagctgcactctaggagaaggaggggaaccagatgttagatcaggggagggagcaggagtgtccctcccgtcagtgcctacccacctgtgaggcagccttctgatggcctggcccaccttccccagaaccaggggaggcctgaggcttcagttttactctgctgcaaaatgaaggcgggcctgcaagccgactacacctacggaggctgttgaggacaatttcattccattaaattaaaaaatactgactggctggcaggcaggtgccatgtctgggaacagggacgggggagcttcacctttttgtcttggcttttctttgggctgtgggggggcatccatttccagggtcggggaggaaataccaaatgcattgttgttctgctcaatacatctcacttgtttctaataaagaaagcagctgaacaaaaccttctgtcctggtattcctggtcagcaggtggcagtggaagaaatggagtgctggagcctaggctggagccagggcgacagggcttggacacaaagtccctcaagcccacagcaccaggccagcttccaaaggccttcctttaaggctgcccaacttccagggcaaacttggtgttgtcagacccttcc

SEQ ID NO: 353575 - DNA, 403 bp, Homo Sapiens
tcttaaccagccagtcttggtgttagccactggggtaagctttaattgtccctttagcccaatccaaaccattaaggactatggagggtctttttttccttttatttaacatgtcattgttcatctattaaatcttgatcagggtttcaagaatgactgcagtgggttttggaaacagacttatcattattgatttgaggtttcccagagatatagttcacagttaattgttgcgctctaatacaactgaccatttaaaattgaacaagtttattgttttgtaacaatgtcagttgttaaaccttgacatttcaattaaaacatgaattgtagttataactcaatgcaaattcaacagttgtatttggagttaaattattttaacaaataaatttatttaatg

SEQ ID NO: 353576 - DNA, 1144 bp, Homo Sapiens
  misc_feature (13)..(13): n is a, c, g, or t
aaaaaaagtcctncttcccaaggcctgctactccaaggtttggctccatcccttgcctttgggtcctgcctatttccccactcctggtctcttatctttggggccaccagtggggagtcacccgggccccaatccctctaaggcgctaagttgaaggaggccttcccagagtgactattggtgccaaagtcccagttcctgttggacttggggtaaaaacaggagatggtgagtgggtgtaaggcccaaatgcccagagaagttaactcgaacccatgggacctgtcccagcctgtcagtccctgatgagtgtaacttccttcccctgggggacctgggcctttctctccaacccagtggccatgctttctcacccagccttgtgcccggcctgcatttctgtatatattgctgtgtattgtgtgtatgtatgtattcctgggacaagtgtgttcatctgcagcccttgcctgaggataaggtttaggattgggtaaagatcagaataccagggccagctaaggcaacgactccctccccaaacccttgggacctcagccagtcccaaggctgccctgacaatcaggcaggctccccaccgtgaggccaagcctcctctgccactgccagcatggcccaagggaggcttggccttgggcttgccagcctcagctctgccctgacaagggtcttgtatccagggcagaggcctgaggtgacccaggcttgctttgtggctgatgccagcaggcttggttctagtgggcaccactggtgggcaacctccataactggcccttaggccctaccttcctacacagctaggctataatgggcctgagtgagagggtagcttccccagccccaagcacaggcagaggggtggagagcaatttttggttttatttttgtttctgaagtggtgcctgtacctccagcccccagggggccttccctggccacacttctctgccccacccaggcatcgccatcccagcactttgctccatgtcacccgtaagatgccctttgctgaatgtacctgagtgtatgtatttaaaaggactcacatgggcatcagagaatttatggctctgtatccaataaaaaagatggtgaaactggtctatctgcccagagaggt

SEQ ID NO: 353577 - DNA, 518 bp, Homo Sapiens
  misc_feature (26)..(26): n is a, c, g, or t
  misc_feature (46)..(46): n is a, c, g, or t
  misc_feature (74)..(74): n is a, c, g, or t
  misc_feature (81)..(81): n is a, c, g, or t
ccaaacaaggcccaaaggaaacttgnccttgggcttgccaaacctnaactctgccctgaaaaaggtcttgtaancccaagncaaaagcctgaaggtgaaccccagcttgcctttggtggctgaatgccaagcaggcttggttcctaagtgggcacccactggtgggcaacctcccataaactgcccttaggcccctaccttccctacacagctaggctaataatgggcctgagtgagagggtagcttccccagccccaagcacaggcagaggggtggagagcaatttttggttttatttttgtttctgaagtggtgcctgtaccttcccaccccagggggccttccctggccacacttctctgccccacccagcatcgccatcccagcactttgctccatgtcacccgtaagatgccctttgctgaatgtacctgagtgtatgtatttaaaaggactcacatgggcatcagagaatttatggctctgtatccaataaaaaagatggtgaaactggtca

SEQ ID NO: 353578 - DNA, 526 bp, Homo Sapiens
ctttataaatgacccggtcaagttggtttcaaagtccgacaggcttgtctgtttactagctgcgtggccttggacgggtggctgacatctgtaaagaatcctcctgtgatgaaactgaggaatcgggtggccgggcaagctgggaagagcaaagccagagctgcgctgcctcaatacccacaaaagaccattcccagtatacataagcacaggatgtttttctcaagagggatgtatttatcacttggacatctgtttataatataaacagacatgtgactgggaacatcttgctgccaaaagaatcctaggcagtggctcattgtatgtgaggttgaaccacgtgaaattgccaatattaggctggcttttatctacaaagaaggagtttcatggggttcagcctaacagttatggaaactacagtccttataaaccattggcatggtaataaacagatcttaagtataaaaattttgtaattgggcctttactctctcaataataaagtattttgtttatataa

SEQ ID NO: 353579 - DNA, 1375 bp, Homo Sapiens
  misc_feature (9)..(11): n is a, c, g, or t
  misc_feature (13)..(13): n is a, c, g, or t
gggatttannngnggccagtaatccctggaatcagaaggcgttgaagtatcgcggggatcttcatgatgagcaggaacagggctcatcatggcaggactgtgatagagtcagaaactgactctgtgacctggcgcacccactgcaggtacggaaagttcccctgttccacaggcaatgcaattacctcggccacttcgtaagggtgcacagaactacaaaataggtgggtgggggaaggggatcactcaaagatttacccaaaagaacccactcccttacacgcaagccctagactgcccagcaagtcacacccacacagtacacaccctcaccccatccatctcaaagttctcaccgaacaaaatctgtcaaagctgggaccaaggaactttgggttttaatcatctaagggacaaagataaacatggttaaatcaaggagtgggattgagttcagtttctcagaagaggggtaagggctaaaggggtcagggattggggatattttgttgggtgggggaaatgtttctcaccatcagcacctcactgtcttcctcgatcttccctttccactcatagctgaaaggtcagagggggagagttgtggggagcaaagaatttcccccaggaaagaggttcccagtcagctcctacagttaggttaaccccccaactcctatgactcacatggatgtaatctgagggatgaggttgacgcaggctgctaggcgcttctccaccacggccctggcgatctccttggcgaccttctcgttggggcaagtaacaaaggctgcagagaccgagcccggaacgtagccagagccggaatccgaggccggcgagggctgggtcggagggcttccagaggccatggtcagcaagactcggggtagcaacaaaaggcgggaggccacaggcagcagcgccggcatccaaacaaaagacaggagcagagaggcctgagagcaggaggcgaattcgatctctcctcacaaacagcccaggaaattacacccggggaagccttcgcttagatcctcaggctctgccctccctctgatgcacccccgaagaatgcccctgaaggtgagagagaaacttggaaaataaagcaaaagctcatttcactcacacctcagggggccaacctctgggatttagggtgcgggtagcggtcgaggcttcgaggaccggaaggggcggggcggggccggtcactcaccactccgccgagcaggaccgcgggagcccgccccccactcatgcggcctacgctggtacaggagagttgatctcaaaggccacacgtcacacggagaaacaaccccaggaagagcggcctcttcttacctgggtggcagccacgtgatta

SEQ ID NO: 353580 - DNA, 509 bp, Homo Sapiens
gacccaaagacgggatttattgggggcccagtcatcacctggaagtcagaaggcgttgaagtatcgcggggatcttcatgatgagcaggaacagggctcatcatggcaggactgtgatagagtcagaaactgactctgtgacctggcgcacccactgcaggtacggaaagttcccctgttccacaggcaatgcaattacctcggccacttcgtaagggtgcacagaacatcagcacctcactgtcttcctcgatcttccctttccactcatagatggatgtaatctgagggatgaggttgacgcaggctgctaggcgcttctccaccacggccctggcgatctccttggcgaccttctcgttggggcaagtaacaaaggctgcagagaccgagcccggaacgtagccagagccggaatccgaggccggcgagggctgggtcggagggcttccagaggccatggtcagcaagactcggggtagcaacaaaaggcgggaggccacaggcag

SEQ ID NO: 353581 - DNA, 638 bp, Homo Sapiens
tctccttcatcaggaggtgggcaaaccgcgccatgatagggtcgggattggctggctctggaggcgcaggtggtccttcttctactgtcacatggtgcgcgctgttttctaatcacgtggctgccacccaggcctctctgctcctgtcttttgtttggatgccggcgctgctgcctgtggcctcccgccttttgttgctaccccgagtcttgctgaccatggcctctggaagccctccgacccagccctcgccggcctcggattccggctctggctacgttccgggctcggtctctgcagcctttgttacttgccccaacgagaaggtcgccaaggagatcgccagggccgtggtggagaagcgcctagcagcctgcgtcaacctcatccctcagattacatccatctatgagtggaaagggaagatcgaggaagacagtgaggtgctgatgatgattaaaacccaaagttccttggtcccagctttgacagattttgttcgttctgtgcacccttacgaagtggccgaggtaattgcattgcctgtggaacaggggaactttccgtacctgcaatgggagcgccaggtcacagagtcagtttctgactctatcacagtcctgccatgatgagccctg

SEQ ID NO: 353582 - DNA, 723 bp, Homo Sapiens
aacctaggctaggtacgaggctgggtgtggaattcggcacgaggccttccggtcctcgaagcctcgaccgctacccgcaccctaaatcccagaggttggccccctgaggtgcctctctgctcctgtcttttgtttggatgccggcgctgctgcctgtggcctcccgccttttgttgctaccccgagtcttgctgaccatggcctctggaagccctccgacccagccctcgccggcctcggattccggctctggctacgttccgggctcggtctctgcagcctttgttacttgccccaacgagaaggtcgccaaggagatcgccagggccgtggtggagaagcgcctagcagcctgcgtcaacctcatccctcagattacatccatctatgagtggaaagggaagatcgaggaagacagtgaggtgctgatgatgattaaaacccaaagttccttggtcccagctttgacagattttgttcgttctgtgcacccttacgaagtggccgaggtaattgcattgcctgtggaacaggggaactttccgtacctgcagtgggtgcgccaggtcacagagtcagtttctgactctatcacagtcctgccatgatgagccctgttcctgctcatcatgaagatccccgcgatacttcaacgccttctgacttccaggtgatgactgggcccccaataaatcccgtactttgggtcaacaaaaacaaacc

SEQ ID NO: 353583 - DNA, 1145 bp, Homo Sapiens
  misc_feature (29)..(29): n is a, c, g, or t
aagcaggctggtactggtctggggtgtanggatgccacccaggtaagaagaggccgctcttcctggggttgtttctccgtgtgacgtgtggcctttgagatcaactctcctgtaccagcgtaggccgcatgagtggggggcgggctcccgcggtcctgctcggcggagtggcctctctgctcctgtcttttgtttggatgccggcgctgctgcctgtggcctcccgccttttgttgctaccccgagtcttgctgaccatggcctctggaagccctccgacccagccctcgccggcctcggattccggctctggctacgttccgggctcggtctctgcagcctttgttacttgccccaacgagaaggtcgccaaggagatcgccagggccgtggtggagaagcgcctagcagcctgcgtcaacctcatccctcagattacatccatctatgagtggaaagggaagatcgaggaagacagtgaggtgctgatgatgattaaaacccaaagttccttggtcccagctttgacagattttgttcgttctgtgcacccttacgaagtggccgaggtaattgcattgcctgtggaacaggggaactttccgtacctgcagtgggtgcgccaggtcacagagtcagtttctgactctatcacagtcctgccatgatgagccctgttcctgctcatcatgaagatccccgcgatacttcaacgccttctgacttccaggtgatgactgggcccccaataaatcccgtctttgggtctctctgccagaaaaacagaaaacaacaaagaatagaaaaccaatctacacaaagacagaaacaagaaaagacaagatagagaacagaagacaacgcaacaaagaacaagagtcacagagcaagaatcactatgatacacagacaataacactacgacagaaaacggaaggaagaagtgaacgcgacgccacgcgcaaccagactgacgatcgcccgcgcagtggcgagctaacaacatcctgtcacacggcaagcaggcaccaacctatccgaactaaaccaacgcaacggcgacaaacgtaccacacgtaggacgtgggccctcatacacaaaaaagcaggagcacagcggccgcagacgcacgcagacacgcgct

SEQ ID NO: 353584 - DNA, 702 bp, Homo Sapiens
tgtgaccctgggcgcaccccactgcaaggtacggaaaagttccccttgttcccacaggccaatgccaatttacctcgggccacttcgtaaggggtgcacagaacgaacaaaatctgtcaaagctgggaccaaggaactttgggttttaatcatcatcagcacctcactgtcttcctcgatcttccctttccactcatagatggatgtaatctgagggatgaggttgacgcaggctgctaggcgcttctcaaccacggccctggcgatctccttggcgaccttctcgttggggcaagtaacaaaggctgcagagaccgagcccggaacgtagccagagccggaatccgaggccggcgagggctgggtcggagggcttccagaggccatggtcagcaagactcggggtagcaacaaaaggcgggaggccacaggcagcagcgccggcatccaaacaaaagacaggagcagagaggcctgagagcaggaggcgaattcgatctctcctcacaaacagcccaggaaattacacccggggaagccttcgcttagatcctcagctctgccctccctctgatgcacccccgaagaatgcccctgaaggtgagagagaaacttggaaaataaagcaaaagctcatttcactcacacctcagggggccaacctctgggatttagggtgcgggtagcggtcgaggcttcccc

SEQ ID NO: 353585 - DNA, 386 bp, Homo Sapiens
ccctgcccccgttctgggcacgtgggggacaaaagttggccgggacgtgagctgtgaggcttgttgatgacgggtgctgacaccatcatcgggggtgggcacacggcccttcggagcctgggcagcctggcctcacaggcagactcgcagacggggcagtgagcgtctgggacagtgccaagagtggggtgtgtgatttttgcaggcgtctgtgatgggtctctttagggacaaatgtcaacaagggacaagacagggcaccttccgccagcgcccccccatgcgctgcgttcctcctccagatcgacccctagatgcctacacaatatctttaaagtaacacagaagtttttattttattaaaaagtatagcctacttaaacgcg

SEQ ID NO: 353586 - DNA, 1213 bp, Homo Sapiens
gctccccagaatatgctggtgtttctgtggagtatcccccatgttcacccagagtccggagggatgtgtacccagctgggggtcccactttcgggaagtgcctgagggctgcagggcttcgtttcgcagagctcccgtgatcaggcgtgatggtggcccagcaggatgcctggggtcagcgtcggggaagtgaatggtgggggccaggggcacagagagtctattgcgtgtgtgcctgtgtgtgtgcactacccttctcctgtgagctggggttcccatccgattttcaattcttctgtccatagacctgaagcaaaggatggggggccccacagccttaccatggtgacgctcatgaagcagttgggcacagggtgggaggaagacactggagagttcagggaccttccggatcatgtgcactgcagtcagaatagccttcttgcgcacgtagggactgggctgcaggagcagtttctccacctctggggccaggtctcggcacatctcagcagagcccatggtgctcaaagtgcacaaggccaggccttgtactggctgaatcccctggctcaggtcattcttgatgctgttggtaatgagcaggtgggcatcgtgcctctcatccaatagaagcatggcccccaggtagcccaccctcttgtctgtgaatctggaggaggcgatcagtttcaggcactccatctgtccaaagtgggcggggtagcccaacatgtggacgtagagcagtttggccagctgccggtgcctgtgcactgggtccccgtcgcggaaggaggcccggatgtgggcacactccttttggatcacctcccgctcctgggcctgagtcttggccccgcgaatctcttcgatgaggtcctgaagcttcagcgaaggcaccaccatcctgactggcttctgcctcaactccgctcactctgccccccagcgcttcctggtacggggccgagcaggggttggtgctccgtgcggtccttccctctccccgagtccccacgggaccccgccctcctgggccgactgcagagccttcctgaatcctctgacctcgggcctcaggctttagcggagagacagcatgataggcctggagttcttcaagaggcctcctcgcacatccttaccacccggagagcctcagtttggatttgaagccatcgcaccccaaaggagatgacaatcccccccc

SEQ ID NO: 353587 - DNA, 2461 bp, Homo Sapiens
ggggcagaggagcggagttgaggcagaagccagtcaggatggtggtgccttcgctgaagcttcaggacctcatcgaagagattcgcggggccaagactcaggcccaggagcgggaggtgatccaaaaggagtgtgcccacatccgggcctccttccgcgacggggacccagtgcacaggcaccggcagctggccaaactgctctacgtccacatgttgggctaccccgcccactttggacagtgacctgagccaggggattcagccagtacaaggcctggccttgtgcactttgagcaccatgggctctgctgagatgtgccgagacctggccccagaggtggagaaactgctcctgcagcccagtccctacgtgcgcaagaaggctattctgactgcagtgcacatgatccggaaggtccctgaactctccagtgtcttcctcccaccctgtgcccaactgcttcatgagcgtcaccatggcatcctgctgggcaccatcacgctgatcacggagctctgcgaacgaagccctgcagccctcaggcacttccgaaaggtggtaccccagctggtacacatcctccggactctggtgacaatgggatactccacagaacacagcatatctggagtcagcgaacccttcctgcaggtccagatacttcgtctgcttcggatcctgggccggaaccacgaggagagcagtgagaccatgaatgacttgctggcccaggtggccactaacacggacaccagccgaaatgccggaaatgcggtcctgtttgagacagtactcaccatcatggatatccgctctgcagctggcctacgggttctagctgtcaacattcttggtcgcttcctactcaacagtgacaggaacattaggtatgtagccctgacatcactgcttcgactggtgcagtctgatcacagtgctgtgcagcggcatcggcccactgtggtggaatgtctacgggaaactgatgcctccctcagccggagagccctggaactaagcctggctctggtaaatagctccaatgtgcgagccatgatgcaagagctgcaggcctttctggagtcctgccctcctgacctacgggctgactgtgcctcaggcatcctgctggctgcagagaggtttgctccaaccaaacgctggcacatagacaccatcctgcatgtgctgacaacggcgggcacccatgtgcgggatgatgcagtggccaacctgacccagctgattgggggggcccaggagctacatgcctactctgtgcgccgcctctacaatgccctggcagaagacatttcccagcaaccactggtgcaggtggcaccctggtgcattggggagtatggcggacctcctgctggcagggaactgcgaggagattgagccccttcaggtggacgaagaggaagtgctggcatagctggaaaaggtgcggcagtcccacatgtcccggccagccactcgaggatatgccctcacagccctcatgaagctcagcactcgcctctgtggggacaacaaccgcatccgccaggtggtgtccatctacgggagctgcttggacgtggagctgcagcagcgggctgtggagtatgacacactcttccggaaatacgaccacatgagggctgccatcctggaaaaaatgcctcttgtggagcgagatggccctcaggctgatgaggaagcaaaggaaagcaaagaagcagcccagctttcagaagcagccccagtgcccacagagccccaggccctcacagctcctggatctgctagatctcctggatggggcttctggggatgtccagcatcctccccatctggacccctccccaggaggtgccctggtacacctgcttgaccttccctgtgtacctccacccccagctcccatcccagatctcaaagtgtttgagcgtgagggagtacagctgaatctgtctttcattcgaccccctgaaaaccctgctttgctgttaatcaccatcactgccaccaacttctcagagggtgatgtcacccatttcatctgccaggctgctgtgcccaagagtctccagctgcagctgcaggcccccagtgggaacacagttccagctcggggtggccttcctatcacccagctcttcagaatcctcaatcctaacaaggcccccctgcggctaaagctgcgcctcacctacgaccactttcaccagtcggtgcaggagatctttgaggtgaacaacttgcctgtggaatcgtggcagtaactgtctccactcacagcctgaaattctcctgtgtcccaaaccccagggggccccagcagcttcgaacctacacctgagggctaccagcaggtggcgctctggctttgcactgcaaaaactggggaccagcccccttctcccacaaataaagcccaataaagcctgagaagtgaggaaagccatattaa

SEQ ID NO: 353588 - DNA, 361 bp, Homo Sapiens
tggatatccgctctgcagctggcctacgggttctagctgtcaacattcttggtcgcttcctactcaacagtgacaggaacattaggtatgtagccctgacatcactgcttcgactggtgcagtctgatcacagtgctgtgcagcggcatcggcccactgtggtggaatgtctacgggaaactgatgcctccctcagccggtgagcagtgatagaggggacaggagggcagggcagaggttcccagtgccctgtggccaagactcgagccagtttagagcagctggagtaaggggactaagggggacaggtccctgggggaagcagagggcctgaggcatggaccaggatgacctgggctac

SEQ ID NO: 353589 - DNA, 712 bp, Homo Sapiens
cggatttcctgcgcacctgcagctcccagtggccaagtgtttccgatcattccagggggctcgtgataacggctaaggaaggaggagcaagtattgattcgtcagcctcgagtagccttcgatgcctttcttccatcgtggacagtatttcctcggaggaacgcaaactcccctgcgtggaggaagtggtggagaagtaactgagcctgcgcttgagaccttctccacgcagcaggaagatcccaccgacccttcctggcctaatcctttagattaggtcacattacattaacatttaggaacccagaccgaaaagttgctgaaagggaaggagacacattcacaaagaaacgttgcgaaaattgcgaaatctgttgtgcacgctcaaatgaaaacgcctttcggctttgggcttttatttttttggaactgcgagtggcttaggtctagcctcattttgtttttgtttggttggttttatactatattaacttttattacggtgatccttttgtgccatgttcaaaagaagttcattcctgtctgaagtgggaaagttgcatttaatgttaggggtatttaatgtatttttgtaaatagtttagcactttctttttttacgtaaacctgaaatatattttaaatgtggaatgatgtatataaaatgtgcgaggatcctggtattgtaatattaaaaagaagtttctatatg

SEQ ID NO: 353590 - DNA, 937 bp, Homo Sapiens
  misc_feature (79)..(79): n is a, c, g, or t
  misc_feature (91)..(91): n is a, c, g, or t
  misc_feature (123)..(123): n is a, c, g, or t
  misc_feature (164)..(164): n is a, c, g, or t
  misc_feature (169)..(169): n is a, c, g, or t
  misc_feature (193)..(193): n is a, c, g, or t
  misc_feature (264)..(286): n is a, c, g, or t
  misc_feature (360)..(360): n is a, c, g, or t
  misc_feature (364)..(393): n is a, c, g, or t
  misc_feature (762)..(834): n is a, c, g, or t
  misc_feature (836)..(845): n is a, c, g, or t
gcatctatctcatctatctcaatcctattttctcctccttcccttttccctgcttccaggaactcacatctgcccttanaccaagagggcnttcctctagaagcaaggggaaaagggtgcttntatagaggctagcttctgcttttctgccctggctgctgccnccacnccggggaccctgtgacatggtgcntgagaggcaggcatagaggcttctccgccagcctcctctggacggcaggctcactgccaggccagcctccnnnnnnnnnnnnnnnnnnnnnnngacagcttgagccgggcccctgggcttggcctgctgtgattccactacacctggctgaggttcctctgcctgcnccgnnnnnnnnnnnnnnnnnnnnnnnnnnnnnnggggtgagtccattctcccaggtaccagctgcgcttgcttttctgtattttatttagacaagagatgggaatgaggtgggaggtggaagaagggagaagaaaggtgagtttgagctgccttccctagctttagaccctgggtgggctctgtgcagtcactggaggttgaagccaagtggggtgctgggaggagggagagggaggtcactggaaaggggagagcctgctggcacccaccgtggaggaggaaggcaagagggggtggaggggtgtggcagtggttttggcaaacgctaaagagcccttgcctccccatttcccatctgcaccccttctctcctccccaaatcaatacactagttgtttctnnnnnnnnnnnnnnnnnnnnnnnnnnnnnnnnnnnnnnnnnnnnnnnnnnnnnnnnnnnnnnnnnnnnnnnnngnnnnnnnnnncagaaaaagaatattccccgggggagggccaacacaggagcgccaccacgaattgtgcgaaaaggaggaggcgccaccaatagagagaggag

SEQ ID NO: 353591 - DNA, 1334 bp, Homo Sapiens
caagaattccagtgcccaatttagtggatagctgggcgtcactgttgatacttctgaaagactctatacaactgagtcttccagctccaggcagtttcttatacttggggttctgaatgagtttattatgaaaaaccctagtttggaaaataaaaaagaccaaagagaccttcaggatgtaactcacaaaatagtggatgcaattggtgcaattgctggttcttctctggaacagacaacatggctgcgacgaaatcttgaagttaagccttctcccaaaataatggtagatggaaccaatttggaatctgatgttgaagatatgttatcacctgcaatggaaaccgcaaacataactccttctgtatatagtgtccatgcattgacattactctctgaggttttggctcatcttttggatatggttttctatagtgatgaaaaggagcgggttattcctttacttgtaaatattatgcattatgttgtgccctacctcagaaatcacagtgcacataatgcccctagttatcgagcttgtgtccagctgctcagcagtcttagtgggtatcagtacacacggagagcttggaaaaaagaagcttttgacctctttatggatcccagtttctttcagatggatgcctcttgtgttaatcattggagagcaattatggacaatctgatgacacatgataaaaacaacatctagagatttgatgactcgtgtagcagtggctcaaagcagttcacttaatctctttgcaaaccgtgatgtggagctagaacagagagctatgcttcttaaaagattagcatttgctatttttagcagtgaaattgaccagtaccagaaatatcttccagatatacaagagagattggttgagagtctccgtttgccacaggtgccaactctccattctcaagtgttcctgtttttcagagtgttacttttaagaatgtctccccaacatcttacctcactctggcctaccatgattacagaacttgtacaagtatttttactgatggagcaggaactcactgctgatgaagatatttcacggacttcagggccctctgtggctggtctggagacaacgtacacaggaggtaatggcttctctacttcatataacagccagcggtggttaaacctctatctctctgcttgcaaatttttgggatttgggctctcgcattggccctctggaaaaccttcctcagttttcaggatgtaccgatggggccttttatttccagaagcctcaggtggattcagggtttggaagttcaggaagggcaggggtattacatcaacgaggattttt

SEQ ID NO: 353592 - DNA, 1245 bp, Homo Sapiens
  misc_feature (881)..(890): n is a, c, g, or t
  misc_feature (1233)..(1233): n is a, c, g, or t
ctgtggctggtctggagacaacgtacacaggaggtaatggcttctctacttcatataacagccagcggtggttaaacctctatctctctgcttgccaatttttggatttggctctcgcattgccctctgaaaaccttcctcagtttcagatgtaccgatgggcctttattccagaagcctcagatgattcaggtttggaagtcagaaggcagggtatacatcaacgagaatttaaaccttacgtggtacgactagcaaaacttcttcggaaaagagcaaagaaaaatccagaggaagacaactcagggagaacattgggttgggagccagggcacttgctgctcaccatctgcaccgtgcgcagtatggagcagctcctgccgttcttcaatgtgctcagtcaagtcttcaacagcaaagtcacaagccgatgtggaggacactcagggagtcctatcctctactcaaatgccttccctaataaggacatgaaactggagaaccacaaaccatgttccagcaaagccaggcaaaaaatagaagagatggtagaaaaagattttctggaagggatgataaaaacttgagcaccattgctggttccatttagcttacatgtaaatgtaattatttaaaacacacacactgctctgcgttgtatagtttttccttttttgtatgtaacagaacacatttcagattgtatttaatttaaatatttgtatataagagcaaatgtctgaatgtggcctgaatcaagtttaaatattgttggctcatactgattatggtgcctaagagagctatatatatacacatgtaaagtccattgtttttattgtcctgagttgtcttaaacctgcaaaatatacactacccannnnnnnnnnccattggtttcagacttggttcaattaagattggttggggatttttctcttttccttattaaccatgttctggtatcagaatggtgttccttctccatcagaggctgggaaacgtattataattagtttttctcccacataccttcaccaagagcagtgaagaataactgaaggctggaccatgcatccttaaaagtattgcatgagcatctccacctcagtatgggaagagggatggacaaccccctattcatacctctggagttcctgatgggcattagtcatatagtaacaattccaaagcccttaaataaacggaaaacagaccaattcttctaaatanggactatcccgt

SEQ ID NO: 353593 - DNA, 404 bp, Homo Sapiens
  misc_feature (248)..(248): n is a, c, g, or t
tgaaattgaccagtaccagaaatatcttccagatatacaagagagattggttgagagtctccgtttgccacaggtgccaactctccattctcaagtgttcctgtttttcagagtgttacttttaagaatgtctccccaacatcttacctcactctggcctaccatgattacagaacttgtacaagtatttttactgatggagcaggaactcactgctgatgaaggatatttcacgggacttcagggcncctctgtgggctgggtctgggagacaacgtacacagggagggtaatgggcttcttctactttcatattaacagccagcggtggggttaaacccctattctctctggcttggcaaatttttgggatttgggctcttcggcatttgccctctggaaaa

SEQ ID NO: 353594 - DNA, 591 bp, Homo Sapiens
  misc_feature (18)..(18): n is a, c, g, or t
aacaaaaacaacaacaanaaaaaaatcacaccattgctcacagaattggcatctcatttttgggacctcccatctttctgttttgaaaagtgtacagtagtgcagtgttcctgatgtaactttatggcttacaatgttgacatgtctcaggttcatgtgttgcgattggtgttttccgtctcaggtagattgcaaagtgtaggccccacacattggaaaaaataataataaaacaaagcaaaaacaggaaattatggattttagttgtatattggtttatgtattttttcttaagtatacagtgcactgtttgaaatgtattgttgagtattactttgtacaggttgatcactttttttagagtgaagaaagaacaaacttgttttttgtgttttttaaaggaatataaaataatgaaggatgtataattgatgccaaataagcttgttctttagtcacaccgacgtcttatttttccctttaggccagttctgtttttaaggtgtacatggacaatgttacagtgtaagaaactccatatccatatgttcccattcgcattttgtattggttcatgtataccatttttac

SEQ ID NO: 353595 - DNA, 1121 bp, Homo Sapiens
  misc_feature (82)..(139): n is a, c, g, or t
ttttacttttagtactctcccacgctctgtgggtgatttaacaacggaaaggtcaaagcccagccaggcctacatttatgannnnnnnnnnnnnnnnnnnnnnnnnnnnnnnnnnnnnnnnnnnnnnnnnnnnnnnnnnattcttaaaacttaagcatggtaaaatgttaagctgttttcatccactgatattattctactataaaaagcccttcttgagcagatttgatgataaaaaggagaacatttctaaggtataattagagaagctgttgcatgagaaatcatgtctccatctccattttgctatgcgttatctgaggattgtttctgaaagagatctatttaggcagtgtatgtatgtgtcagcatgtaaaaagtaaagaactgaaaatagacaaaccttgtaaatgcacttcaaaaccaattgtggctcaagtgtaggtggttccccaaggctggtaccaatgagactggggtttgggaattagttggtcatcattcctcctgctgcccagcagtggtcagtcatttttcatgagggatggactaggaaaatgaagtgtctattataaggagagttcctgtaacttaaggagcaagctcactacaaaacccagctacctgcttatcgtagtggccagagtggtagaagagatacggagtaggaattaaaccacacaatgttatttagggactaagccatgcccctaacaagaaaacaagccaaaaggaaagtattaggcattctctgggaaggcatgcatttttttcccatgtctctggggccaaaaaccttataccaagtacctattggcacccgaatatatttgtagaatgaatgaatacatgacaaacaaaataaacagataaccgtttctccctatattctactttccaagccaattaataagcaagtgtcttttcgtcatgatttttttggtatactgtataggatttaacaaaatggttgagataacagtcacttctgtttgatgaagagtatcacttcattccattttggtgtttttgttgcatctccaagtcagaataaatgccttttggagcagatatatttcatttagcatttagtatcatcttcatcaatactcgtatgaacg

SEQ ID NO: 353596 - DNA, 1531 bp, Homo Sapiens
  misc_feature (37)..(37): n is a, c, g, or t
  misc_feature (46)..(46): n is a, c, g, or t
tgatgcccccacctaatccccgaacccccgacctcanggtacccgnccctggggaacccaccctaaactggggcccacaatggttttggaagtgccatttaacaaggtttgtcctattttccagttcctttaccttttaacatgcctgacacataccatacactgccctaaatagatcctccttccagaaacaatccctcagataacgcatagcaaaatggagatggagacatgatttcctcatgcaacagcttctctaattataccttagaaatgttctcctttttatcatcaaatctgctcaagaagggctttttatagtagaataatatcagtggatgaaaacagcttaacattttaccatgcttaagttttaagaataaaataaaaattggaaataattggccaaaattgaaaggaaaaatttttttaaaatttctctaaatgtaggcctggctgggctttgaccttttccgtttttaaatcactcacagagggtgggacaggaggaagagtgaaggaaaaggtcaaacctgttttaagggcaacctgcctttgttctgaattggtcttaagaacattaccagctccaggtttaaattgttcagtttcatgcagttccaatagctgatcattgtagaaatgaggacaaaatcccttgtcctcactagtttgcttaacatttttgagaaagaattatttttgtccaagggcttatcaactaaaccttgtgttaggtaagaatggaatttattaagtgaatcagtgtgaacctgcatgtcataagattatcttaaagctgaagccaaaatatgctgcaaaagaagaggactctattgttcattgcagctcatacattcaaagcatctgaactgtagtttctatagcaagccaattacatccataagtggagaaggaaatagataaatgcccaaagtatgattggcggagggagcaagcttgaagataatctggggttgaaattttctagttttcattctgtacatttttagttagacatcagatttgaaatattaatgtttacctttcaatgtgtggtatcagctggactcagtaacacccctttcttcagctggggatggggaatggattattggaaaatggaaagaagaaagtaactaaaagccttcctttcacagtttctggcatcactaccactactgattaaacaagaataagagaacattttatcatcatctgctttattcacataaatgaagttgtgatgaataaatctgcttttatgcagacacaaggaattaagtggcttcgtcattgtccttctacctcaaagataatttattccaaaagctaagataaatggaagactcttgaacttgtgaactgatgtgaaatgcagaatctcttttgagtctttgctgtttggaagattgaaaaatattgttcagcatgggtgaccaccagaaagtaatcttaagccatctagatgtcacaattgaaacaaactggggagttggttgctattgtaaaataaaatatactgttttga

SEQ ID NO: 353597 - DNA, 811 bp, Homo Sapiens
  misc_feature (10)..(10): n is a, c, g, or t
  misc_feature (17)..(17): n is a, c, g, or t
  misc_feature (88)..(88): n is a, c, g, or t
  misc_feature (695)..(705): n is a, c, g, or t
gtattaaganatatttnattaacaaaacagtaaattccacttgcttagcatttccaataatggataaattggccttgcaacagaaaancaaacaaacaaaaaaagaagaagaaacccctttgatacccaatcacacaaagcactagaagggtagggttatgtggcctttctttgatgtcttagggattgaccacttcacacgttattgtagtatttgttcttttaaaaaaggcaacacattacatggataaaaaagaagcataatcaatcagaaaagttacagtctagagatgtaatcaaatttatgccaagtcgtgtgaaatcctcaatcaactgcaaactatgcagggaaccctgatatgtttggtatgaagatacttgggattcaagtcattttctctttctaactctgttcctctcttttctttttccattgaggaaaaaataatttttgctagagtttgtgtaagccaataatattagaaataattttgctgataataaactatatcaatcattgcatgtaactttaaaatttacgctggggagaaacattgaaatcaatcccaagcaacacatttcatagatatactgcttaaaattaccattattcaatttattttctattatattttagaatctttccagatggaaactggttcaagcttaatagataaaatagaaaagcaatcttnnnnnnnnnnncccttcaagctgtaaattagtagttttacacttcccttcttatttaactggctttccctgagtaagactgaatgagacgggggaaaagaaaagactcgtgactagt

SEQ ID NO: 353598 - DNA, 1196 bp, Homo Sapiens
  misc_feature (3)..(3): n is a, c, g, or t
  misc_feature (20)..(20): n is a, c, g, or t
  misc_feature (27)..(27): n is a, c, g, or t
  misc_feature (31)..(31): n is a, c, g, or t
  misc_feature (44)..(44): n is a, c, g, or t
  misc_feature (48)..(48): n is a, c, g, or t
  misc_feature (51)..(51): n is a, c, g, or t
  misc_feature (56)..(56): n is a, c, g, or t
  misc_feature (71)..(72): n is a, c, g, or t
  misc_feature (76)..(76): n is a, c, g, or t
  misc_feature (83)..(84): n is a, c, g, or t
  misc_feature (87)..(87): n is a, c, g, or t
  misc_feature (91)..(91): n is a, c, g, or t
  misc_feature (98)..(99): n is a, c, g, or t
  misc_feature (101)..(101): n is a, c, g, or t
  misc_feature (106)..(107): n is a, c, g, or t
  misc_feature (113)..(113): n is a, c, g, or t
  misc_feature (121)..(121): n is a, c, g, or t
  misc_feature (123)..(123): n is a, c, g, or t
  misc_feature (127)..(127): n is a, c, g, or t
  misc_feature (146)..(146): n is a, c, g, or t
  misc_feature (148)..(148): n is a, c, g, or t
  misc_feature (156)..(156): n is a, c, g, or t
  misc_feature (166)..(178): n is a, c, g, or t
  misc_feature (232)..(233): n is a, c, g, or t
  misc_feature (296)..(296): n is a, c, g, or t
  misc_feature (833)..(856): n is a, c, g, or t
ggnccccggggaccgggccncccttgncacnttttccctaaganaaanttntcctngatccttgggttcanntttnaatcggnnttnctcnttttatnnanctganntgaccncacccatngncctnacggaaatgagcagctgtntnccccacgnaaacaccatnnnnnnnnnnnnnaaatgctgtgaatgcggaggaagtgatgtttggttctgtagctgagagattttnntcatttttaactgccccccaaccccactccaactccttctccaccacccattctccccaatgntctttagaaatagattttcatctgatattctgcagaaatatcaatgagacttggtatgggacaggggcagaaaacactacataggcctccaaggcaaaaaccagtcccagtttctttaatgggaagaagctggaattcctggtgctcaattcttagtgaccccaatcctatacccaaatctatgatattctgggacctcagtgattttggtcccctcccacttctctagttcgtcatcctcccttcccatatccttcaaaagaaccacactagggtctccacctacttatacaatgcggatgcccaactgtttttaaggaagccagaagcatcccatggaccatggggtgagtgtcctccaagagccccctgagctcagccctctgcctggagggctccagacctttctgagccctgcttggaggcgagcattttcactgctaggacaagctcagctgttgaggacacccccaccccaaatttcagttcttacgtgattttaaccattcaacatgctattgggttttaattctctannnnnnnnnnnnnnnnnnnnnnnnttttaggaccagttgtagtgaattgctactgaaagctatcccaggtgatacagagctctttgtaaaccgcagtcacacattagggttagtattaaactttgtttagatgtaccataattaacttggctagttgattgtttgaagtctatggaagaaatagttttatgcaaaattttaaaaaatgccagtctggtcagggaagtagggggtttcaatgctgttgggaaccaggaaggtggcacagccggcaggtagggacattgtgtacctcagttgtgtcacatagtgagcaagcccaggttgaccttgtgatgtgaattgatctgatcagactgtatta

SEQ ID NO: 353599 - DNA, 869 bp, Homo Sapiens
gtgtacacacgtatgcatatgtgcctgtgtggtggggtctggccaagtttctaaagtccctcttggttctctcttttccaggcctgatcacttgaacggacatatcaagcaggtgcacacttctgagcggcctcacaagtgtcaggtgtgggttgggagcagcagcggcctgccgcccctggaacctcttcctagcgacctgccatcatgggactttgcccagcctgctttgtggaggtcgtcccattcggttcctgacaccgccttttccctttctctaaaaaaatcattcccagcccttgaaaacctgggcccagcacactccagcaacactctcttctgcccagccccgccgggatatctgaggcagggctggaccaccccagagggcagcagggcctttacccagtggcctgttggctagcctgggcctccctggagagggttgacagtggaagggaacaggaggggcatttggcctgagacccctgcttttgggagaggctagcagggtggttcctgcccagcatgcccagctcctccctgggtgactcggagtctttcccatgtcagagcccccaaatggggggtagcaaggagcacctttctggaaccccctatagcatccaagtttctttctgggctctcttgccttttccccccctttacagatgggaccccctggggcatctggtccttgcctaaggggattttggaaggttggtgcccttcctgggaaataagcccccagcttattctggccttcccttcccctggcaattactttcccaataggcctgggggttcctagaactggggccctgggcccaccctttttccccccttcccgaaatggaatccggcctccc

SEQ ID NO: 353600 - DNA, 1829 bp, Homo Sapiens
  misc_feature (55)..(55): n is a, c, g, or t
ggcttctccaggcctgatcacttgaacggacatatcaagcaggtgcacacttctnagcggcctcacaagtgtcagacctgcaatgcttcttttgccacccgagaccgtctgcgctcccacctggcctgtcatgaagacaaggtgccctgccaggtgtgtgggaagtacttgcgggcagcatacatggcagaccacctgaagaagcacagcgaggggcccagcaacttctgcagtatctgtaaccgaggtctccaggcaccaggagcccatcctgaatgggggagcagcgttccactgcgccaggacctatggcaacaaagaaggccagaaatgctcacatcaggatccgattgagagctctgactcctatggtgacctctcagatgccagcgacctgaagacgccagagaagcagagtgccaatggctctttctcctgcgacatggcagtccccaaaaacaaaatggagtctgatggggagaagaagtacccatgccctgaatgtgggagcttcttccgctctaagtcctacttgaacaaacacatccagaaggtgcatgtccgggctctcgggggccccctgggggacctgggccctgcccttggctcacctttctctcctcagcagaacatgtctctcctcgagtcctttgggtttcagattgttcagtcggcatttgcgtcatctttagtagatcctgaggttgaccagcagcccatggggcctgaagggaaatgaggcagctgctgtgtccccacggaaacaaccatctggggactgctgggaaatgctgtgaatgcggagggaagtgatgtttgggttctgtagctgagagatttttattcatttttaactgccccccaaccccactccaactccttctccaccacccattctcccaatggtctttagaaatagattttcatctgatattctgcagaaatatcaatgagacttggtatgggacaggggcagaaaacactacataggcctccaaggcaaaaccagtcccagtttctttaatgggaagaagctggaattcctggtgctcaattcttagtgaccccaatcctatacccaaatctatgatattctgggacctcagtgattttggtcccctcccacttctctagttcgtcatcctcccttcccatatccttcaaaagaaccacactagggtctccacctacttatacaatgcggatgcccaactgtttttaaggaagccagaagcatcccatggaccatggggtgagtgtcctccaagagccccctgagctcagccctctggctggagggctccagaactttctgagccctgcttggaggcgagcattttcactgctaggacaagctcagctgttgaggacacccccaccccaaatttcagttcttacgtgattttaaccattcaacatgctgttggggttttaattctctaattattattattattgtcattatttcttcaggaccagttgtagtgaattgctactgaaagctatcccaggtgatacagagctctttgtaaaccgcagtcacacattagggttagtattaaactttgtttagatgtaccataattaacttggctagttgattgtttgaagtctatggaagaaatagttttatgcaaaattttaaaaaatgccagtctggtcagggaagtagggggtttcaatgctgttgggaaccaggaaggtgggacagccggcaggtagggacattgtgtacctcagttgtgtcacatgtgagcaagcccaggttgaccttgtgatgtgaattgatctgatcagactgtattaaaaatgttagtacattactctaa

SEQ ID NO: 353601 - DNA, 542 bp, Homo Sapiens
cagtagggggggccgggctcgaagttcctttgggaggggctggcgggactccagcaggccgtcctcacctttcttagaaagtccacccagggcaagttgatgttgggggaaagcagaagtcaagccagccgcgggccccacacgccccgacccgctcaaccgacttgtcccttaaatgtgtcttggatcccgcagtgatgacgtgagccagccaggcccgaaagggtgaggccagtgcagagaagcttcccaggggattcctgggttcccccgaaagacaagcgaggtcattgcagttcacctgatgttgctcctgtcccgtgcgtcccggggaggctgtccttggtccgaggctgctcgttgcagcccctcccctgctggcggttacgatgcgtggggtccccctccccacccagccccggccacgtcgccgtgtcccgcctgtgcctgtgacgtccctgtggacctgtgagccatccccccccttatctctgctctgaatactgcatgaagcattaaacgtgcaatgaagtacaaaaaaa

SEQ ID NO: 353602 - DNA, 658 bp, Homo Sapiens
  misc_feature (20)..(20): n is a, c, g, or t
  misc_feature (32)..(32): n is a, c, g, or t
tgccctttttgccctttttnttaaaccaaaangaataacctttttgcccccccttagattaccatagcaagccattgtagtcctggtagaacccagtatttttgttgtttatttataaggtaattgtgtgtggggaaaagtgcagtatttacctgttgaattcagcatcttgagagcacaagggaaaaaataagaacctacgaatatttttgaggcagataatgatctagtttgactttctagttagtggtgttttgaagagggtattttattgttttttaaaaaaaggttcttaaacattatttgaaatagttaatataaatacataattgcatttgctctgtttattgtaatgtattctaaattaatgcagaaccatatggaaaatttcattaaaatctatccccaaatgtgctttctgtatccttccttctacctattattctgatttttaaaaatgcagttaatgtaccatttatttgcttgatgaagggagctctattttctttaccagaaatgttgctaagtaattcccaatagaaagctgcttattttcattaatgaaaaataaccatggtttgtatactagaagtcttcttcagaaactggtgagcctttctgttcaattgcatttgtaaataaacttgctgatgcattt

SEQ ID NO: 353603 - DNA, 572 bp, Homo Sapiens
tttagatgccttaatagtatatacgtgaaatactcagctgtccctttaaaaataattccttggactgcctggtggttaaaatacgattcctcatatccaaggctacttttgaagatccctctgccaaaaatatagctcacttatctaaaggtgagagctgcatagatccagtaatgtacataaagcctgaatgatgagcctatgtccctgcctaacgctggtgtctcactcatctcttttacctaaattgtcctgaactttgttaagtgttctggacaaggccaagcttttctttattaaaacctcagcatgtctccctgatctgaactatttgctttctcttcaagataagttgtattttaccatggaaaaatacagtatctaacattaccattcacgttaaatgaagtttcctcataacatttatctttagttttatgaagtcatcgtgaccaatgttacagtaatttctgttagctgattgtggtaaacaatgtttaatgtgaaaagaaattaaaactttcttcatctgttgtagaatatttctcttctttaaaatggcttctattcat

SEQ ID NO: 353604 - DNA, 477 bp, Homo Sapiens
  misc_feature (160)..(176): n is a, c, g, or t
gttcacttctccgcctcgagactctgccccctcagcctggcccgcccttcctaagttatcggcctgcgagccggagagacaatggagagaactgcagaggccgagtggcgaccaggccccaagcggaaggccattttccctgcccttcctcagttgtccnnnnnnnnnnnnnnnnntgctgcgaggaatggagaaaccaggccctttagaggatcccagagagggaagagaaccaggggcccttttctcttttagaattttcttttaatcagcccaccttttgactccccgcccgccccaatccattatttttttctgccttccgggtcccatccttagagctcgagtcgttccttcccctcctggattccgggtagcagaggcagcgccgcaggaggcgggtgcccgtttgtcccaggcctgggcgtggtggaggaaggggtgctggaacaataaacggcactatccaaatgtcaa

SEQ ID NO: 353605 - DNA, 1107 bp, Homo Sapiens
  misc_feature (306)..(325): n is a, c, g, or t
ggtagtgcctcttaaaccttaacagtactttagacattggcactttatttttctcgtagatctttagctactttggggaggagggaaggtgctgataccttcaatttgttacttttcaagatttttaaaaataactagtgtagcttatcttaaacattttataaaaccttcagatgtctttaagcagattggaagtatgcaagtgcttccttagcagggacagtggataatccttaatggtttatcatagatttcaccctccccccttctcagaagagtgagtatgctcttaaatgtcaaacacannnnnnnnnnnnnnnnnnnnaaatgatcagtgtctatttgatgtgatgcagatcttataaatttgggaattataatattgacatttctgtgatttttatatatgtaatgtcttaattgagatttctgttaaggcagaaataattaggctagggctcttagttttcattcctattgcccaagtattgtcaaactatggtattattttaatgttactttaaaaatccataatctgctagttttgcatgtacttatatgaaaacagtgcagtaagttgaaaactcagtatctatggaattgataaatgttgatctggtgtagtatattttatcgcattttcttatattaaaaaatgtctgcatgattacattttatttcctttgtaatttacatttcagaatagtgtattgctatatgggtgccaagattgaatatgaagaacccgagtgtttgtagtattatagttttaagcaaatctgtgtggtgatacagccataagaatggggcttatataaactctgtacatgtaagattttgtacagagaatttttaactttataaattgtatatgaacatgtaaatcttttaaaatgtacataaaatactgtatttttttaccttgtgtgtgatagtctagtcattgcatgtaaatataatttattatgtattctgtagtataaatcatacattgatgacttacatttttactggtaagtcaacatccgttggatgttttctgaagtggctctttttgaagtgataatagattgtaattcaaaataaaattattaatgaataaaaaaa

SEQ ID NO: 353606 - DNA, 513 bp, Homo Sapiens
  misc_feature (509)..(509): n is a, c, g, or t
ctggagacagtttgcaagtaagaacctaaggatggggacagcatcctgtgcttgggcattgaccagccaaagctcacatttagaaatccctcagtgcttctgtggtttcacctgggcatcgacgacattagggaagcctttgtgaccacaagggcagggcttgtgccctgagtggcgaggtggtgacctgaggccagtgtgatgtggttggatctcagcgtgtactgaatgccagtctggccggcacactcgaacgctaagagaatggtccaatttgatgatcttatttctatttcgatcaggttttgactttttgtagatgaaaactaccagggaaaaggggaagcaggtacccaataaagtttagaaagatccagtctgtgaacccttagagatgggctgaaagttaagtccaccaacccttgggcttaatcaggacggaagaggagggggtgtggggggcagagcgtaaaacaagccccagccctaactcccggccccccagcccntgct

SEQ ID NO: 353607 - DNA, 573 bp, Homo Sapiens
cgaaactcagcccagtagacaccatcctggtagcggcttcggtagtggccgccgtggtgccacacaccgttgaggttggagtgggcacaggcatggtaccaccagcctccccgctggtacagggcacagttacctgaggggagagagagagtccatgtcctctcaccagaataaaagcctctacctgcacctcacagtgcaaggcttttgccaggcatcccctggcccctcccattcttattgaatacaagccctgatcttccatctcctcagcaaaaaaataggagccctggccccccaactttcttcagagtaatagccttaattccttccctatctccttaccaaagtacaagtcacatctttcccaccttttctgcaaactaggagtctaccgttcattcctttatcaaagaaaagtatctacttcctttctagaataagagtactagctctcaccctctgccctttacttgaacaggagtcttgattctttttttgcctcatcagagaaggaatctggactccccatccccccaccaggataaaagtcccgacctttgttctcttgac

SEQ ID NO: 353608 - DNA, 995 bp, Homo Sapiens
  misc_feature (17)..(17): n is a, c, g, or t
  misc_feature (19)..(20): n is a, c, g, or t
  misc_feature (28)..(28): n is a, c, g, or t
  misc_feature (48)..(48): n is a, c, g, or t
  misc_feature (50)..(51): n is a, c, g, or t
  misc_feature (54)..(54): n is a, c, g, or t
  misc_feature (56)..(56): n is a, c, g, or t
  misc_feature (59)..(59): n is a, c, g, or t
  misc_feature (68)..(68): n is a, c, g, or t
  misc_feature (74)..(74): n is a, c, g, or t
  misc_feature (79)..(79): n is a, c, g, or t
  misc_feature (95)..(95): n is a, c, g, or t
  misc_feature (101)..(101): n is a, c, g, or t
tctggcaccagtgggangnnagctcccnttgcccgcaaggcttgtttntnnccncnccncctggatgncttttntcttncctggaaccttctccncagcanctgttgaggcgaagtcgtccttcccaggcgctctgggcctcctggatgtggctcagttgtgggcagcgccttcttgagtgtgctgcggtcggcctcgccatgctccagccggaacatggcgtccgtctccagcttctgcttcttctcatgctctgcaacgatcagagctcggctgggctttgggggccccagcgcagactcagggccagggcccccaggcaggtaagtgggtggcgctcacctgtggtcagcacctgctcattgtccgccatgtcccagcgctcctccttgcgctgggcgccactcacgatcacgtagtcgcagttggcggggtccgtctgcatctcgatgtagttgacacagaggtggcatttcatccggaacctgtagatcggggttgtgtagtaattgcccaccttcttcttttctgcattgtaacgaacacccatgccgatgtggttcttgcagccatcgcaccagatgttatatggcatttcgaatcggatgatgaggatgccctgtgacagcttccgagcccgctcccgaagcgggtggctgttgtggtatcggttgagagagccatgcttctcagggttgaagtctggaggatagtacttgttgacccctttcctttcacccatcttgggagctgcctactggtcctcagcctcggggcggacgatcagaaactggccttgtgaacacactgcactgtcctgacctcttgtggagcctggcagagggtccacaggcttccctgcgaagatgtcgtgggccgtgtggtggtgccagctcagacaagactcccgccaggcataggaggcatccaaaaagcggcgtgtctgccctcctcccgacgtcacgccctgaccgtgcatcccgggaattcggacc

SEQ ID NO: 353609 - DNA, 1795 bp, Homo Sapiens
  misc_feature (1159)..(1159): n is a, c, g, or t
ccacttcggcgtcgcagaacgcttggcgtatcgtccttcagccaatcagcgtggagctgctgcctcgccccgcctcacgccggcgtcctgggggcgcggagagggcgcccaggttcaccgcgctctcagcgcgcacttccgggcacggtcagggcgtgacgtcgggaggagggcagacacgccgctttttggatgcctcctatgcctggcgggagtcttgtctgagctggcaccaccacacggcccacgacatcttcgcagggaagcctgtggaccctctgccaggctccacaagaggtcaggacagtgcagtgtgttcacaaggccagtttctgatcgtccgccccgaggctgaggaccagtaggcagctcccaagatgggtgaaaggaaaggggtcaacaagtactatcctccagacttcaaccctgagaagcatggctctctcaaccgataccacaacagccacccgcttcgggagcgggctcggaagctgtcacagggcatcctcatcatccgattcgaaatgccatataacatctggtgcgatggctgcaagaaccacatcggcatgggtgttcgttacaatgcagaaaagaagaaggtgggcaattactacacaaccccgatctacaggttccggatgaaatgccacctctgtgtcaactacatcgagatgcagacggaccccgccaactgcgactacgtgatcgtgagtggcgcccagcgcaaggaggagcgctgggacatggcggacaatgagcaggtgctgaccacagagcatgagaagaagcagaagctggagacggacgccatgttccggctggagcatggcgaggccgaccgcagcacactcaagaaggcgctgcccacactgagccacatccaggaggcccagagcgcctggaaggacgacttcgccctcaacagcatgctgcggagaaggttccgggaaaagaaaaaagccatccaggaggaggaggagagagaccaggccttgcaggccaaggcgagcctgaccatcccgctggtgcccgagacggaagatgaccgcaagctggcggctctgctgaagttccacaccctggactcctacgaggacaagcagaaactcaagccggaccgagatcatcagccgctcctggttcccctctgcccccngattccgcctccagaagcaaggtcagcggcgtcctgaagaagctggcacagagccgcagaaccgcgcttgccacctcccccatcaccgtcggggacctgggcatcgtgcggcggaggtctcgggacgtcccggagagcccccagcatgcggccgacacccccaagtctggggaaccgcgggtaccagaggaggctgcccaggaccggcccatgtcccccggagactgtcctccggaaacaactgagacccccaagtgcagcagcccgagggggcaggaagggagccgtcaggacaagcccctgtcgccagcaggctcctcccaggaggcagctgacacccccgacacgcggcacccctgcagtctcggctcctccctcgtggcggactactccgactcggagagtgagtgagcgatccccatcctggagactggacccgctctagaggcccggacacacccaggaggcccctcacagactgcagacccccggctcgcccaccagccctgggagagctcagatgccgcatcctccccagaccgcgccttcctgcaaccgtggagttatttatttggtcctggtgagggtgtttgtgccttgtgagactccgtacattaaagacctgtctcttcaaaa

SEQ ID NO: 353610 - DNA, 999 bp, Homo Sapiens
ctgtgaaaacttactttgcccctagtctggctgctgctaggacttctgaggagcaatgggacatgagtgtccctgtatctgcgccactgccgcaagggaagcctcaggaaccagcacctggaggccaggatagccaagccctgggtgagcgagaggctggagaacacaggagctcacccagggctgctgcccaaccatgggccactgtgaacagacttcagtcctctgtttttgtttcataagccgttgagacatctgatggacttggcttaggccctgctgggacatcccacgtgtgatccctttcactccatcaggacaccaggactgtccttaggaaaatgtccttgagatggcagcaggagtcatattttctgtgtgtgtgtttcggaaagccgctgtgtcctgcctcagcacaaagacccagtgtcatttgctcctcctgttcctgtgccactccagaacctcagcagatctgagccaccgcctgccagtgtgagaggcggccactttcatggcagcttatcaggcgcagggccccagacagcttcccagccggccctagagcccggcctgggccaatgatggagggcggccaccagcccagggcctgcccatccagaagggactccccagggcctgggggaggagacccttggaaaagtcctctcttcccagctcctgattctggatctgagattctcagatcacaggcccctgtgctccaggccgaggctgggccaccctcagggagatccagagactcatgcccatggccatccatgcgtggacgctgtgtggagagtccaggatgacgggatcccgcacaagctcccttcagtccttcagggctgggccatgtggttgatttttctaaagctggagaaaggaagaattgtgccttgcatattacttgagcttaaactgacaacctggatgtaaataggagcctttctactggtttatttaataaagttctatgtgattttttaaaaaaac

SEQ ID NO: 353611 - DNA, 1928 bp, Homo Sapiens
  misc_feature (11)..(11): n is a, c, g, or t
  misc_feature (20)..(20): n is a, c, g, or t
  misc_feature (26)..(26): n is a, c, g, or t
  misc_feature (29)..(29): n is a, c, g, or t
  misc_feature (36)..(36): n is a, c, g, or t
  misc_feature (39)..(39): n is a, c, g, or t
  misc_feature (44)..(44): n is a, c, g, or t
  misc_feature (47)..(47): n is a, c, g, or t
  misc_feature (51)..(52): n is a, c, g, or t
  misc_feature (66)..(66): n is a, c, g, or t
  misc_feature (85)..(85): n is a, c, g, or t
  misc_feature (112)..(113): n is a, c, g, or t
  misc_feature (158)..(158): n is a, c, g, or t
  misc_feature (173)..(173): n is a, c, g, or t
  misc_feature (188)..(188): n is a, c, g, or t
  misc_feature (562)..(870): n is a, c, g, or t
  misc_feature (1682)..(1682): n is a, c, g, or t
  misc_feature (1740)..(1748): n is a, c, g, or t
  misc_feature (1750)..(1750): n is a, c, g, or t
cccccaccccncccatttgntgggtnggnacgatgnagngaatntgnaagnntgaaccaggaaccntggagccaggaggcaagangaggaagaggatggggaaggagggccnncccctgcctacctaagccaaggccacagagctcatcaccccaggnccgcgggatgagaanggcaggggcttacgngctgcactccagggctatcgagacggcgtgcacgtcttgcttcagggagtccccagtgacccgttgcctgcccgccaggaaggtgtgaagaagaaggcagctgagtacctgaagcgggcagaggagatcctgcgcctgcacctgtctcaactcccaccctaacagggagtgggccattccctgggactctcgctcctgcactgccagccccttctcctctccccagggcctggccctacctcctggtcttgtaattacaggagccatttctgtaggtaactggaccaagaatgagaaaaataatgaattcttagctccctgattacacctgccaccttggaatccaggactcacacttctgaccctgcctgtcnnnnnnnnnnnnnnnnnnnnnnnnnnnnnnnnnnnnnnnnnnnnnnnnnnnnnnnnnnnnnnnnnnnnnnnnnnnnnnnnnnnnnnnnnnnnnnnnnnnnnnnnnnnnnnnnnnnnnnnnnnnnnnnnnnnnnnnnnnnnnnnnnnnnnnnnnnnnnnnnnnnnnnnnnnnnnnnnnnnnnnnnnnnnnnnnnnnnnnnnnnnnnnnnnnnnnnnnnnnnnnnnnnnnnnnnnnnnnnnnnnnnnnnnnnnnnnnnnnnnnnnnnnnnnnnnnnnnnnnnnnnnnnnnnnnnnnnnnnnnnnnnnnnnnctgtcttgatgtgtgagcagcagctgtggtcattaaaccattagtttacccctctagaactggggtctgcaaactcccacctgcagccaaatctggcccacctcctttttaatgtaagggctgtgagagtggtttttactttttttaatgattaaaaaaatcaaaataatattctgtgacaatgacaggtgaaatttatatgtgacaagtgaaaattatatgaaatttaagagtccataaataaaatttgttggaactctccaaacgcactgcgatgtagggcaccgctgctgtcaaaggattgaatctgggacaaggctgacctgaagcggtatcgagccatcacttcgggaatattatcgtaatgcggcggcggcccctcctggtgttcgatgggggggccccaactatacctatccctttgttaatttgtaaagatggaggaccctataggggccgggcttgaataacgctagcgccccggcccgccttctaataaaaccccgccagtgagcctaaaaaacacggcccctgggggaggggctccttctggagagaaggcccccttaattttttggtgggtgcgggaacatatagtattggacaataatcccctcccacgaacacactatctactctgcgactctccgaggcgcaaactgtatccgaagattttatgtccccgcccacacacaacagggcgccattggccagaaaaacttactactcgttatatcactcacacgggagtgctgccctccacggaaaagaagatatctatgatatatcacaattcgaggctaatccgcagnggatgctcctcttcgtggagacacattatctgaattttattctcgcgcgcccacagcnnnnnnnnnanctccctagcagcgagcggtatggtacaaaatatctcgctgcttgtcagattgtgggggccccccccatttggtgtatcttacaaaatacttatacaccagacgctcccatagatacccccgggaaaattctaatcccatctccctggcagtagccctcaaccccccctgaggttatac

SEQ ID NO: 353612 - DNA, 581 bp, Homo Sapiens
gaaaatctttggggtaggagcctctggtggctcataaatgagctttgggaagatgacagggttatcacgccaagcaagaggccaggcttcgtgcaaagaagggcagcatctcgccccgagcgccaacaccgcctggcacgtctctgtgctggaggtaatcgcgcactcaagtctctgcccatcttcctgggaaactgtcctgtctctcagaatataggcatcttccacattcattccccaagcttgccccaggagccaaaatgattttagtgtgtggaggttgaacctttcccagcgtctccccagctctagggcagcagtggggggacgttgtccccactcaagacaggttccaagacatgctctgccacgctggcagagcttagtgaccttgctgagtagatgctgccaacggctgggtgcaagaggctgtgagcggtgcccaggcacacacctgaggctgcccctccaagctccgggatggaacggctccagcaagatgctggggctggaaatgcagaggtgtgacagtgcgtccatcctcagcccttcaccctcgtgccgaattcgccactcaggcc

SEQ ID NO: 353613 - DNA, 581 bp, Homo Sapiens
  misc_feature (70)..(70): n is a, c, g, or t
  misc_feature (104)..(104): n is a, c, g, or t
  misc_feature (565)..(565): n is a, c, g, or t
tgcagaaaggctcactcggcttctcgtggaggagatggtggaggggtggaggagatggtcttcaggggtntaggggcagggtgggaggcagaggggcaggagcncctgccagaggacgatgtggacgctgggagggatcttggcgttggttttctgaaagccaggaacaaaacctcgcggtccagtcggcacttcagttggcactacagggatgtgacggtgaatgtgtcctcggggtgaggttccgccatggccccaggaagccgctcttgggcccccacccaggccaggatggcctgggcataaagcctgggtaccttaggcggtgtcctgcaggggcagcagcgagtccctcggcacgggggacagggtcaagtcactaaggagtgggcagccatagccaacagcggctgcagcagggccacggggtgggccagggggccgggccatttccagtggctccttgtcggccttggacgtggctggtgggctagccaggtgaggggcactgaggcacgcggcctccgtcctgcccaggaagtcagccagcagccctgtacccacntgccttccctctgcca

SEQ ID NO: 353614 - DNA, 679 bp, Homo Sapiens
  misc_feature (490)..(539): n is a, c, g, or t
  misc_feature (661)..(661): n is a, c, g, or t
ttttagtaatctttatcccttcagagaattcttcctttaagtcttgggtgagatattttattatttttaaggtttatatatctatattgttagaacaagcatactctggcaatgttgttctttaaaaaaagcatggattgcatttatatagtgtttttttccaaaaatctgaagaaattatcaagagcacttggcagagataacttgatgaaatcaggggaaaaaattgatgtccaacttttaaatatacaaaaacttgattgacattctacataattcaaattgtgtgcaagatgttctcaataaacatttacagactgtatccccacaccaatgtcagaaattcaaagctggtcctattactgatgtgatacatcaacatcacaatgtcagctatcaaaaatcattttaaatctatgttttccaacaactccagttccatcaatgaaaataattttaaaggatatcaagcttggaaaccataaaatannnnnnnnnnnnnnnnnnnnnnnnnnnnnnnnnnnnnnnnnnnnnnnnnnaatctagggaatgtctcttatctctttcaggagatagtattgtgcttctgaacagtcatggcgttcggggaaagaaaatgagccacactcaatgtgaatgtatacacgaaaggttttggagnacatacattaacataaat

SEQ ID NO: 353615 - DNA, 1805 bp, Homo Sapiens
  misc_feature (15)..(15): n is a, c, g, or t
  misc_feature (62)..(62): n is a, c, g, or t
  misc_feature (1314)..(1325): n is a, c, g, or t
tttggcttcaagaanccctttggaaataaaaagttaaatgtttacatttcatgtggtatttnaggtcttcaggttctgattagcttactttgttcctttgtctttggctgatttctgctttgtagataaataataatagccctgagatgtttctaacatttaaataagaaaaaaatcaaatcgaagtcagcctgctggaaaagtgatcacatggcagttgcagtaacttgtatggaaagagaaaatgcaatgagcccagttactgcacttgccactaccatgctgtccatggaaggaataatcagcagttcagttgtcacaagccgcccttgaagaaaacgcagcaaaatattttaaaatgaagatattgcagtccccagagccagtgaaggtttcttttggtaaaatgaaattgtgccattgtcaaagtaccccgtagtgatgagcactgactggttcactggccacattttagttcttcataataataggccacaaaagggctctgtggcttgcctccatgtgcactggcccctccccacccctagggggcactcaagtagctgctgagaaagcctgtccacgaagctgttggaacccctccaataaatacttagaggtagtgtatctgatgcttgttttcatggagaaaattgtattggagaacttaaaacatcacgaatatttttaataggatccgcagacacccaaaggagaagcttggtcttttccaggtatttccaacttgagttcaacccaaagcctttgaaaggaatgcattaccacatgaccacatgctgagaccccatggggtctaacacgggacctaagaaagtctctgcagccagatagtacatggtgtctccacaaaactaggcattctggagattgcccagaaagggatgtgaggggaccgttaagatctggcttgcttatctcatgcactcacattccttcagcctcctggagttcctgataaaaggaagccagggtgttgacattttttagctattgatttcccaatagcttgtggatcagttgtacacccacacttccttctctgcctaattccgtttttctggaaaaagtagtatgcccatgtatgtgtgtttttcttaacacaggtccatgaaagtttggcttcctggtttgatgtctgttgcgtggcctggaaaccagggagcagcaactattgagatggtttctgtgttcagtgaaaaattctatttcattgagacaattttttctttatccacagtaattttttgacactgtcatcatgaaactacccttaggaaaataagattacctgcnnnnnnnnnnnngaaatgagttatggaataggaacagttatgtgatgattctgaaactttaacttagagcttcattactttaagaatggaaaacaacctctgagtttgatttcccaaagtttcataaagcccctaagctcatgattttcatcaactctttgcccacatagtcatttacctccacagccgtttgttgtcatagaaggggtggtggtgtttggatttgatttttttcaacttgcagtgagaaataggataggtgacaaaaccttacttgttttcttaagacaattcagtgcttgagcatctctgtcagaaatggaatgaaatactgttagccaattagaattattttatgtattgttattgtgttttgctgatttttatatgaaaatataattattcattcttgatctctggaagcaatcattattatgaggatcattttactttggaaacactttcataataaagataagtattaagagtgca

SEQ ID NO: 353616 - DNA, 440 bp, Homo Sapiens
  misc_feature (362)..(362): n is a, c, g, or t
  misc_feature (415)..(415): n is a, c, g, or t
gatgtcattatctccagagaggcttcaagaaatcctttggaaataaaaagttaaatgtttacatttcatgtggtatttcaggtcttcaggttctgattagcttacttttttcctttgtctttggctgatttctgctttgtagataaataataatagccctgagatgtttctaacatttaaataagaaaaaaatcaaatcgaagtcagcctgctgggaaaagtgatcacatgggcagttgcagtaacttgtatgggaaagaggaaaatggcaatgaggcccagttactggcacttgccacttaccatgctgtccatgggaagggattaatcagcagtttcagttgttcacaagccgcccttgnagggaaaacggcagccaaatatttttaaatggagggttttggcagttcccccngggccagtggagggtttcttttttg

SEQ ID NO: 353617 - DNA, 1946 bp, Homo Sapiens
  misc_feature (690)..(699): n is a, c, g, or t
  misc_feature (1168)..(1168): n is a, c, g, or t
  misc_feature (1216)..(1216): n is a, c, g, or t
  misc_feature (1238)..(1238): n is a, c, g, or t
  misc_feature (1277)..(1277): n is a, c, g, or t
  misc_feature (1302)..(1302): n is a, c, g, or t
  misc_feature (1391)..(1391): n is a, c, g, or t
  misc_feature (1412)..(1412): n is a, c, g, or t
  misc_feature (1425)..(1425): n is a, c, g, or t
  misc_feature (1442)..(1443): n is a, c, g, or t
  misc_feature (1470)..(1470): n is a, c, g, or t
  misc_feature (1491)..(1491): n is a, c, g, or t
  misc_feature (1520)..(1520): n is a, c, g, or t
  misc_feature (1570)..(1571): n is a, c, g, or t
  misc_feature (1642)..(1642): n is a, c, g, or t
  misc_feature (1664)..(1664): n is a, c, g, or t
  misc_feature (1713)..(1713): n is a, c, g, or t
  misc_feature (1720)..(1720): n is a, c, g, or t
  misc_feature (1722)..(1722): n is a, c, g, or t
  misc_feature (1728)..(1728): n is a, c, g, or t
  misc_feature (1753)..(1753): n is a, c, g, or t
  misc_feature (1873)..(1873): n is a, c, g, or t
gcgcattaccatcgctggtaccggtccggaattcccgggatggccggctgggcgtgcgctcgctccccgaagccggggctgggccggagccgggcgagggctgggagctgggccgggtccggggacagcgggcgaggggcagctgccggagccgggcagccaggccgctcagggcaggggacagctggcgccggttctgcgcgtctccggggcccacatgtgaggcggcggcgcctccggtcctacagcgccccatgggggccccgctcgtcgtagcgctgggtgtcttctacccacctggcccttttcctgcgactcggcggcgccccgctgtacgcctgccccgctcccctgggattaaatcgtcccccggccacgtcctgtctcgtcacacaccctttgtattccaccgctcctgatcgcccgaccattcgctagatgcgcctgccccctctcccgccggccggtggcgccgtttttttcgccgtcggctgggagatgtccgccgccggttatcgtacttgaaccccacccgtccattacccagccgcccgcgccctgacccaccgccctcgccgctctgtcttagaatccactctcacccccgcccgaatacggccccgccaatggaacgacgcccctggccgcgcatgggccgcgccttcccctgtacccccttttcgtgccctnnnnnnnnnntgttgtagaccccagggtctgcgtccctgctgttcgacaattttctgttcccgccctacttggcccgcgggtcgatatctccgcggcaggcacgttccccgcgcccgtcgcaataaaccccgccctttgtaatcgcgcatcaccccgcccgtccgtcctttatccccgctatcttcgttactcttctatctctcccagccgcctctcccttcatttaacggtctaccactgtaatagtcaccgcggcgcgtataatctgggcgacgcttaccactgaccgcctgacgtccggcgcctcactccgctattatgaccacgtttgcacgtggattattccccgacccccgcggtcttttctcataaagcgcgccccgaatgtttttggtgcgctggccccgcgttcgccgttaccgccgacgtactcgctttcttcgtccgtcacccgctttgacaaaaacactctatttanttcctccggcttccggcttcttcggtcccgcttgacggtgattcgcancaacgtcccccgccccgtcttnatattaagccaccccattttttttccccatcgttaacgncccgccgatgcttcatgttacgaanggctcccgtttaactcaaccccttggcggatatttccctcatcccgcgccgcccggtttatattacgaagttcataacaaacatctccnaccatcgtacctccatgtcancaacattcctatnaccgccccttcgcccgnngcgggctgccccgtctgaattttttgnatacgaccgcgggtgcgaagnttacccaccgggcggatgccccactattngagtattgtaccgaccgccgacgcggcgtggtggaatgacactgacgttnngtttcccgcgcgcgccgcccacgctttctctgtttgttggttttttccgcccgcgcgccgaatctaactantacaatcaattattggtacatnatgccacaagcatcacgccggcggcggcgatttaattgccgtcggcgtntatggcntngcccgnagtcggctgcgaagcagggggaaantggggtgctgaatcggatatccaaccgccggggtgtagcccactaagtaatagaagctcccccccacgcctgatgtttagcggacttccattcatccccgcccaccccgctcgttttggnttctccacccccacactccttgaaagtcggccacgcccccgccggccgggggtgcgtggatacacacatgaat

SEQ ID NO: 353618 - DNA, 1963 bp, Homo Sapiens
  misc_feature (782)..(808): n is a, c, g, or t
ggccttccgcggaagggaagagtcccgcagtcggaggcggccggctgggcgtgcgctcgctccccgaagccggggctgggccggagccgggcgagggctgggagctgggccgggtccggggacagcgggcgaggggcagctgccggagccgggcagccaggccgctcagggcaggggacagctggcgccggttctgcggtctccggggcccagatgtgaggcggcggcgcccccggcccgagagcgcacgatgggggccccgctcgccgtagcgctgggcgccctccactacctggcacttttcctgcaactcggcggcgccacgcggcccgccggccacgcgccctgggacaaccacgtctccggccacgccctgttcacagagacaccccatgacatgacagcacggacgggcgaggacgtggagatggcctgctccttccgcggcagcggctccccctcctactcgctggagatccagtggtggtatgtacggagccaccgggactggaccgacaagcaggcgtgggcctcgaaccagctaaaagcatctcagcaggaagacgcagggaaggaggcaaccaaaataagtgtggtcaaggtggtgggcagcaacatctcccacaagctgcgcctgtcccgggtgaagcccacggacgaaggcacctacgagtgccgcgtcatcgacttcagcgacggcaaggcccggcaccacaaggtcaaggcctacctgcgggtgcagccaggggagaactccgtcctgcatctgccccgaaggcccnnnnnnnnnnnnnnnnnnnnnnnnnnnaagccaggcaaggagctgaggaagcgctcggtggaccaggaggcctgcagcctctagactgatgcccctgcccccgcccatccgcccccacgctgtacagagtgcatgaggagccgccggaccaccggggaccgactgcctgcgtccagccgcgccccatccccgaggccgcctgtggccaccatgtcggccctctttccaccaccccttgctcagcatgtaagccccacccacccctgccctttcagacccctgcggtgacctggctcggagaaggtggccctgggcaccaaggggccaaccgccctgaacactggggcagggaccatgctggggcccggggccacccccttcctgtcaccagcttctgtggagtccagtgttttgctttgcttgcttgtcccccatcctgtcctgagccggggccccccagcctcgcctccctcctcctaccatccctcacttggacctgggggtgtggacagtgacccctccctgaatatggacttgaatcttctgagcagaactagggcctctcccctggtgaagacccagggaacccaggagggcccttctggggcagtggctctgcagggtcactcatggaggcctaggggaacagcgagatgccccaccacctcctggcgagtccttcctgttcagctccctgtgcgaccctccagggatgcaggggatccaggattctctgccctgtcacacggcgagtcagaagggaggggcctttccctcggacccatggccccaggcagagttttgcaccagcaggacccctttgagggccttcaaggctctcccaggagtccccctctgccggccccccaatgccccagctccctcttgggtcctgtgccaagtccgccccagggcctggggctgttgggagccaagggccccctggtactcagttccctcacgattcccgatcacgggcacacctgccccctggttatttgtaaatatttctattggacccaattctcctcggaattggctggcacctctggctgccgcagctcagtgatgacgtgggggaggtgggagaggccgagggctttgcctaggggtgggttgccctgtatacatgatccagtctgtgactaccagccaacctgaataaagcggttttaaaaaaaa

SEQ ID NO: 353619 - DNA, 648 bp, Homo Sapiens
acaaaaaaatatttaattaaaaatatcttataattacagtatctattaaagcatatactttctcacacttatagaacatctctatatatacatggtatgaaatgtcactcatttatctatacaatatgtaacattcttgcagagaaaagaaagttctctgccccgttataatcatctattttaaacaatagatgtaaaaaaaaaatatctacaatgctctggtagattagtaaagcttcaaaacaaaaattgagctccttggtcacaaagtaggcttctaaagtcggatctactcttgatcttctatttatcagtcctgtcacacttaagcttaaaagtttaactgcacctccaaaaaacacagaaatgtacaattcacagcagttataaatgaagagacaaaagagaatacgtatgtagaatgtttatgaacgtgcaaagaaagaatgaaagttgtatttttctttcctctctctctcttggaatgacgaatgaaaacgtttctaggttggccgatgttttttcctttcctccggtggctttttttctctaacttctgctcttccccctccctctctagtgctcctggctcgggctcaggcggccgcacacctggacagcgcggctcagcggcacagaatgctgtcg

SEQ ID NO: 353620 - DNA, 1148 bp, Homo Sapiens
  misc_feature (404)..(412): n is a, c, g, or t
ttcacactattgaaacagaaagatctgtgcaaggacacagcttgtatgaaagggttgaatttgggctccatcagtaatttttgacattttcaccaaaatatagtttgcactttttaatctaaagtcatcccttctgagtgaaatttgctcataaagcatttggatactaagccattatttgccattttgggtactttatacaaagaaaattcagccctaccctgcataatttgaagacacagcagaaagggggcttagggatgaggtcctggtttttcttgtataaataggagtcatgggcgttagttctgtagtaataacttcccagcacctggacatctcttccagagttatcccactggcttggtgtgtatacattaggggaggataatctgatgctaacnnnnnnnnnctctttggttcttgaatagcttagtttctttaataacaagtcaaactttattacaacaataactgaagttattcttttaggttctcgtgaaattctcactgaaagccacattcttagcctaaggcatttcatcttttatgatataaaatgatggctatcaaatgattttccatacattgtactgatcaagttatacacccaggggtatatacactttcttcatgtttcttctttgtatatttggtgactgtatcgtcatagatgtacatattgtgtcggtagggctatgaggcatgttacaggaatgtaattttctcagaatttacactcactcgcagtcatttatttaaaaagataaaacaagataatgggttctttgtattggcactttgcaccagaaacatatcattatttattgatgtgattacttatttgttatccaccttgtactagtaagttttagcactgaattccttcttcactgttgtttgtatttatgaaattctgaaattatggggaatcagcgtaatgattaagttattcatcaccaggctgtaagcaatatcttgagtttgtagcttagaattgggaggatacttaacatctggaagacaagttcatttcatcttgagatcatggtgaaatattttggatatataaattccttaagctattgtaaccatgttttattgcaaagatgtaaaatatgccagatgtgtgtgagttggaaatcaaa

SEQ ID NO: 353621 - DNA, 1578 bp, Homo Sapiens
  misc_feature (983)..(997): n is a, c, g, or t
  misc_feature (1442)..(1442): n is a, c, g, or t
  misc_feature (1518)..(1518): n is a, c, g, or t
  misc_feature (1534)..(1534): n is a, c, g, or t
gctgctctgtctggagtgggcggacatatcataggaacacctacgcagtgacttcggcaccagagccgtcctccggccatgaccatgaagttgtctgtgtttctgtctgtgcagaacttgggcttgttatcagtggtgctaaagagggcccttgccttgtccacaccatcactggagatttgctgagagcccttgaaggaccagaaaactgcttattcccacgcttgatatctgtctccagcgaaggccactgtatcatatactatgaacgagggcgattcagtaatttcagcattaatgggaaacttttggctcaaatggagatcaatgattcaacacgggccattctcctgagcagtgacggccagaacctggtcaccggaggggacaatggggtagtagaggtctggcaggcctgtgacttcaagcaactgtacatttaccctggatgtgatgctggcattagagcaatggacttgtcccatgaccagaggactctgatcactggcatggcttctggtagcattgtagcttttaatatagattttaatcggtggcattatgagcatcagaacagatactgaagataaaggaagaaccaaaagccaagttaaagctgagagcacaagtgctgcatggaaaggcaatatctctggtggaaaaaactcgtctacatcgacctccgtttgtacattccatcacacccagcaatagctgtacattgtagtcagcaaccattttactttgtgtgttttttcacgactgaacaccagctgctatcaagcaagcttatatcatgtaaattatatgaattaggagatgttttggtaattatttcatatattgttgtttattgagaaaaggttgtaggatgtgtcacaagagacttttgacaattctgaggaaccttgtgtccagttgttacaaagtttaagctttgaacctaacctgcatcccatttccagcctcttttcaagctgagnnnnnnnnnnnnnnncacgtttgatactttgtacatcagatgcatcttatttaaaagggatacttttgtaaaagtaaaaccttgtataaagaacaaaatgtttcttaattttattgtggagttacaacttgcatgttccttactcctgttggcttgatggaacaggtgcattcacactatgaaacagaaagatctgtccaaggacacagcttgtatgaaagggttgaatttgggctccatcagtaatttttgacattttcaccaaaatatagtttgcactttttaatctaaagtcatcccttctgagtgaaatttgctcataaagcatttgggatactaagccattatttgccattttggggtactttatacaaaggaaaattcagccctaccctggcataatttgaaggacacaggcaggaaaggggggcttagggggatgaggtcctgggggttttcnttgttattaaataggggagtccagggggcgttagttcctgttaggtaataactttccccagcaccgggggacatcntctttcccagagtttntccccacttgggcttggggtgtgttatacattagggggggaggg

SEQ ID NO: 353622 - DNA, 1260 bp, Homo Sapiens
cggtggcccctcccgcccacgcgccagagtcgcagtgggcgggcctacgtgctccgcccgctgtgagcctgtccggcccccgcccgctccggagcaacccgcgagcttacaccggcttctctctgtcctcagcccgcgcgccgccatcgccgtcatgctgggcgccgctctccgccgctgcgctgtggccgcaaccacccgggccgaccctcgaggcctcctgcactccgcccggacccccggccccgccgtggctatccagtcagttcgctgctattcccatgggtcacaggagacagatgaggagtttgatgctcgctgggtaacatacttcaacaagccagatatagatgcctgggaattgcgtaaagggataaacacacttgttacctatgatatggttccagagcccaaaatcattgatgctgctttgcgggcatgcagacggttaaatgattttgctagtacagttcgtatcctagaggttgttaaggacaaagcaggacctcataaggaaatctacccctatgtcatccaggaacttagaccaactttaaatgaactgggaatctccactccggaggaactgggccttgacaaagtgtaaaccgcatggatgggcttccccaaggatttattgacattgctacttgagtgtgaacagttacctggaaatactgatgataacatattaccttatttgaacaagttttcctttattgagtaccaagccatgtaatggtaacttggactttaataaaagggaaatgagtttgaactgaaattaggtatttgtttcatgtgtttgcattaataagcagaaaattaagtgctgtattggtttcatggttttgctgccctcttacatgctgagagaactgtgttaattctctggaaaccatctgacatgaaaatcagcttcattaatatgtttgggtgccctagcttgtaaattagctgaaggctagaagtcatttatatagaattttcttgttgacaccctaggcttaggggactggttgtctgtggggatagatcaaattgtgtacctttccaaaacaggttttaatgatgtttaaaagtggtcactgagatagtcttgaggatgtgctatgcagtagccaagccctcttacggtgtgttcctctcttagtgcccctttcctttcctacctgttcttcccttgcagtggtgtattagccttggacattaaaacatttgctttgtaaatttggaggcattctgattaaacagctgagt

SEQ ID NO: 353623 - DNA, 714 bp, Homo Sapiens
  misc_feature (676)..(676): n is a, c, g, or t
  misc_feature (680)..(680): n is a, c, g, or t
cgctacaaggccccgccgtggctatccagtcagttcgctgctattcccatgggtcacaggagacagatgaggagtttgatgctcgctgggtaacatacttcaacaagccagatatagatgcctgggaattgcgtaaagggataaacacacttgttacctatgatatggttccagagcccaaaatcattgatgctgctttgcgggcatgcagacggttaaatgattttgctagtacagttcgtatcctagaggttgttaaggacaaagcaggacctcataaggaaatctacccctatgtcatccaggaacttagaccaactttaaatgaactgggaatctccactccggaggagcggggccttgtacgcgtacaaggccccgcagccaccattctgctttctgtctctctggttttgactattctcagtatctcatataagtggaatcatacagtgacttgtctttttgtgactggcttatttcacttagcataatgtcctcaaggttcatccatgtcgtgtcaagtgacaggatttccttcctggattatacatataatggaatgttccgttacatgtgcgtaccacactctgttcctccatcagtgaacacttggcttgcttcctcttgactattgagagtagtgctaatacagacacgggggtgcaaatatctntttnagactctgcctttaattcctttaccacccagagt

SEQ ID NO: 353624 - DNA, 585 bp, Homo Sapiens
  misc_feature (39)..(39): n is a, c, g, or t
gctgcctccgtcgctgtaccgcagccgcctccccgaagnctcctgcaccccgcctcggctcccagcccgccgccgctgtctgttccattcgctgctattctcatgggtcacacgagacagatgaggagtttgatgctcgctgggtgacatatttcaacaagccagacattgatgcctgggaattgcgtaaagggatgaatacacttgttggctatgatctggttcctgagcccaaaatcattgatgctgcattgcgaagcatgtagacggttaaatgattttgctagtgctgttcgcatcttggaggtttgttaaggacaaagcaggacctcataaggaaatctatccctatgtcatccaggaacttagaccaactttaaatgaattgggaatctccactccagaggagctgggccttgacaaagtgtaaactcccttcgatgggcttcctaaggacttaactgctattgctacttgattgaaacagttgcctggaaatgttttatttgaacaaattttcctttgagtatcaaaccatgtaatagtaacttggactttaataaagggaaatgagtttgaactgaa

SEQ ID NO: 353625 - DNA, 714 bp, Homo Sapiens
agcgggggttctaccaccacatccacacgcccccgctgggctacggggctgtcccggcccaccccgccacccaccccgccctgcccacgcaccccggcacaccttcatctccggcgtgacctttcccttcaggcccatccgctaggctggcccgtgtgtgccttctgcgctctcgctggacgaagcctttcgagatggaaggggtggccggactcccagaagagaacctcggggaaggggtcgggcagccccttccccgccggcagaaccgtcttggtgtcacggagtccaggtgcttcccacccggtcgcattctttgacatgcagattggatggtggagggaagagtccagcctctgccgagagcctgctgcgtgcatttttaaaagatgccgatcctgggagcctctgttctctgcgcatttcagacacagcctgtgtggcgaggagtgtgacggcaggagccacgggtgcaagcccgtgtgtctggcctctttcctcgtgaagacgatgtgtccccgccagaaaaagtgggctccttctgcagccccgtgagctgagcccaggctgcgtagtgaccacaagcttatgtgcagcactgctcagggaggctgtcaggaattcccctcacctcggaaaggaacttctcagttttattgggggtgtctaaatttcctttcatatgttcaaataaatttttctaaacagtcatgt

SEQ ID NO: 353626 - DNA, 768 bp, Homo Sapiens
  misc_feature (59)..(67): n is a, c, g, or t
gacggccgtggctcagggcactgcacgaacgctcttgcagtcacggttgataacgtggnnnnnnnnnccaactgtgttttctccccatctaccaagttctcctcgatgaatcaataaagggagaatgaataatggggctcccacccggagagattctgctgcagtgtcggcaatgagagtcggtggtttgggggtgggatgctgcgggaggccgtattcaatgacaacagaagctacacaaccaaacctgaggggacagaggtagccagaggcttggtggtcgacacagaacgggacagacggcagcgagatggaactagagactctgcctcctaccatggcatggggctggcagtcaggcagtccggggcgccgctccgtcgcagggtggcggcagcatcctcacaagagctcatactgcttgaggtgcatccgctggatgatgtcgcggcagtcgttgaacacctgcggatgttctctgtgtccacggcgcaggtgaagtgcgggtagcagtaatgtttgccgtcaccggtggccgtgctgatcctcaaaaacaggtcccggataaagaacttggctcttgtaactttgggatcttctcctgcatctggtgttgcgtcttcaggaacagtataatttgcatattctgggaaatagtcttcaatttttgatttccctgccaagactttttctgccagcatatcttgtttgttcaagaacaagatgatagaaatggtccgtaaccacctgttgttccagatgctttca

SEQ ID NO: 353627 - DNA, 302 bp, Homo Sapiens
  misc_feature (260)..(260): n is a, c, g, or t
  misc_feature (265)..(265): n is a, c, g, or t
  misc_feature (277)..(277): n is a, c, g, or t
  misc_feature (286)..(286): n is a, c, g, or t
  misc_feature (288)..(288): n is a, c, g, or t
  misc_feature (290)..(290): n is a, c, g, or t
  misc_feature (294)..(294): n is a, c, g, or t
ggcacccttgtctacctaaagtggaagcgatttggaggacacctagccagtcaaattctggactattaccagaaactattaatttccctgagcagcgccatggacaaggagaatcattatttaagcacaacaccaaaagtttccgtagatttgggatccgattctgaacacacaaaacagaaggcaagcactgacttatcacaagatgaattagttctaacccgatgttaagaaggaaattccttggatacaacaaaaangccanggggtttttgtnaaaatgggncntnaaanggggggat

SEQ ID NO: 353628 - DNA, 1099 bp, Homo Sapiens
aaaaagaggctggtaccggtccggaattcccgggatgggaggaaaaggaaccccgaggccggtgtggcaaccacagatttgtacggcaactgcactctgaggcattctgggacatctgcagctgcccccgaggcagctggtgtgtttgcactggctctggaggctaacctgggtctgacctggcgggacatgcagcatctgactgtgctcacctccaaacggaaccagcttcacgacgaggtccatcagtggcggcgcaatggggtcggcctggaatttaatcacctctttggctacggggtccttgatgcaggtgccatggtgaaaatggctaaagactggaaaaccgtgcctgagagattccactgtgtgggaggctccgtgcaggaccctgagaaaataccatccactggcaagttggtgctgacactcacaaccgacgcctgtgaggggaaggaaaattttgtccgctacctggagcatgtccaggctgtcatcacggtcaacgcaaccagaagaggagacctgaacatcaacatgacttcccctatgggcaccaagtccattttgctgagccggcgtccaagggatgacgactccaaggtgggctttgacaagtggcctttcatgaccactcacacgtggggggaagacgcccgaggcacctggaccctggagctgggatttgtcggcagcgccccgcagaagggggtgctgaaggagtggaccctgatgctgcatggcactcagagtgccccgtacatcgaccaggtggtgcgggattaccagtccaagttggccatgtccaagaaagaggagctggaggaagagctggacgaagccgtggagagaagcctgaaaagcatccttaacaagaactagcgctgcacatccgcctttcccaccgccctccctccccagctccgcctctgtcctcgctccacgtttcaggcaggcacctagcaattccatcacccgtacaggcaattccgtcttcttaatctgaagcttcactcactgtcaatgattattttcattacaatggaaacaatcttttttactctatgccccaaatatagcgttcccaacaacatccaaa

SEQ ID NO: 353629 - DNA, 498 bp, Homo Sapiens
  misc_feature (3)..(3): n is a, c, g, or t
  misc_feature (14)..(14): n is a, c, g, or t
ccnagttgcgagtnttaaacccccctgtttaaaaggtttgtaaaacaaaaacaaaaaaactaagtctgctcagtgaaatgctgtagaaccctaaataagtggtagaagagtgtcactgaattttgtctctgaattcagtataactgagttttgtccatgctggtgtctgggttataggcctgatgggcctggtagttttccatcttgttctggcctagaggtcagtcctttgcacttcctcaaagcttgtgtacagtgctcacctaaatccatctgactacttgttcctgtgccctcttgttttaggcctcgtttacttttaaaaaatgaaattgttcattgctgggagaagaatgttgtaatttttacttattaaagtcaacttgttaagttttttatgtattcctgttgggttttcttgttgatctcatgctagcagagcaaaaattgtaaaatattttgattaaaaatctagggacctttatgtcctatttgaaa

SEQ ID NO: 353630 - DNA, 627 bp, Homo Sapiens
  misc_feature (596)..(596): n is a, c, g, or t
tgccaggcggtaggcagtgtgttgggcagcccataggtttctcgagccctgtagagaagctgccagtgcggtatggctcccggtatgcttgcctgggtcagattccagggatgtaggtctccatggtccaggaccacgtgagagctcctggagtagtttccatctatttggtacacacggtaacctgcaaggatgtggggctgactggaggggcaaggagcaagggtaactccagggaggggccacacatcctgcccatgctttgcaggctctggctccaacctccttcccctatcccaccaactccaggataagggaggctcccttctgcctcactcaccaggattaaggccgatgtaggtagttgcactgggtgccaggaaggctacagccagcggccggctcagagtctcttcatcatagaagacctcaaattcatccacatgagtgtggccaaagaactgagcagccagggtgttctcatacctggccagaaggtactacattcagaagattctagggaggggtaggaagacatctggggagataggatgccctctttctccaacctgttctagtgaggagcctccccactncatgggacaacagggatggtgagatgctcaa

SEQ ID NO: 353631 - DNA, 1794 bp, Homo Sapiens
aggcggaccctgactgtgcagacccactgtgctgccgccggggttctggcctgccgcccgcatcccggccaggtgccgagtaactggggcgaatacagcaagtgtgacctgcccctgaggaccctggagagcctgttgagtgggctgggcagccggcccttttgatatggtgtactggacaggagacatccccgcacatgatgtctggcaccagactcgtcaggaccaactgcgggccctgaccaccgtcacagcacttgtgaggaagttcctggggccagtgccagtgtaccctgctgtgggtaaccatgaaagcacacctgtcaatagcttccctccccccttcattgagggcaaccactcctcccgctggctctatgaagcgatggccaaggcttgggagccctggctgcctgccgaagccctgcgcaccctcagaattggggggttctatgctctttccccataccccggtctccgcctcatctctctcaatatgaatttttgttcccgtgagaacttctggctcttgatcaactccacggatcccgcagacagctccagtggctggtgggggagcttcaggctgctgaggatcgaggagacaaagtgcatataattggccacattcccccagggcactgtctgaagagctggagctggaattattaccgaattgtagccaggtatgagaacaccctggctgctcagttctttggccacactcatgtggatgaatttgaggtcttctatgatgaagagactctgagccggccgctggctgtagccttcctggcacccagtgcaactacctacatcggccttaatcctggtgagtgaggcagaagggagcctcccttatcctggagttggtgggataggggaaggaggttggagccagagcctgcaaagcatgggcaggatgtgtggcccctccctggagttacccttgctccttgcccctccagtcagccccacatccttgcaggttaccgtgtgtaccaaatagatggaaactactccgggagctctcacgtggtcctggaccatgagacctacatcctgaatctgacccaggcaaacataccgggagccataccgcactggcagcttctctacagggctcgagaaacctatgggctgcccaacacactgcctaccgcctggcacaacctggtatatcgcatgcggggcgacatgcaacttttccagaccttctggtttctctaccataagggccacccaccctcggagccctgtggcacgccctgccgtctggctactctttgtgcccagctctctgcccgtgctgacagccctgctctgtgccgccacctgatgccagatgggagcctcccagaggcccagagcctgtggccaaggccactgttttgctagggccccagggcccacatttgggaaagttcttgatgtaggaaagggtgaaaaagcccaaatgctgctgtggttcaaccaggcaagatcatccggtgaaagaaccagtccctgggccccaaggatgccggggaaacaggaccttctcctttcctggagctggtttagctggatatgggagggggtttggctgcctgtgcccaggagctagactgccttgaggctgctgtcctttcacagccatggagtagaggcctaagttgacactgccctgggcagacaagacaggagctgtcgccccaggcctgtgctgcccagccaggaaccctgtactgctgctgcgacctgatgctgccagtctgttaaaataaagataagagacttggactccagaaaaaa

SEQ ID NO: 353632 - DNA, 1423 bp, Homo Sapiens
cagctgttctagaggattatgatgatgtggacagaggctatttcagtatagaggtcgaatcaaatattcggaacaggtgtatgatgcctgtatggagacatttgactgtcttcctcttgctgccctcttaaaccagcagtttctctgtgtacatggaggaatgtcacctgaaattacttctttagatgacattaggaaattagacaggtttacggaacctcccgcctttggacctgtgtgtgacctgctttggtctgatccctcagaggattatggcaatgagaagaccttggagcactatacccacaacactgtccgagggtgctcttatttctacagttaccctgcagtttgtgaatttttgcagaacaataatttactatcaattatcagagcccatgaagcccaagatgctgggtatcgaatgtacaggaagagccaagccacaggctttccaccacttattacaattttctctgcccccaattacctagatgtctataacaataaagctgctgtgttgaaatatgaaaacaatgtcatgaatatcaggcagtttaactgttctccacacccctactggcttccaaactttatggatgttttcacatggtctttgccttttgtgggggaaaaagtcacagagatgctggtaaatgtgctcaacatatgctctgatgacgaactgatttctgatgatgaagcagaaggaagcactacagttcgtaaggagatcatcaggaataagatcagagccattgggaagatggcacgggtcttttcaattcttcggcaagaaagtgagagtgtgctgactctcaagggcctgactcccacaggcacactccctctgggcgtcctctcaggaggcaagcagactatcgagacagccatcagagggttctcgcttcagcacaagatccggagttttgaagaagcgcgaggtctggaccgaattaatgagcgaatgccaccccgaaaggatagcatacacgctggtgggccaatgaaatctgtaacctcagcacactcacatgctgcgcacaggagcgaccaagggaagaaagcccattcatgacttagagtcctgccgtggctcaggtggatctaaaactcaagaacaaattctatttatttattattggaaaatgaaaagcaactcaaaacaacttcaacctggaggtgcatttataattcagtctgcatttattctgtaaaaaggtgactgttttataaattcttttaatttatgttcaatatatataaaaagtgcatctgttttgtttttcccttttttctccataattttaagaaatgaatctgattgttgtcaacacatttgtgaagtcttgtgctataaaggggaacttcccctaataaaagggccttggaaacctcaaacctgggtttctgacttgaaaaa

SEQ ID NO: 353633 - DNA, 1174 bp, Homo Sapiens
agcgggggtccgctaggacagcggggccgctgggaagttgtgagagcggcgctcgggggcgcgcttgcgtgcacgagggcccgggccgcgagcagccgcggccgtcccggtcgccacccttagcagcggtcgcggtcggtgccgaagcggtgttccccgccttagccgctggcgcctcccaagagagcggccggtgggccctcgtcctgtcagtggcgtcggaggccggcgctgcggtggccgcgcccttctggtgctcggacaccgctgaggagccggggccgggcacggctggctgacggctccgggcagctaaggctgcccgaggagaaggcggcggccgcggcgtaggcgcacgtccggcgggctcctggagcctggaggaggccgaggggaccatgtccgggaggcgcttccacctctccaccaccgaccgcgtcatcaaagctgtcccctttcctccaacccaacggcttactttcaaggaagtatttgagaatgggaaacctaaagttgatgttttaaaaaaccatttggtaaaggaaggacgactggaagaggaagtagccttaaagataatcaatgatggggctgccatcctgaggcaagagaagactatgatagaagtagatgctccaatcacagtatgtggtgatattcatggacaattctttgacctaatgaagttatttgaagttggaggatcacctagtaacacacgctacctctttctgggtgactatgtggacagaggctatttcagtatagagtgtgtgctgtatctatggagcttaaagattaaccatcccaaaacattgtttctgcttcgaggaaatcatgaatgcaggcatcttacagactatttcaccttcaaacaggaatgtcgaatcaaatattcggaacaggtgtatgatgcctgtatggagacatttgactgtcttcctcttgctgccctcttaaaccagcagtttctctgtgtacatggaggaatgtcacctgaaattacttctttagatgacattaggaaattagacaggtttacggaacctcccgcctttgggacctgtgtgtgaacctgctttgggtctgatccctcagaggatttatgggcaatgaagaagaccttgggagcactatacccacaacactgtccgagggtgctcttatttctaca

SEQ ID NO: 353634 - DNA, 633 bp, Homo Sapiens
  misc_feature (633)..(633): n is a, c, g, or t
actgggagggagagaactttctgggggtagggtgccctccatctgaaacaggccaggtgagcatcatgcataaggcctccactctgaccgctcagattctgggtggggccacaggcaaatctcctgacttatggggagttggcttgtggttcctcccttggatagcctccatggaaccactataggctttcccaacagctgcctctgaaatagctgctgcttcgagatcctccctttttaaagcactttctaaagccctcaggatggcgggagcgaacagcactggtatattctaggagtaagtgcaggaattcagcagtgagagcatgtctgggaccacctggactgccatccatttaacctcaaatctctttgggatactcgccctccctgggaaccagagttctggctctaacattgagcagctatgcactagttccagagaagccactaacaggctgccatgtgtagatgtaggttcttaagagatcacaggctgggtcatctgatcactggatggatagctcagcctggggcatttagtgttttccctggtgataaatccccaagacagctggatttggagctggtggcaagttgaaattattaaaaattgatttgtgtgggactgtn

SEQ ID NO: 353635 - DNA, 401 bp, Homo Sapiens
  misc_feature (385)..(385): n is a, c, g, or t
ttcaaatgtaaaaacagcctatttatatatgttgaaacaataagattttatggtttcactggcccttaataattggctccttcattaaacacatccatgaataccactgtttctactgttacttgttccattagaagctgatttgctttttattaaactgcaggaaattaattctgaagaaggaaaagaaactgacatggtaatttggatagggtgaagctttgaaataaatactgcaccaaaaatgtgaaaaagaatcacgtagtaaatgtatacttagtgttttcttacaatcgtggaaatcagaaatgtttatacaggtgtcagatcagaatttttaagagttatctttcagtgaaattttataacagtttcagtgaatagngaaaaattctgactgt

SEQ ID NO: 353636 - DNA, 1108 bp, Homo Sapiens
  misc_feature (1060)..(1060): n is a, c, g, or t
ggaccgaatggattttcacttcaggctttccttcaccaagaataaggttctttctggagcctgcaagaagacagttgcccaacactttgacacttgctagtaggtcctttgatcaagagtgtctgaggctgtcaaatgtgtgccaccctttataatacagctatgaaaagttacttctccattaatttctccattctgtttatatcttacagttggacccaaattccaaattatcagttaatcgaaactacattgcaagtcaacattattttctcttcttcctcagcttctccatgtttaggaactgagaaagaacctgcctaagcagcacttccccatgtcctttcaccttcatgttaacgtcccttctgatggtctcactcttcacaggtagttcacactctgagacttgaagtaagctcatggttcagtactctgggggcgcagggctgcgcaggacccttggaaatgttgcaagtgttactagtaccagtttcactttttgttgtcacaatttactgtattttttactttttctgttacagttttgctaatttatcagaaggtccaaaagtctgacataactatttcattttgcattatttatttatgatgcttttttcattgtcttttatacatttgggattataaattatgtaaatgttaaaatgagcatctcaaagaagtctgttaaatcatgactgaaaaaaatcaatcagatgtatcttcaaaaagtggagtcccagttttatgaatcagagatataaaccagaaattctataactgatcatagaagaagaatccagtaattgaacaaatcctatttaatgacatccttgtagcatagatggtctataatgctgaccacagatttcttagaaatgctgctctctctatttaactaacattttgttcagttttgcctccagtggaagcagaaagggttttttcagctgttaaatcctaaaaatcaatataatttatttatgtaagaaaaataactcaatcaatatatttttgaaccttttaagtactaattttctttttatcaagtagaaanaaaaatgtatttgccctaaatccttaaaatacaaatgctataaaaatt

SEQ ID NO: 353637 - DNA, 1231 bp, Homo Sapiens
  misc_feature (5)..(5): n is a, c, g, or t
  misc_feature (1150)..(1186): n is a, c, g, or t
gtgtnagccactgcacccagcctggcagtcaattttaagcctcctatttcccaggttttagcttaataatcctcattagtttttcagatttttgtcagtcttgttttggggctattttgccttagtgggcctaaacagaatattaaaatacattaataatccatactgagagtagagtataaatgggtttctcactccttagggacacgagtggaaacaatacatcccatgaacacaggtgaatgtccctggttatccctgagctgggcagtttcacacaatcattttttctctgaggccaaagtctgtggtttgatcatcttagcagcttccagaacagaaagtaggtttactttgtctccaaattctttttctcggtgctcaagaagaatgccctgctttcctgatcccaccacgaaaactcccccaaggatgaagccttctccttccaggtttccagagaagcctccgttccaggctcggaagaagttgtaccacactcccagacggataaatcccataaacatcatcttccgcctttgtggaccatagaactttttcttttcatccaggaagatttctcctttgaaataaggctggaaatccttcacttcagtcctgatgtgctcctttaccactgcatagagggggacgcccagctggtccaacatgcttttcagggaggacagatccgcagcttcctctcgacagaggaaacagcctggcctccgcacggccataatcacagctccatttttttcccatagctcctttgctttgaaagtccttggttccttctccagtgttttcaggtctatatcctccaggtactccagggccgctttctggggcttggacagaaacacgtctgtgttggcaagcagcaatgccaaggcagcagcccccagggctcctgcaccaatggaccacatccccatggtgaagaaacttgggtcctcaagtgcctcccttctgccggccttttaccgccccgacgcccgggcgctaaggggccaaaccgcccggcccggagggtcccaggggcgggccccgcgcttgcgcagcctctagcctgtgctgcatcgcgcgctaccgcgccaccgccatgtccgctctcgacgaattcgagctcggccgatttggcctgatnnnnnnnnnnnnnnnnnnnnnnnnnnnnnnnnnnnnncgccgccaccgcggtaaaatccaggtcccctatatgatctatcca

SEQ ID NO: 353638 - DNA, 1666 bp, Homo Sapiens
  misc_feature (10)..(10): n is a, c, g, or t
  misc_feature (16)..(16): n is a, c, g, or t
  misc_feature (35)..(36): n is a, c, g, or t
  misc_feature (40)..(40): n is a, c, g, or t
  misc_feature (49)..(49): n is a, c, g, or t
  misc_feature (53)..(53): n is a, c, g, or t
  misc_feature (59)..(59): n is a, c, g, or t
  misc_feature (63)..(63): n is a, c, g, or t
  misc_feature (71)..(72): n is a, c, g, or t
  misc_feature (87)..(87): n is a, c, g, or t
  misc_feature (94)..(94): n is a, c, g, or t
  misc_feature (102)..(102): n is a, c, g, or t
  misc_feature (104)..(104): n is a, c, g, or t
  misc_feature (106)..(106): n is a, c, g, or t
  misc_feature (126)..(126): n is a, c, g, or t
  misc_feature (129)..(129): n is a, c, g, or t
  misc_feature (134)..(134): n is a, c, g, or t
  misc_feature (141)..(141): n is a, c, g, or t
  misc_feature (151)..(151): n is a, c, g, or t
  misc_feature (153)..(153): n is a, c, g, or t
  misc_feature (157)..(157): n is a, c, g, or t
  misc_feature (159)..(159): n is a, c, g, or t
  misc_feature (178)..(178): n is a, c, g, or t
  misc_feature (186)..(186): n is a, c, g, or t
  misc_feature (192)..(192): n is a, c, g, or t
  misc_feature (198)..(198): n is a, c, g, or t
  misc_feature (222)..(222): n is a, c, g, or t
  misc_feature (239)..(239): n is a, c, g, or t
  misc_feature (247)..(247): n is a, c, g, or t
  misc_feature (251)..(252): n is a, c, g, or t
  misc_feature (260)..(260): n is a, c, g, or t
  misc_feature (268)..(268): n is a, c, g, or t
  misc_feature (274)..(274): n is a, c, g, or t
  misc_feature (285)..(285): n is a, c, g, or t
  misc_feature (290)..(291): n is a, c, g, or t
  misc_feature (302)..(302): n is a, c, g, or t
  misc_feature (314)..(314): n is a, c, g, or t
  misc_feature (326)..(326): n is a, c, g, or t
  misc_feature (328)..(328): n is a, c, g, or t
  misc_feature (343)..(343): n is a, c, g, or t
  misc_feature (347)..(347): n is a, c, g, or t
  misc_feature (350)..(350): n is a, c, g, or t
  misc_feature (359)..(359): n is a, c, g, or t
  misc_feature (365)..(365): n is a, c, g, or t
  misc_feature (371)..(371): n is a, c, g, or t
  misc_feature (374)..(374): n is a, c, g, or t
  misc_feature (381)..(381): n is a, c, g, or t
  misc_feature (384)..(384): n is a, c, g, or t
  misc_feature (389)..(390): n is a, c, g, or t
  misc_feature (406)..(406): n is a, c, g, or t
  misc_feature (414)..(414): n is a, c, g, or t
  misc_feature (424)..(424): n is a, c, g, or t
  misc_feature (428)..(428): n is a, c, g, or t
  misc_feature (438)..(438): n is a, c, g, or t
  misc_feature (466)..(466): n is a, c, g, or t
  misc_feature (478)..(478): n is a, c, g, or t
  misc_feature (485)..(486): n is a, c, g, or t
  misc_feature (491)..(491): n is a, c, g, or t
  misc_feature (493)..(493): n is a, c, g, or t
  misc_feature (500)..(500): n is a, c, g, or t
  misc_feature (504)..(505): n is a, c, g, or t
  misc_feature (515)..(515): n is a, c, g, or t
  misc_feature (526)..(526): n is a, c, g, or t
  misc_feature (528)..(528): n is a, c, g, or t
  misc_feature (536)..(536): n is a, c, g, or t
  misc_feature (552)..(553): n is a, c, g, or t
  misc_feature (559)..(559): n is a, c, g, or t
  misc_feature (614)..(628): n is a, c, g, or t
  misc_feature (633)..(754): n is a, c, g, or t
  misc_feature (759)..(759): n is a, c, g, or t
  misc_feature (763)..(764): n is a, c, g, or t
  misc_feature (767)..(767): n is a, c, g, or t
  misc_feature (772)..(787): n is a, c, g, or t
  misc_feature (789)..(789): n is a, c, g, or t
  misc_feature (1156)..(1156): n is a, c, g, or t
  misc_feature (1389)..(1414): n is a, c, g, or t
cctgaacggngctctntgaaacctgaaagagaagnntcanccttggggntttncgtggnggancaggaaannagggcattcttcttnagcaccnagaaaaanantnggagacaaagtaaacctacnttntgttntggaagntgctaagatnanaaancnacagactttggcctcaganaaaaaatnattgtntgaaantgcccagctcagggataaccaggnacattcacctgttttcntgggatgngatnntttccacncgtgaccncaaagnagtgagaaacnccatnnaatactcaacnctcaagtatggnattatttaatcntnttttaaatatttctntttnagnccctactanaggcanaaatanccnccaaaancangactnncaaaaaatctgaaaantctaattnaggatttatntaanctaaaaactntgggaaaataggaggacttacaaatttnacttggccaggnctgggtnnaagtngnttcacancctnnaataccacancacttttgggngntccaaggntgagtcaagatcactnngagcgncgggagtttcgagatccagacgcagagacaacatggcgaaacaccccccactacnnnnnnnnnnnnnnncaccnnnnnnnnnnnnnnnnnnnnnnnnnnnnnnnnnnnnnnnnnnnnnnnnnnnnnnnnnnnnnnnnnnnnnnnnnnnnnnnnnnnnnnnnnnnnnnnnnnnnnnnnnnnnnnnnnnnnnnnnnnggacngagnnccnaactnnnnnnnnnnnnnnnngnaattgattgctgtgcctcattacaaatgcatatgatgtttgagtgctgttgtttgaaattatttttcttttcgggtcttcaaaaattcaagaaaagttgatgattgacttgaagattacaaaatttaaggttttttggcatgtgtgttttctattaataattggttatatgatgtcaaagtaatactttcataatagaattgacatgctctgggatagtttgacaaaggtaaattataaagtgaaatctcttgtttcattatcttccattctaacctcagagatctgtttctctagaaaaaatgtccatctctggctttaataaaattatgcatcctccgccccgcgccccgacatccaccacaaangtttggttggccgccctcggcccttcaagaaagctttctaaaaccattcgttttgggcggcgcggggccccacgaaggttaaggtggacccgtgggccataggcctggtttccctaggggagaatccgtgggcccatgggacctacgggcctttgggatctctccgcccgatataaaaaaaccgccccgcgggggggaaacccgaaacgggttccctggaacagaaattcccnnnnnnnnnnnnnnnnnnnnnnnnnncccttctcctgggggttcttaacacatacgaggggagtccgcagtagcgcacggcctcgcgagttattcacacgctggccgccccccccgtctcctgggcaaacaccccctttccgcgcgatgtgcggggcgggcgggagattcaccgtcgcggaggccggtcctcgcgcccgctacaccttcggacacacgcccctcctcatacccataaacccggcgcgcggagtcggtaaaccccgccgcgacgcacgg

SEQ ID NO: 353639 - DNA, 1105 bp, Homo Sapiens
  misc_feature (1096)..(1096): n is a, c, g, or t
agcggatggcggtggcgcggtagcgcgcgatgcagcacaggctagaggctgcgcaagcgcggggcccgcccctgggaccctccgggccgggcggtttggccccttagcgcccgggcgtcggggcggtaaaaggccggcagaagggaggcacttgagaaatgtctttcctccaggacccaagtttcttcaccatggggatgtggtccattggtgcaggagccctgggggctgctgccttggcattgctgcttgccaacacagacgtgtttctgtccaagccccagaaagcggccctggagtacctggaggatatagacctgaaaacactggagaaggaaccaaggactttcaaagcaaaggagctatgggaaaaaaatggagctgtgattatggccgtgcggaggccaggctgtttcctctgtcgagaggaagctgcggatctgtcctccctgaaaagcatgttggaccagctgggcgtccccctctatgcagtggtaaaggagcacatcaggactgaagtgaaggatttccagccttatttcaaaggagaaatcttcctggatgaaaagaaaaagttctatggtccacaaaggcggaagatgatgtttatgggatttatccgtctgggagtgtggtacaacttcttccgagcctggaacggaggcttctctggaaacctggaaggagaaggcttcatccttgggggagttttcgtggtgggatcaggaaagcagggcattcttcttgagcaccgagaaaaagaatttggagacaaagtaaacctactttctgttctggaagctgctaagatgatcaaaccacagactttggcctcagagaaaaaatgattgtgtgaaactgcccagctcagggataaccagggacattcacctgtgttcatgggatgtattgtttccactcgtgtccctaaggagtgagaaacccatttatactctactctcagtatggattattaatgtattttaatattctgtttaggcccactaaggcaaaatagccccaaacaagactgacaaaatctgaaaaactaatgaggattataagctaaacctgggaaataggaggcttaaaattnactgccagg

SEQ ID NO: 353640 - DNA, 1460 bp, Homo Sapiens
  misc_feature (155)..(162): n is a, c, g, or t
  misc_feature (164)..(166): n is a, c, g, or t
  misc_feature (168)..(170): n is a, c, g, or t
  misc_feature (182)..(449): n is a, c, g, or t
ggaaacccccgctgcccaaaaaaccttaaattttggtatttttcaagtcaatcatcaacttttcttgaatttttgaggacccgaaaagaaaaataatttcaaacaacagcactcaaacatcatatgcatttgtaatgaggcccagcaatcaattnnnnnnnntnnntnnntagttaagagtnnnnnnnnnnnnnnnnnnnnnnnnnnnnnnnnnnnnnnnnnnnnnnnnnnnnnnnnnnnnnnnnnnnnnnnnnnnnnnnnnnnnnnnnnnnnnnnnnnnnnnnnnnnnnnnnnnnnnnnnnnnnnnnnnnnnnnnnnnnnnnnnnnnnnnnnnnnnnnnnnnnnnnnnnnnnnnnnnnnnnnnnnnnnnnnnnnnnnnnnnnnnnnnnnnnnnnnnnnnnnnnnnnnnnnnnnnnnnnnnnnnnnnnnnnnnnnnnnnnnnnnnnnnntggcagtcaattttaagcctcctatttcccaggttttagcttaataatcctcattagtttttcagatttttgtcagtcttgttttggggctattttgccttagtgggcctaaacagaatattaaaatacattaataatccatactgagagtagagtataaatgggttttctcacttccctagggaccacgagtggaaaccaatacatcccatgaacacagggtgaaggtccctggttatccctgagctgggcagtttcacacaatcattttttctctgaggccaaagtctgtggtttgatcatcttagcagcttccagaacagaaagtaggtttactttgtctccaaattctttttctcggtgctcaagaagaatgccctgctttcctgatcccaccacgaaaactcccccaaggatgaagccttctccttccaggtttccagagaagcctccgttccaggctcggaagaagttgtaccacactcccagacggataaatcccataaacatcatcttccgcctttgtggaccatagaactttttcttttcatccaggaagatttctcctttgaaataaggctggaaatccttcacttcagtcctgatgtgctcctttaccactgcatagagggggacgcccagctggtccaacatgcttttcagggaggacagatccgcagcttcctctcgacagaggaaacagcctggcctccgcacggccataatcacagctccatttttttcccatagctcctttgctttgaaagtccttggttccttctccagtgttttcaggtctatatcctccaggtactccagggccgctttctggggcttggacagaaacacgtctgtgttggcaagcagcaatgccaaggcagcagcccccagggctcctgcaccaatggaccacatccccatggtgaagaaacttgggtcctggaggaaagacatttcatacacagcgtccacacctctgcttctccctcgtgccgaattcgccacccaggc

SEQ ID NO: 353641 - DNA, 830 bp, Homo Sapiens
taaccaacagggggaaatgtcccctgggtttttcccttgaggctggggcagttttcaacacaatccatttttttcctctgaaggcccaaaggtccgggggtttggatcattcttaggcagctttccagaaccagaaaagtagggtttacctttgtctccaaaattctttttcttcggtggctcaagaagaaatgcccctgctttccttgatcccaccacgaaaaactcccccaaaggatgaagccttctccttccaggtttccagagaagcctccgttccaggctcggaagaagttgtaccacactcccagacggataaatcccataaacatcatcttccgcctttgtggaccatagaactttttcttttcatccaggaagatttctcctttgaaataaggctggaaatccttcacttcagtcctgatgtgctcctttaccactgcatagagggggacgcccagctggtccaacatgcttttcagggaggacagatccgcagcttcctctcgacagaggaaacagcctggcctccgcacggccataatcacagctccatttttttcccatagctcctttgctttgaaagtccttggttccttctccagtgttttcaggtctatatcctccaggtactccagggccgctttctggggcttggacagaaacacgtctgtgttggcaagcagcaatgccaaggcagcagcccccagggctcctgcaccaatggaccacatccccatggtgaagaaacttgggtcctggaggaaagacatttctcaagtgcctcccttctgccggccttttaccgccccgacgccccacccccc

SEQ ID NO: 353642 - DNA, 637 bp, Homo Sapiens
ggcctgggtggcgaattcggcacgagggaagcagaggtgtggacgctgtgtatggacccaagtttcttcaccatggggatgtggtccattggtgcaggagccctgggggctgctgccttggcattgctgcttgccaacacagacgtgtttctgtccaagccccagaaagcggccctggagtacctggaggatatagacctgaaaacactggagaaggaaccaaggactttcaaagcaaaggagctatgggaaaaaaatggagctgtgattatggccgtgcggaggccaggctgtttcctctgtcgagaggaagctgcggatctgtcctccctgaaaagcatgttggaccagctgggcgtccccctctatgcagtggtaaaggagcacatcaggactgaagtgaaggatttccagccttatttcaaaggagaaatcttcctggatgaaaagaaaaagttctatggtccacaaaggcggaagatgatgtttatgggatttatccgtctgggagtgtggtacaacttcttccgagcctggaacggaggcttctctggaaacctggaaggagaaggcttcatccttgggggagttatcgtggggggatcagggaaagcagggcatttcttcctgagcaccg

SEQ ID NO: 353643 - DNA, 2499 bp, Homo Sapiens
  misc_feature (1756)..(1756): n is a, c, g, or t
ttagcgggatcgccgcccgctagtccgccgcccggcgccatggcgggctgcgcggtcgcgggctccgccgggctctgaggcgcgtctcagcctcgccaccttcctgctgggcgcctcggtgctcgcgctgccgctgctcactgcgcgccggcctgcagggccgcaccgggctggcgctctacgtggccgggctcaacgcgctgctgctgctgctctatcggccgcctcgctaccagatatgccatccgagcttgtttcctggggtttgtgttcggctgcggcacgctgctaagttttagccagtcttcttggagtcactttggctggtacatgtgctccctgtcattgttccactattctgaatacttggtgacagcagtcaataatcccaaaagtctgtccttggattcctttctcctgaatcacagcctggagtatacagtagctgctctttcttcttggttagagttcacacttgaaaatatcttttggccagaactgaagcagattacctggctcagtgtcacagggctgctgatggtggtcttcggagaatgtctgaggaacggcggccatgtttacagctggctccaatttcaaccacgtggtacagaatgaaaaatcagatacacatactctggtgaccagtggagtgtacgctttggtttcggcatccttcttacgtcgggtggttttactggagtattggaactcaggtgatgctgtgtaaccccatctgcggcgtcagctatgccctgacagtgtggcgattcttccgcgatcgaacagaagaagaagaaatctcactaattcacctttttggagaggagtacctggagtataagaagagggtgcccacgggcctgcctttcataaagggggtcaaggtggacctgtgacgggcagtggccccggtgaccttggggcctccgaccctgtgcagcctgagacaaaactgttttccggttggccgctgccacatggattttcttaatcgttttatgtcattagtcactcttctggaatgtcactcaagaccaagcggtcagaaggcctgaggacccaaggccccactggagcagtctgtccttatgccgaatcaaggcggaacatgggtgaaagacgagtaaggggcaaatcacagcaatattccacagcgccctccagagttacctggggaggaccgaggccacacgccactgcccccgaggccagagtgtaagtaaaggataaccaggactcgctgggagagatggactctgtcctcagcaacactccacagcagaaaggggtagcaggtaccccttcttatcagcggtaaaaatgcatttacaacctttcatttaaccgaaaaacacagaccgctttaacctctttatttctgtcccccactgcatgaacatctatacaattttaaaaatacttcctcataggatgctttggcccttcatctatttaatcatagctacatacctattttttataagtagcagtacacattcaaaggggtattcctagctcaatgcttggtgttctagttcaacttttatcctgcagcaagtaagcctagataactctacacgatttggctgagtggctttgtgtgaccgtggccccaggccaaggggatcatggccctggctggctttcccgggggtctcagctcctgttgtcagtgataggcggctcaaaggagcatcagtttcttttgatccaagaagtgcttactgaatgcctgccctgtgcgtggccttanacattgagaagtgctgctctccgtttatttgggatttgattctcattttaccatagcttatattctcaatttcaatgccagtctcagaactcttgttttctgtgttctgttctcaaaattacattgtccctcatgtcatttcaaactgttttccaaagggatttgagcatatacaactacaaatccaagcagattgactctcaaaaataatcttaaatactgcaaatagtcccaactaagattcagtcagtatgtttgttttgcaagtttgggagagtaagttggctttgagtcacacatcgaagctttaagaggtgagacgctggcttcattctggactagacaggaacttggcctcagcgtgagatcctgccatgcagtgttgcggtggcactgaagaagtgtgaatgtgaaggcggcgtcggcgcggggccagagcaccactctgctgccccaccacgcggcctgtgaggagccactaaacctttccgtgcctagacctccccatctgtggaatggggtcaataccacctacctcacaggggtgttgtgaggactgagaagaacaatgtcaaatgtttttaatactcagatgtgggagcgacatcaatgaaatctgtactgtatgaaagctacacaaaaatgggcagacatttggttaattgtgccagatacctaaaatgtatgttcagaaaagcattttatcaactcagaaatatgacttatttctagatttcaaaaaa

SEQ ID NO: 353644 - DNA, 509 bp, Homo Sapiens
gatccataacaacctggcagtagggtaccaccggtgaaccaccatatccttaaagtatagcatcaatgggtatggaagtgggatttgaaattacagataatccctggctccttccctgttattatgttacctcccaccagttaatctctgaagtaaaattttctcacctgaaaaataatactcgctaaaaattgttacaatgaggacatgagaatatatgcaaactaacactgggtctaatgcaaagaaatactctatataccacagtaatatcactctcatgatatattttatttatatgactctcttctcctctccaagaattaagtacttcttaaaaatcaaatcttgaaaaatgtagtctttttgttttgtccttttttctaagcagattatagcaacaagactggcatacatatttttaaaatttcagatgatgcaatattaataagtgatcccatccataaatttataactttaattatttaaaaattcatttatagacaatg

SEQ ID NO: 353645 - DNA, 312 bp, Homo Sapiens
aactaaaactacagaatctatttttcttggtctcatactcagttttttatgtagtcacttagtaaataacctaatttgcttgttttctccacactaattttagggtgaattcctcatttcgcttttcagatcatggggtgagggggatggttgtgtgtgtgaggaactgaggaatcagatggaaaacaatgcctctgctcctttgagtataatcagtgatatttgaggttccagggttaaatgctgcatttttatttctgacgttcgtaccttaaaatatttgaagaaaataaactatttcattgttgtcag

SEQ ID NO: 353646 - DNA, 101 bp, Homo Sapiens
  misc_feature (99)..(99): n is a, c, g, or t
aaaagtgtcaaaagtctacatttaaatataaaaaattaaaagttaaaactctagcccttcagtgaaggagacgtaaaatggcgtgggtaacaacaactncc

SEQ ID NO: 353647 - DNA, 1852 bp, Homo Sapiens
  misc_feature (1213)..(1221): n is a, c, g, or t
  misc_feature (1323)..(1332): n is a, c, g, or t
  misc_feature (1343)..(1361): n is a, c, g, or t
  misc_feature (1544)..(1593): n is a, c, g, or t
  misc_feature (1597)..(1618): n is a, c, g, or t
  misc_feature (1797)..(1807): n is a, c, g, or t
gctcttttcagaaaaactcctcaaaattcaagataaagccattcaagctgtcttaaggagtttatgtctgctgtattctctgtatggaatcagtcagaacgcgggggatttccttcaggggagcatcatgacagagcctcagattacacaagtaaaccagcgtgtaaaggagttactcactctgattcgctcagatgctgttgctttggttgatgcatttgattttcaggatgtgacacttggctctgtgcttggccgctatgatgggaatgtgtatgaaaacttgtttgagtgggctaagaactccccactgaacaaagcagaggtccacgaatcttacaagcacctgaagtcactgcagtccaagctctgaagtgtcacaaggacaagtttaatctgcttcagaaagcgcctgtgtgcaactcaaattttgtggaatctttttcgaattcaaatagctatagagcaaatgataaattgacccctttttataaatggagggaaaaaatgaacagatttcagagattaaatgaaaaaaagcagatgttttaagtgcaattaacactgaaagagacctgttaaaccattcagaaaaagcttaagaaatgcgatatgacttccttttgtaatgctgctgatcccagtagactatgacttttgataattagcagaatttaactactgagtagttgattattttcacattttaattgctaatcactggctatataagtgtttttaagcaaaggtatttttgaagtggtgtagaacccttccaagctttcctgctcagtgttctaccagacttaccctggggcctggcttaaaagcaggattgaagaaaagggactgggggaaggaaacttattggaaaacttgatgcgaatgagtttctgcttggcacagtctctgcctgcttgctctcctttgctgatggattgcatttatcaaactattcatgctagcatttttccaacgagggaacttattccgcacgggcctactgtaggaccattgtctcgtgtaattaggaattttccatttgaaggatcgctaaattgtcacagtagtaggaagtatagggaaacctctcagctgtggcactgttgtagctttggagtgcagagtgtaactctgggacaatcagatttcacatattctgtcatcttggcataagccattaaaagcttggagattactgtatttggcattnnnnnnnnntgtcacttaggtcagcactcccagacgtagcacagaaaaaccctttgacacaaaccatgtgttctgatttttggttcagaaaatattgaaactgtgagttgnnnnnnnnnnaacaactgggnnnnnnnnnnnnnnnnnnnctatagttagaaaaatggaagttccataggttctatttcttactctatgtatggctttgttttcagtctatttctaggagctttctctgaatcgctaattgtcctttcagttgaaatctaatttatacaatcattctatacttaaaggttaaatacatcttaattaattttttcttaaagtcnnnnnnnnnnnnnnnnnnnnnnnnnnnnnnnnnnnnnnnnnnnnnnnnnncccnnnnnnnnnnnnnnnnnnnnnnggggggggcccttttaaaattccccccggggggcccaagttttaccggaacccattttttttgaaaaaaggggcccctaaagggggccctattaaaaattgggcccgggccccctttttaaacacccgggagggggaaaacgtctactttgggaattttggggaaggaaccctacttcnnnnnnnnnnnacaatttgggacactccccccacagaattttaagccctctagggg

SEQ ID NO: 353648 - DNA, 1315 bp, Homo Sapiens
  misc_feature (705)..(727): n is a, c, g, or t
tgatagaatttattttggataacatttgtattcagcatgctaatgatgtaactcctctctttatcattaccacggtgatagttaagtgcattcgttaactcattttagtgacatgtgaggccatttaaatatttttaagataatgtatattgattagaaagggttagaaggagacaaatttatggtagaaattagccttgccattgtctaagttaatttatgtgacctgattgaacagttttagttgtaactttagagtagcttctttgttagaggatctctttcctttctcttttggttttctcccaatatttttatctgtcttgggattatcttaaaaggtatttattaatgagtattttggaagaaaaatgacctagaaaatgtctcctttaaatttatctaggtacttgtatcaccagagaccttcatcaagtcctactgccacactggataaggccactacccccgacccttcttgtcagggacatggcttcctaataatggttttgctgttgtctctacataggggacctatggaaaaggagtttgaaatttctacctttgtagtacattgtatccaattttgttttgctcctccttttcatgtggtcaccaagcttttttccttagccattaaaaaagccacccctctttaaaacaaatttaaagatctatatacatttttgcaactttatttaatannnnnnnnnnnnnnnnnnnnnnntctaaatctcaattaccctaaagtggaaaaacctaagtatctaacctaggaacttgttgcctggtggtggttgtgttgtagtagtattattaatttatttagtgttgatccttgagttatttaatggtatccaaatgatatctgaaagtgattgattttaagatgtaatagttggcaaagtcatttcatttgtgtctcaaagcaaataaagcccactgccatgggttaccatctgaaccctgattcatataggcactagtcatgccaaatggggatctcagaatagtttaatctttgtcaaagatactcacaatggccaactgtgtgtgaatactggaaagtttgagattcttctatattcttcacaatttatggtcctgagactacggagggatctaccagaggtcatatggctcatcgatctaccacaggggaagaactgtccactacggccatggcccaacaaggaaagagtcgccagtctatgcttcaacctctccagggaaggcagatccctgggcaaacaatcagccctcccaggtacctcacaagaagacacaatcacggccagcatgaggtaagccccgg

SEQ ID NO: 353649 - DNA, 541 bp, Homo Sapiens
  misc_feature (15)..(15): n is a, c, g, or t
  misc_feature (453)..(486): n is a, c, g, or t
catgcctaaagtgancagtccttccctggtggtagatcgatgagcccatatgaacctctggagatcccctccctagtcctcaggacccataaatttgaagaatatagaagaatcctcaaactttcccagtattcacacacagttggccattgtgagtatctttgaaaagattaaactattctgagatccccatttggcatgactagtgcctaatgaatcagggttcagatggtaacccatggcagtgggctttatttgtttgagacacaaatgaaatgactttgccaactattacatcttaaaatcaatcactttcagatatcatttggataccattaaataactcaaggatcaacactaaataaattaaaaaacaacaacaacaacaaccaccaccaggcaacaagttcctaggttagatacttaggtttttccactttagggtaattgagnnnnnnnnnnnnnnnnnnnnnnnnnnnnnnnnnnaataaagttgcaaaaatgtatatagatctttaaatttgttttaaagaggggtggc

SEQ ID NO: 353650 - DNA, 550 bp, Homo Sapiens
  misc_feature (47)..(71): n is a, c, g, or t
gacatctaagcttcttctaaggggggagggaaaggggggagattttnnnnnnnnnnnnnnnnnnnnnnnnncaagttttaaattatggatagttcatctggattaccaaaaatcactctgcagccctgcccgaggctagtaggctgcaaccctggtccccacccctaacctcctgctccccctcaagccaactatgcagccccacaaaggacctgcgggcccccccattgcccagcactgtctcatagaaggctctggtggtacctctgggccccaggagcatcagccccttgatcatctggggtttgtcatcaccatattttctccctgctgttcccaccatgcccttctgccatcttctgggagaaggaaaccaaaggatctaaaactggggtttgggggaaggtttcagcctctccccactccccttgccccacaccctttactccccagcccagagagacgctgcttttaccaggaaagactattgaaagatgttttattttatttttctctgacctttccatccttgaaaaaatggggaaaaaag

SEQ ID NO: 353651 - DNA, 351 bp, Homo Sapiens
  misc_feature (104)..(104): n is a, c, g, or t
gagttgggggctggggggaatccttgccagttggtgaagccctgtggcaggaaggtatatgtggacataggagtatacctgaatctctttcttcagccactganctgcttgggttgggctgtgaatgataatggaatggctggagtctgctgttcccaccatgcccttctgccatcttctgggagaaggaaaccaaaggatctaaaactggggtttgggggaaggtttcagcctctccccactccccttgccccacaccctttactccccagcccagagagacgctgcttttaccaggaaagactattgaaagatgttttattttatttttctctgacctttccatccttg

SEQ ID NO: 353652 - DNA, 1706 bp, Homo Sapiens
  misc_feature (911)..(935): n is a, c, g, or t
gctggaccggtccggaattctttccatgtatcgtaggcgctgccttaatgagcggaaacgcttgggcattggccagtctcaggagatgaacacactcttccgcttctggtccttcttcctccgagatcacttcaacaaaaagatgtatgaggagttcaagcagctggctctggaggacgccaaagaaggctacagatatggtttggagtgcctttttcgatactacagttatggcctggaaaagaagttccggctggacatattcaaggattttcaggaggaaacggtgaaggactatgaagctggccaactgtatgggctggagaagttctgggccttcttgaaatattccaaagccaaaaatttggacattgaccccaaactgcaagaatacctcggcaaattccgacgtcttgaagacttccgagtagatccccccatgggtgaggagggcaaccacaagcgacactcagtggtagcaggaggtggcggcggtgagggcaggaagcggtgcccctcccagtcttccagcaggcctgctgccatgatcagccaaccccctacaccacccaccggccagcctgtccgggaagatgccaaatggacaagccagcactcgaacacacagactttgggaaagtgaaaagctccttagccctggggctttgaggggggaaaggggtagggtgggtaagagtccatgggggtgcccagtcccaggagaggggacaatgaagggacaggcctggagttactaggacaggcctttgtgctgagtagcaatgtatacaccatttgggctatcagaggtacccctgggcaggagcctctacatccccttccccctcctctctccatgactcttgacatcctagcttcttctaaggggggagggaaaggggggagatttnnnnnnnnnnnnnnnnnnnnnnnnncaagtttaaattattgatagttcatctggattaccaaaatcactctgcagccctgcccgaggctagtaggctgcaaccctggtccccacaccctaacctcctgctccccctcaagccaactatgcagcccacaagaaggccctggggccccccccattgcccagcactgtctcatagaaggctctggtggtacctctgggcccaggagcatcagccccttgatcatctggggttgtcatcaccatatatactcccctggctgtacccaccatgcccttctgccatcttctgggagaaggaaaccacaggatctaaaacttggggtcgcgggaaggttcagctctccccaatcccccctgaccacaaaagcccatttagttacacagccagaagagacgctgctttaccaggaatgactattgacggagtcattcagatagtacatagacactttaaatccattgaaaaaatgggggacaaagaagcaacaaacgacaaagagcgaccatataagacccaaaacaagaaaaaggagggacgcacagaagataaccaagatgggcaacagcacgtacaagcaatggaaaagggaccatacgagaaagaaaaagcgacagcgcaaaaaaagagagagaaatgaaaaagcaggagacaaatggagggaacgacaaacaaggagagccgaaccaagagaatgacaagaacgagaagagcgatacaacacgagagcaacaacaaacaacaaaaagacacacacccccgcacccggct

SEQ ID NO: 353653 - DNA, 1000 bp, Homo Sapiens
  misc_feature (175)..(224): n is a, c, g, or t
caggttctgggattcccccatggaaacaatgttaggttgaaagtgtttagccctaagggccccctgccatttttgggcatgcttgtcacagatacatgggttcctaaagtcaagtgtcttcagaagtggaagatgtaaattactctttgcaacattaactcttaacatgttcccnnnnnnnnnnnnnnnnnnnnnnnnnnnnnnnnnnnnnnnnnnnnnnnnnnctcccctaccaaccaccagccgatgttgagatgaagtcctcacctccctgccccaaaggggcttcctttcagggatgtctgtgaagaagatggcagccccctggcctgggagtaaactctaggtaataacagcctttccccataccctaaggcttccttgtgccccaaaccagcagaggaaaaacacctgaggtttctgtggtgctggatacagtacagggctgcgtgacctgaaggaaagaaaggaaaggagaagggggtccaggaatccagtgtccggtacaatgtggggcaggcaccagactgggcagggaaaggcctcggataccaccatcatagcagagaccagacgctcatccttggtttgagacatgaagtcacaggaactgagatgggcttcccacataccaaccactgggagggcaaaggtggggaagggcacaggctaaaaattaacaaggtgcccaaggtaaagggcaagcccttgtcagcctgggatactgtctcctactcccaacctttgggcccaaccagaggaaccagttgaaaaggagggccaaagacattgcagtaagtaagcaacaggacaatgaactccatgttgcccagatcccactgagagtgaacgtgcagtcatgcccataaccgacacacatcccagtccatgtgggtcagtccttcatcaccctccctgccttctgacaacagcagactccagccattccattatcgtacacagcccaacccaagcagttttggaaaattcggaccggtcc

SEQ ID NO: 353654 - DNA, 1790 bp, Homo Sapiens
  misc_feature (485)..(533): n is a, c, g, or t
  misc_feature (988)..(1002): n is a, c, g, or t
ggcctgggtggcgaattcggcacgagggttaatttttagcctgtgcccttccccacctttgccctcccagtggttggtatgtgggaagcccatctcagttcctgtgacttcatgtctcaaaccaaggatgagcgtctggtctctgctatgatggtggtatccgaggcctttccctgcccagtctggtgcctgccccacattgtaccggacactggattcctggacccccttctcctttcctttctttccttcaggtcacgcagccctgtactgtatccagcaccacagaaacctcagtgtttttcctctgctggtttggggcacaaggaagccttagggtatggggaaaggctgttattacctagagtttactcccaggccagggggctgccatcttcttcacagacatccctgaaaggaagcccctttggggcagggaggtgaggacttcatctcaacatcggctggtggttggtaggggagcnnnnnnnnnnnnnnnnnnnnnnnnnnnnnnnnnnnnnnnnnnnnnnnnnggtaacatgttaggagttaatgttgcaaagagtagtttacatcttcactttctgaagacacttgaatttaggaccgatgtatctgtgacaagcatgccagaagtggcaggggccatcagggctaaccacttcacacctaccatcgtcccatggggatccaagacctgagataaagcaacagcctgcccagatccctctgttcatcctatcccttccaaggttggtccatgccaacataacctctgggcatcagacatcagcaggtctgtgtgcctcagccctgttaaggggcaggtttctctttagccctcttcctgcacttgggagcaaaggcactaccagtagagaagggccatccagccgtgccccagcctggacccctggggctcagatagaggtgctgagcccctgtgtcaaagttgttaaatgtttttgttttgttccattgtagctcnnnnnnnnnnnnnnncccctttcctggtgattgattttacaaaagaaagtaagctgcttagaaggccctggaagggaagtgaggaggagggacaaggaagatgactagttacggagggtgagggttgttttttgccaaaaagcctgggtagagtgatctgaattatctggcaccctcctgaatggaaccccagagtacctcctgtgtggaagggtccctggattttccctaacacccaccctctcccccttcagccatgctgatggcagagaagataagaacttggagcccatttctcactggagaggaaaacttgtcatctggctttgcggagaaggttccaccttacgctcgtagtacattatctttactatgtgctaggatatcatatttaaaaggacaaaaaaatgtaaaatacttgaatgagcttgtattataacattaatattattgagagtatctgctttccaggctgaagtgattcattcattattctagtcctgctttagtcctttgtaatttgtggtaattatgcttttctttttaatacaaaaaaatgtataaaaataaacacttgaaaaggcctaccggccaaaaccccatcgctcctccccccatgccggccgccctcggccctcgaaaaagtttctacaccccttcgtttggagcgggggcccccgtaagtaaagcgaacctgggccatagttgctctcccaaggagaacctggtccatgaaataggggcttgggcatcccccccaaataaaataaaccgccccgggaggccacaccgagcgggttttg

SEQ ID NO: 353655 - DNA, 1849 bp, Homo Sapiens
  misc_feature (49)..(85): n is a, c, g, or t
  misc_feature (126)..(134): n is a, c, g, or t
  misc_feature (158)..(173): n is a, c, g, or t
  misc_feature (1772)..(1781): n is a, c, g, or t
cgaatgttcgactcactatgggcgactcgggctcacgcggtggcggcgnnnnnnnnnnnnnnnnnnnnnnnnnnnnnnnnnnnnnatcaggccaaatcggccgagctcgaattcgtcgagagcggnnnnnnnnngacaaaatcgaccataaaagaccnnnnnnnnnnnnnnnnttcagaaaacccccacctaatccacagaaagtaatgtctttcccctccccttggaattttggtttggttttgggaaataatatttttttaaaagttggccttattggtggagcgggaatctgaaatacccaaatgcctgttttcctcggtggagtcaacccgaagagctcccaccttctctggatgtgcctgggcttggactgggctagaatctttctctggactgttgcatgtacggtgcctccatcctggaggcaagagagttgggagtggctcgaatcagagccgtgcccaagatatccctgctgttgcatcgtttgaagctgacgtcctgtgtctgtacactgctgccactgttgtgtcctcgctctgcttgctgttgcctcacgccaggccccgtcctgccatgacacccttcatcctacccttggaaccccaaggccaagttgggttcaaactgtgggagaacagagttggcctgcatctggaacacacttgtcctcagcttaccatctcctcaaaccccagagtggaacggtgaacacctgcagctgaggcttggaaacgtttcttgtgttgccctgaaaaatctttgagacctcagggaggctctgtctctcttaaaaggtggagaaagatgccattctctccctaaggtctggtggagtctccccatcttgcatacccttctggaagccatctatttctctcaccctccaattgacccgcctgggaacaagggatgaggaggagttgggggctggggggaatcctgccagttggtgaagccctgtggcaggaaggtatatgtggacatagagtatacctgattctctttcttcagccactgactgcttgggctgggctgtgaatgataatggaatggctggagtctgctgttgtcagaaggcagggagggtgatgaaggactgacccacatggactgggatgtgtgtcggttatgggcatgactgcacgttcactctcagtgggatctgggcaacatggagttcattgtcctgttgcttacttactgcaatgtctttggccctccttttcaactggttcctctgttgggcccaaaggttgggagtaggagacagtatcccaggctgacaagggcttgccctttaccttgggcaccttgttaatttttagcctgtgcccttccccacctttgccctcccagtggttggtatgtgggaagcccatctcagttcctgtgacttcatgtctcaaaccaaggatgagcgtctggtctctgctatgatggtggtatccgaggcctttccctgcccagtctggtgcctgccccacattgtaccggacactggattccctggacccccttctccctttcctttctttccttcaggtcacgcagcccctgtactgtatccagcaccaccaaaaacctcagtgttttttcctccgcctggtttgggggcacaaggaaaaccttaaggtaagggggaaaaggctggttattaccctaaagttttactccccagggccaggggggctggccatctttttttcaaaaaaatttccctggaaagggaaaccccctttttggggcccggggaaggttaaggaaannnnnnnnnnaaaaaatccggcccggggggggtttgggaaaaggggaaaaccctttttccccttttccccttcccccc

SEQ ID NO: 353656 - DNA, 450 bp, Homo Sapiens
atagaatcgagctcggtaccgcgtttctcctgaaaatccttgaatatgtccagccggaacttcttttccaggccataactgtagtatcgaaaaaggcactccaaaccatatctgtagccttcttgggcgtcctccagagccagctgcttgaactcctcatacatctttttgttgaagtgatctcggaggaagaaggaccagaagcggaagagtgtgttcatctcctgagactggccaatgcccaagcgtttccgctcattaaggcagcgcctacgatacttatggtagacgtgttgtgtgaagccattttccttgagcagttcatgggaaggatgctggaacttgggcaatgactgaggggtacagccatagctgccaactgtaggcgtcccttctgaggggctggagctgatggaagcagtacggggcctgtatgcaagaatggcgtct

SEQ ID NO: 353657 - DNA, 494 bp, Homo Sapiens
  misc_feature (20)..(20): n is a, c, g, or t
  misc_feature (32)..(32): n is a, c, g, or t
  misc_feature (50)..(50): n is a, c, g, or t
  misc_feature (57)..(57): n is a, c, g, or t
cacccctcaaccctaagggnaacacccaaacnaggaagggttaatgaacnggaaggnaaggaaacccaaagtgaaaggcctttccgcctcctccgtgttaacaaaccagtttccagagttagctttcctggggaggtgtgtgtttgtgaaaggaattcaagtgttgcaggacagatgagctcaaggtaaggtagctttggcagcagggctgatactatgaggctgaaacaatccttgtgatgaagtagatcatgcagtgacatacaaagaccaaggattatgtataattttatatctctgtggttttgaaactttagtacttagaattttggccttctgcactactcttttgctcttacgaacataatggactcttaagaatggaaagggatgacatttacctatgtgtgctgcctcattcctggtgaagcaactgctacttgttctctatgcctctaaaatgatgctgttttctctgctaaaggtaaaaaaaa

SEQ ID NO: 353658 - DNA, 536 bp, Homo Sapiens
gagaaggtttttaaggaggggcttctgaatacttgggagatacggaacggaccaaggaccacactccagggtgcattcgttgctccctggggcaccacttctggattacagtgtgccaggtcctttggaggccctaccccttccccattcattgccaccagtgagaaatgggggtgcccctgtgtaaagaaacctaccaaaggtttacatttgcaccttagcctcaatagctacgaaccctagagaagcagctagctggagctcatgtgcaactcctgattctcaggagaaagatggattttaacccaaaattatgagtgagctgttaactctaaaatgtacttgggagataggccaagcgagaggtcatgggccaactaagtgttatccagtagaaaagacagtacactgcttttcttttagtgtttgcttttcctttgctatatgttttgctatttccttgtggcttagaatgtaaaattgattgttaaaagttttgttctgaataaatatttatcttttgtattgctaaaaaa

SEQ ID NO: 353659 - DNA, 1590 bp, Homo Sapiens
  misc_feature (1019)..(1020): n is a, c, g, or t
  misc_feature (1099)..(1099): n is a, c, g, or t
  misc_feature (1255)..(1255): n is a, c, g, or t
  misc_feature (1280)..(1298): n is a, c, g, or t
  misc_feature (1349)..(1349): n is a, c, g, or t
  misc_feature (1395)..(1395): n is a, c, g, or t
  misc_feature (1400)..(1400): n is a, c, g, or t
  misc_feature (1436)..(1436): n is a, c, g, or t
gctctctgctctcgcggccgactcgcaagatggcgccgcagaaagacaggaagcccaagaggtcaacctggaggtttaactctctgctctcgcggccgactcgcaagatggcgccgcagaaagacaggaagcccaagaggtcaacctggaggtttaatttggaccttactcatccagtagaagatggaatttttgattctggaaattttgagcaatttctacgggagaaggttaaagtcaatggcaaaactggaaatctcgggaatgttgttcacattgaacgcttcaagaataaaatcacagttgtttctgagaaacagttctctaaaaggtatttgaaataccttaccaagaaataccttaagaagaacaatcttcgtgattggcttcgagtggttgcatctgacaaggagacctacgaacttcgttacttccagattagtcaagatgaagatgaatcagagtcggaggactaggcaaaggctccccttacagggctttgcttattaataaaataaatgaagtatacatgagaaataccaagaaattggcttttagtttatcagtgaataaaaaatattatactcttccacccgagccacaagccagccaaacacgcaggaagaaaaacacccggcggggcgccgcaaataagaaaaacgaacaattcctgccggcgccgccctcggcgccctcaaaaaaccttctgaaaacgcccctttctttggggccctgggggggcaccccgacccacgcaagcggaaaacgtcgggatccacagaccgcgtttccccggtggggcaaacacgtggccgccccagaaaaaaaggagcgcgcgtgtggcaatccgttccacccctgcaacataataataaagccgcccacggcggtggggatgaaaccagcggaaggccgtgggttcctctcgtgaaacaacataatctctccaccagaaagagagagcacactcctgtggacgagggcgggtgccaccctgcaaccacacaggagaaaaacgnnctatcatactcaaccaaccgcggagagcggggtcatgctctctcaacccagccccactcatataatctcgctcgtcgancactatgtacctttctggacgcgtattattgcgccgggcgtcgcgcccataccacgcatactctttgataactaccacaatgcgggatacagcgcgccccccgggatacctcacggggcgtgtgcgggcccaatatattccctctcatttatatanatacccccatcccggcgtgtgtggnnnnnnnnnnnnnnnnnnntggagtagggggggcgattccacgcatatcacgcgtcgcgcgtacgggccncccacggcgaggtgagggtggagacaccccccctgcccaacggttnttgtngcccaccagcgcggcgggcgggaactcacctgcgcnccagaacccggtctgtgagccggcgagcggccgaccatctcggaggaaaatacgacaaaaaacacgcggttcgccccacccactataataagatcgcgtagtgcccaacttagcggaggttgtcccgccgcacaacgataccacttttttttct

SEQ ID NO: 353660 - DNA, 507 bp, Homo Sapiens
  misc_feature (19)..(19): n is a, c, g, or t
  misc_feature (51)..(51): n is a, c, g, or t
tcagtcaccttagattaantagggaatacgcgaaacctccctaatggtaancgctcagtaaggcaagctctgggtgcaactcagtggtccttagtatagtcagagttatgcggatcatcagcacaatctactcacaccctcctcgaggtattaaataaatatttcagaatccacaatgcagccaatctcatcaataactttactgaatcctgtagcccagcactcaggggttctctaaaaccctgccccgccttcccctccaattgcggtgcccactgtctcttttaaatagactctgtcctcatcaagcctgttctctgtcccccaaatatgccgtatcattccttaatgcatgcattttttccccagttccctacaatcttataattagtggttacgctaatctatatgtgtgtttaaactcatagaattgtatacaaaaaagtcaactgtactgtgtacacacatttaaaagataaaatgtgttcttttaacgcttaaaaaaaa

SEQ ID NO: 353661 - DNA, 2215 bp, Homo Sapiens
caggctggtacggtcggaatttcgggatatcgtcgacccacgcgtcggagctgcagataatgctcagccatcctcccatcctgcactttagccagctgcagggcgggcaaggcaaggaaagctgcttccctgggaagtgtatcactttctccggcagctgggaagtctagaaccagccagactgggttaagggagctgctcaagcaatagcagaggtttcacccggcaggatgacacagaccacttcccagggagcacgggcatgccttggaatattgccaagcttccagctgcctcttctcttaaagcattcctaggaatattttccccgccaatgctgggcgtacaccctagccaacgggacaaatcctagagggtataaaatcatctctgctcagataatcatgacttagcaagaataagggcaaaaaatcctgttggcttaacgtcactgttccacctggtgtaatatctctcatgacagtgacaccaagggaagttgactaagtcacatgtaaattaggagtgttttaaagaatgccatagatgttgattcttaactgctacagataacctgtaattgagcagatttaaaattcaggcatacttttccatttatccaagtgctttcatttttccagatggcttcagaagtaggctcgtgggcagggcgcagacctgatctttatagggttgacatagaaagcagtagttgtgggtgaaagggcaggttgtcttcaaactctgtgaggtagaatcctttgtctatacctccatgaacattgactcgtgtgttcagagcctttggcctctctgtggagtctggctctctggctcctgtgcattctttgaatagtcactcgtaaaaactgtcagtgcttgaaactgtttcctttactcatgttgaagggactttgttggcttttagagtgttggtcatgactccaagagcagagcagggaagagcccaagcatagacttggtgccgtggtgaaggctgcagtccagttttgtgatgctgcttttacgtgtccctcgataacagtcagctagacacactcaggaggactactgaggctctgcgaccttcaggagctgagcctgcctctctcctttagatgacagaccttcatctgggaacgtgctgagccagcaccctcagatgatttccctccaaactgctgactaggtcatcctctgtctggtagagacattcacatctttgcttttattctgtgctctctgtacttttgaccaaaaattgaccaaagtaagaaaatgcaagttctaaaaatagactaaggatgcctttgcagaacaccaaagcatcccaaggaactggtagggaagtggcgcctgtctcctggagtggaagaggcctgctccctggctctgggtctgctgggggcacagtaaatcagtcttggcacccacatccagggcagagaggtctgtggttctcagcatcagaaggcagcgcagcccctctcctcttcaggctacagggttgtcacctgctgagtcctcaggttgtttggcctctctggtccatcttgggcattaggttctccagcagagctctggccagctgcctcttctttaactgggaacacaggctctcacaagatcagaacccccactcacccccaagatcttatctagcaagcctgtagtattcagtttctgttgtaggaagagagcgaggcatccctgaattccacgcatctgctggaaacgagccgtgtcagatcgcacatccctgcgcccccatgcccccatgcccctctgagtcacacaggacagaggaggcagagcttctgcccactgttatcttcactttctttgtccagtcttttgtttttaataagcagtgaccctccctactcttctttttaatgatttttgtagttgatttgtctgaactgtggctactgtgcattccttgaataatcacttgtaaaaattgtcagtgcttgaagctgtttcctttactcacattgaagggacttcgttggttttttggagtcttggttgtgactccaagagcagagtgaggaagacccccaagcatagactcgggtactgtgatgatggctgcagtccagttttatgattctgcttttatgtgtcccttgataacagtgacttaacaatatacattcctcataaataaaacccaaaacaagaatttgaatttttagaaacacaaaaaaaa

SEQ ID NO: 353662 - DNA, 1397 bp, Homo Sapiens
  misc_feature (340)..(363): n is a, c, g, or t
actgtggatgggccacggaatggattgtcccgggtctcccaaaagaacatttttcttctatttaagaagctctgctccttccgttaccgcagggatctactgagactctcctatggtgaggccaagaaagctgcccgtgactacgagacggcacagaactacttcaaaaaaggcctgaaggatatgggctatgggaactggattagcaaaccccaggaggaaaagaacttttatctctgccccagtatagtatgctcccagtgacagatggattagggtgtgtcatactagggtgtgagagagataggtcgtaccattcctcatcacatggtcaggggannnnnnnnnnnnnnnnnnnnnnnnaagccataattggtgatactgaaaacttggggttcccatttatcctgcttttcttggggaatgctaggcaaggtctggccaggccccccttttttcccccaagtgaagaggcagaaacctaagaagtaatctttctctttctacccaaagcatacatagtcactgagcacctgcggtccatttcctcttaaaagtttggtttggattggtttccatttcctttcccttgtgttggctacactgacctctagcggtcttgataaaggtatcagtcaactctggatcatgtcagggactgataatttcatttgtggattacgcagacccctctacttcccctctttcccttctgagattctttccttgtgatctgaatgtctccttttccccctcagagggcaaagaggtgaacataaaggatttggtgaaacatttgtaagggtaggagttgaaaactgcagttcccagtgccacggaagtgtgattggagcctgcagataatgctcagccatcctcccatcctgcactttagccagctgcagggcgggcaaggcaaggaaagctgcttccctggaagtgtatcactttctccggcagctgggaagtctagaaccagccagactgggttaagggagctgctcaagcaatagcagaggtttcacccggcaggatgacacagaccacttcccagggagcacgggcatgccttggaatattgccaagcttccagctgcctcttctcttaaagcattcctaggaatattttccccgccaatgctgggcgtacaccctagccaacgggacaaatcctagagggtataaaatcatctctgctcagataatcatgacttagcaagaataagggcaaaaaatcctgttggcttaacgtcactgttccacctggtgtaatatctctcatgacagtgacaccaagggaagttgactaagtcacatgtaaattaggagtgttttaaagaatgccatagatgttgattcttaactgctacagataacctgtaattgagcagatttaa

SEQ ID NO: 353663 - DNA, 518 bp, Homo Sapiens
  misc_feature (478)..(478): n is a, c, g, or t
cgggcaaggcaaggaaagctgcttccctggaagtgtatcactttctccggcagctgggaagtctagaaccagccagactgggttaagggagctgctcaagcaatagcagaggtttcacccggcagatgacacagaccacttcccagggagcacgggcatgccttggaatattgccaagcttccagctgcctcttctcttaaagcattcctaggaatattttccccgccaatgctgggcgtacaccctagccaacgggacaaatcctagagggtataaaatcatctctgctcagataatcatgacttaggcaagaataagggcaaaaaatcctgttgggcttaacgtcactgttccacctgggtgttaatatcttcttcatggacagtggacaccaaggggaagtttgactaagtcacatgttaaattagggagtgttttttaaaggattgccataggtgtttggattctttaactggntacaggttaacccgttatttggggcaggtttttaaatttc

SEQ ID NO: 353664 - DNA, 495 bp, Homo Sapiens
  misc_feature (456)..(456): n is a, c, g, or t
aaagggcaggttgtcttcaaactctgtgaggtagaatcctttgtctatacctccatgaacattgactcgtgtgttcagagcctttggctctctgtggagtctggctctctggctcctgtgcattctttgaatagtcactcgtaaaaactgtcagtgcttgaaactgtttcctttactcatgttgaagggactttgttggcttttagagtgttggtcatgactccaagagcagagcagggaagagcccaagcatagacttggtgccgtggtgaaggctgcagtccagttttgtgatgctgcttttacgtgtccctcgataacagtcagctagacacactcagggagggacttacttgaggctctgcggaccttcagggagcttgagcctggccttcttcttccttttaggatggacaggacctttcattctgggggaacgtggcttgaggccagcancccttcaggaggaatttcccttccaaactgctggattag

SEQ ID NO: 353665 - DNA, 461 bp, Homo Sapiens
atttgttgtttgttttccatgaggttatcggaccatgggctgagctcaggcactttctgtaggagactgttatttctgtaaagatggttatttaaccctcctccaccccatcacggtggccctgagggctgacccggaggccagtggagctgcctggtgtccacgggggagggccaaggcctgctgagctgattctccagctgctgccccagcctttccgccttgcacagcacagaggtggtcaccccagggacagccaggcacctgctcctcttgcccttcctgggggaagggagctgccttctgtccctgtaactgctttccttatggcccagcccggccactcagacttgtttgaagctgcactggcagcttttttgtctcctttgggtattcacaacagccagggacttgattttgatgtattttaaaccacattaaataaagagtctgttgccttc

SEQ ID NO: 353666 - DNA, 1168 bp, Homo Sapiens
agacccatgagttccctggagagtagagtgatgcctgggtcagctgttcctcttgtctgttcagcaggtcctttgagtggcttcacaatccagctgtcagtggcagaaaataatgcctcataaattattcacctggttcacaattggaatccattagctctcggggcttggtgtggctgcagatcatccacaagtgccccttgttctctgcccccaaggagctcctgtcattgattttaaccaaacaagttcaaatatctccacgtctctgctgactctggtctttagactctagactgtacctttatttctgagctctgaaattctgcagaaacaggtgagtctataaaaacattctgtgggaggccaaaagctcagaacagttgtgtctctctttctcagtattaaaagatcaaggtttcccatggaagccaacctgatctggtaattgggcccttctatacccctctgaatacttttccaaggagggggcagttcccacccccatagttcccctgagggttaagagtccaggtggtggccaagttgcaagatttggggcagccattttgccaaggatcagagatttgctgttggagaggtgaagtcggctctgtgccatcctgaaaaatcaacttagaaagataggtggacttcatcagatttgtcagtccttccttgttttaaagagaaaaatgatctctgccttgcttcagataggatatggctaatctttttccttctttttctaatgtagcagtgatggaaaacaccagtctttgaagaacaaatggaggttcccagtgacatgaatccattatatttgattttggattgtattttttaacccctttttatggcatagaattctggtgccttgctccctgggtttgtctctgtgctacgagtaggctttcttcacattctggcttacaggggaacacaactattccacaagtggcctttagtgctctttataatatgatttcctgtaatttttaaactgtatgtgtaatttatattctggctctgtccaatatttgaacaactttaataggttgatttccatatatattatgcaaataattcttacctgattttttatgttctatcttaaataaatactgcaccacttattaataaatagacatttcagtgataaaaaaaa

SEQ ID NO: 353667 - DNA, 1757 bp, Homo Sapiens
  misc_feature (319)..(319): n is a, c, g, or t
  misc_feature (322)..(322): n is a, c, g, or t
  misc_feature (1668)..(1668): n is a, c, g, or t
  misc_feature (1705)..(1705): n is a, c, g, or t
ggaattcccgggatctgatctttgctccagatgttagagacaaaactaaaagtaaaataccaagtgaaatcaaagcatcacgattgagcccagaacatgaaaaagaacttcctggcccacttgagaaactgttaaaccggacatacctttggggacttcttcccttctctggaataagattgatgtttccatgctgtgaaagacgatgatgttccttctcccagattcctgctgtcttcaaaaggcctagcaaaaaccactgctgctgggtgcagttgagaaagggaatgaagaacaatcccatggccatgcaggcacnccncccctccacctctctgccctccacccctctgccctctcctaccttgttccttcttggtcctgccatgtttggactggttcacctttttggcccatcacttgggctcattcagcaacagtcatgccttaggttgcatcctcatctataggccaattaaacagggtttcttcttgataaatccctatggttttgattttaggaagtcaggcatgatttcttttgggatctatatgacccaaagtggccagttttaccaaaggtgtccctttgcactgggatctctgggtctcatctgaacacagcttgggtcctcttgccttgtcccagagaatccccttgttgtcaggacataagcagatactctagggccttcaccaaaagctacaaagaagcagacaggactcaacttaggacatcttatggttatgtaactaagagattattttaggaagtaaacaggcctctgttggctcaaatgaacatcttcattgttagtttccacttacattgttctcgggataaatcggccagaatttggcaggggctccccagcagtccttgtgaatccctgtggtaggatgtttcagttctcctgagtcaggctgaagtgaaagctcctaagagatattcagaaagaaggatggtcaagttctagaacaacaatagttggcccagtaattttaaagactgtcattctacctaagccttcatcctccagatagcactgttatgggcttaaaataagcttcaagggaaataatgaatttctttgacaccgccaaaaatcggctgtatataagaataacttgagaatggcttacaatgaggtagtcaaaagcccagctcagtgctcaggaatgtatttgtgattcctcttagacttgtcgaatggactgcaatttgatacctaagagtaataaaaaatgagaccatattttatgttaatgttcccttctcttcctctgcccacaaaagtgaggtcagggaaggggagagaaacttatcctaagcactccttatgagttgcttgtgacatgatagctctctctaaagttcatgcaatcctcatcgcaaccccatgagggagatgttattgtctccatcttatagatgaggaaactgaagacaagaccttgtcaaaggtcacacattgtaagaagtagagctgcatattcaaccaaagcccgtgtacctggaaagctcattctctctcccccttcttcctctcaaatcaggccctagctcctccacaatgcttcgggcttctacgttcactcagctttacagtaaaatgatcacagacccatgagttccctggagagtagagtgatgcctgggtcagctgntcctcttgtctgttcagcaggtcctttgagtggctcnacaatccagctgtcagtgggcagaaaatatgcctcataaatattcacctggt

SEQ ID NO: 353668 - DNA, 2002 bp, Homo Sapiens
  misc_feature (61)..(61): n is a, c, g, or t
  misc_feature (71)..(71): n is a, c, g, or t
  misc_feature (77)..(77): n is a, c, g, or t
  misc_feature (91)..(91): n is a, c, g, or t
  misc_feature (98)..(98): n is a, c, g, or t
cactcagagcgcactggtaagcggacgcctccagagcccacccgcgccagtagtggcactngtgccggcgnggcggnctaccgcggtggcngccgcanagcgattgtaaacagacgcacttctgttctcttctgcaaatcgaaaagtgtaagccccccaaagtctgccaagaacactgaaacccagccaacttctcctcagctagggaccaaaacctttttgtctgtagtccttccgaggttggagactcttctgcagccaaggaaaaggtcgcggagacatgcggagactccgaggtggaggaggagtccccaggaaagcgcctgggacgcaggtcttcaccaacggctttgggggtgcgaggagcgagcaggagccgggcggcggcctgggggaggaaggccacaccccgacgacgctgtgcctccgagtccagcatctcctccagcaacagcccgctctgcgactcgagctttaatgcgcccaaatgtgggcgggggcaaaccggctcttgtgcgacggcacacgcttggaggaccgcagtgagctgatctcctgcatcgagaatgggaactacgccaaggcggccaggatcgcagccgaagtcggccagagcagcatgtggatctccactgatcccgccgcctcggtgctggagcctctaaaggtggtgtgggccaagtgcagcgggctacccctcctacccggcactgatcatcgaccccaagatgccccgtgtgcctggccaccacaacggcgtcaccatcccggccccacccctggacgtgctgaagattggggagcacatgcagaccaagtctgatgagaagctgttcctcgttctcttttttgataataagagaagttggcagtggcttcctaagtccaaaatggttccccttggtattgacgaaactatagacaagttaaagatgatggaagggaggaattccagcatccggaaggccgtgcggatcgcttttgaccgcgccatgaaccacctgagccgcgtccacggggagccgaccagcgacctcagtgacattgactgacggcccggccgccagcgcgggtcttgtccatagtgttgataagctgtacatgtttgtatattgttcaaaacttaacttattctgatttttagttatagctctttaattctttttccccggggaggggggaggttttatttccaagttttctaggaacccatctccgtctgggcgctgtgagtggggtgggcacgtccgggcagcccagtgcgtctgtcgcacgtccccgggccgtgctgctggcgtcactttctttgatatgtagctttttcttaaagacttttgaatgtttaataattttgtaaatcatgctcttaacacagagtaccacttatttaataagacgggatgtaaattcacaatgacaaatgtgtattttaagaaagaaaatgacattattttgaatggtactttgtggaaagaggggagaataaagttatgctgtgaacatcacttgcagatcaccaaaaacactacgctgccccgtgaccgccggtgggtgtgtccccgctcccgtcgtcccgcccacctcaaaccccgcaggtgtgcctcccagcggattatttattgtagaaagtgtattcatttgctttataatgaaaaatacatttgcaaaggtatattgatatgcatttttatacaggcacataaaaattcaacttggcttgggagcagaatgcattgcattgtataaatgactctggcctgtgtgtactttgattttataacttgtaatcttttgtttacaatgaggggctttctgtaacttgttttaatttagaacactttggtagcaatagaaactttggatacatttttgtatggtacctgtgatgtatatagaattagtactttatttttatttttaagaggtaaagcattatgttggggaaagtagggtgggtttccaaatttgcattttttatattaaaaataaagtcaagatttgg

SEQ ID NO: 353669 - DNA, 379 bp, Homo Sapiens
  misc_feature (94)..(94): n is a, c, g, or t
  misc_feature (150)..(150): n is a, c, g, or t
  misc_feature (195)..(195): n is a, c, g, or t
ttgcccttaaaatggaaaaataccatttgccaaaggtaataattgaatatgccatttttaataccaggccaccataaaaaatccaacctggccntgggagccagaatgccattgccattgtataaatgacctctggccctgtgtgtaccnttgattttataacttgtaatcttttgtttacaatgaggggctttnctgtaacttgttttaatttagaacactttggtagcaatagaaactttggatacatttttgtatggtacctgtgatgtatatagaattagtactttatttttatttttaagaggtaaagcattatgttggggaaagtagggtgggtttccaaatttgcattttttatattaaaaataaagtcaag

SEQ ID NO: 353670 - DNA, 531 bp, Homo Sapiens
  misc_feature (465)..(465): n is a, c, g, or t
ccactgatgccgccgcctcggtgctggagcctctgaaggtggtgtgggccaagtgcagcggctacccctcctacccggcactgatcatcgaccccaagatgccccgtgtgcctggccaccacaacggcgtcaccatcccggccccacccctggacgtgctgaagattggggagcacatgcagaccaagtctgatgagaagctgttcctcgttctcttttttgataataagagaagttggcagtggcttcctaagtccaaaatggttccccttggtattgacgaaactatagacaagttaaagatgatggaagggaggaattccagcatccggaaggccgtgcggattcgcttttgaccgcgccatggaaccaccttgagccgcgttccacgggggagccgaccagcgacctcagtggacatttgattgaacgggcccggcccccagcgcggggtttttgttccantagtgtttgattaagctgttacatgttttgttattatttgttttcaaaaatttaaatttatttttt

SEQ ID NO: 353671 - DNA, 1059 bp, Homo Sapiens
  misc_feature (729)..(769): n is a, c, g, or t
  misc_feature (848)..(880): n is a, c, g, or t
  misc_feature (929)..(937): n is a, c, g, or t
taacatgacaatttcacactattaacagcacacgggcctggctgtacgtttttaactatgacatttcccatatgatattcgaggcctggtggacacatgactgacagtgcacatccagagattctacactcatcagacacagacatgaccgcaaaggtatcaaagtgaccccactttaagcagtgaaaaaagacctttccttttgttctcaaatcagcattttctaaagtcaggtgttagccttttgccaacagtgtgtacttgatggtaattatggcaacatagagcttcaaacaagatcgcctgacaacactgccgcatacacatacggcacccaggactcagaatcagtctgtcctggcaaatccttccaaatgacatcatagtgttgtcacattgaaagcaactcacagccttcagtgaggaaaggggagaggagaatgagaaggggagaaaagccaaggcagggacaaaggcccggtgggggatgggggttgcagggtggaggggggtctttattgctatatgcaccataaaacaaaggaaaaccaaatgaacttctgtgtgtaatgttcacttgtgaaggtattttaaagcatgaaatgcttaagtcttaaaaaacatatgctatagcttaccggcattttcaagggcaggaacctgctctctcatatgagccgataagagctttgcaatgcaatttattttctaaataccactctattcttnnnnnnnnnnnnnnnnnnnnnnnnnnnnnnnnnnnnnnnnngcctggccaatcactcccacagtttgtggggatcatatgtccacagaaccatcacatgcaacgaaaaaagccctaaccnnnnnnnnnnnnnnnnnnnnnnnnnnnnnnnnnccatgtaaactatgaaaatcaaggaagttgaaggcaaacaaggcaattnnnnnnnnntacgaagtactcttcagaaagtactcctcatcacaatatataaatatgttttatggaaaacaagggcgggggaggaaaactggcattttccagaattctgcagaagccgacagagactacaa

SEQ ID NO: 353672 - DNA, 496 bp, Homo Sapiens
  misc_feature (132)..(145): n is a, c, g, or t
caggaaccaaatgtgaccttgtgcatatattggtagctgaaaatcttcaaggctactgatgggtggccccttaatcttgtctttgattgctgtgtgcagggaaaggtgtccccgtttgttcatgctgttttnnnnnnnnnnnnnntatttgcaagaatactcattttgacataataggtcctcttgtcagagatcctctaccacagacattaatagctgagcaggagccacatggattgattgtatccactcaccattgacgatggcattgagcgtagctagcttatttccatcactacgtgtttttgagcttgctcttacgttttaagaggtgccaggggtacatttttgcactgaaatctaaagatgttttaaaaaacacttttcacaaaaatagtcctttgtcattacattatttactcatgtgtttgtacatttttgtatgttaatttatgaatgattttttcagtaaaaaatacatattcaagaaccaaaa

SEQ ID NO: 353673 - DNA, 808 bp, Homo Sapiens
  misc_feature (688)..(688): n is a, c, g, or t
  misc_feature (714)..(714): n is a, c, g, or t
  misc_feature (765)..(765): n is a, c, g, or t
  misc_feature (793)..(793): n is a, c, g, or t
cccacgttatcaaccgtgactgcaagagcgttcgtgcatgcccctgagccacggccgtctctgattctcccctttatgaagctgcaggctgacgagagatggtcccttccccattggccttagccccaagacttggagtcgaccccaagcgacagagtgaccagaaacccttttacagtcacattcagagtcgctgctggcctcaggcatttgaattagagctactttgagcctcttaggcagaaaacctaccacattcactactgcaaaatgtgtcctgtctaaaaatgattctctaaactttccctatacttaggcatagtcttctttcttagattctctttgttgttgtccctattgctggtttattacactgtacagaccacaaaatgtaatattcttttgtataactactaaagaaaaatccttgtagatctttgtgccttcaccatggctatctatacctgtacatgaaatgtgtttgtattgtgctgaagagcttaatgtcaacattacctgctgcttactctgaaaaaaggaatgaatggtagctgtagaatttaggatattttatcaggttggcactttataaaatactccctgatttaaaaaattgtaagttatacacgttaatcatccacattctatcgacaatgtaccaacatcacaagctgttgcaaccacctgnctgttacttctctgagctgttaaaancctggaacttcaatttcaggggggcacaaattggcaattctaatcttttcngggggaaccggggggattttttttctcnctctctaggaccaat

SEQ ID NO: 353674 - DNA, 568 bp, Homo Sapiens
  misc_feature (14)..(14): n is a, c, g, or t
  misc_feature (22)..(22): n is a, c, g, or t
  misc_feature (31)..(31): n is a, c, g, or t
  misc_feature (42)..(42): n is a, c, g, or t
  misc_feature (51)..(51): n is a, c, g, or t
  misc_feature (72)..(72): n is a, c, g, or t
  misc_feature (105)..(105): n is a, c, g, or t
aaaccgggaaaacnccaaaacntcaggaatnaaaaccaaccntgaactgcnccgggtaattaactgaggaancgggtttaaaagccggcaccttccagaaagggnccagaaacaatcctgaaacttcctaaagttgtaaagaaactgtcccgcccatggtccttgccctttggaggctaatcctgcaggctgcccatcccagtgtgcatactgtttttcattgtcacaacgaagccagatttcattcatgccttctgcaactggaatcaggagtttaatgttaaatttttggcctgaaatgtttacatctggggtaacttcacatcccctgaggttcatctgatgagctggtgtgccactggattcttctttgctcttataacaagaaatggatgtgtctttgaaggtgcaccaatattgtttgtaacctttcagagtcagcttttttggcttgaaaactttaatgtagtcagcaagttcaggaatggaagtaatgtcacccaaaattgttgacgttttacccccttccagagtaatctccaggtctgaaagggcagcatcaacttca

SEQ ID NO: 353675 - DNA, 527 bp, Homo Sapiens
ctgaggctacctggggattgtgggcagcaggcccctggactcccagaaatgctgagggtccctcttccaggggagttccctggggagccaagagtagaggggctattcccgagggtcctgtggtcagggtcctgctttgtccctggcaggctgtcagtccagctggagggggtcagtaggctccagggagtgggccctcccctccgatcttggagtctctgggtgttccttcagcctcagcctcactggtaccttctgccctttaggggaggctatgagtctgggacaggaggacaaattcagagcccagagggggaaatggagaaacctgggctgctgaggaaagccacgggtgttggcgtgaactgatgatgtctcatcccacgcccactatggccacattacctaacctctccatatctgggctattcaaggtcttggaggccagcacagacccagctagttgttgaagccagttcttttttgtcttggtcatgagggaattaaacgttttctctggacgaaaa

SEQ ID NO: 353676 - DNA, 675 bp, Homo Sapiens
  misc_feature (28)..(28): n is a, c, g, or t
  misc_feature (632)..(632): n is a, c, g, or t
cctcgcatgccaaatcaagaactcctcnaattcagcatgcataaaacttttcactagggaaactgaaaaagcttgagccaactaaatctgccttcatactttatcaaggggaaccaagcctgctgtgcttacatcagcatctggaagactttcctcctcctctaatctgtgtacacatctccaagcaaggaagaaaaaacaaactctgctcagacgcctatgaaacacctgaatgaactttgatgaagtacagtctgagttaccatcatgcacaagtagaactgctcttggacttgttttcctgttgtttgtggaacctacgcgtttgaatggcttgaacgttgcatcttttaaagttattttttaaggtttcttggcatttatcctagttgtccgtgtttggcaatgtgctgttaaagtaatagacttttaatctttatgtattttttgttttctctggagtacttggacagatgttatagtggtttcttttaggaaaatctgtcattaaaaaagttatagccttgcaaataaccactcacagtatttgagtcacagtttattttagtgagacgtaaagagtgctgacttcatttatttttctacctatatacctagtggaaaaggggaangactaatgttttcaaataaacaaacagaaacctaacagaactt

SEQ ID NO: 353677 - DNA, 914 bp, Homo Sapiens
ggaaacagaagttggagaaatacaacagaataaaagtgtcacttacgatctctcaaaattggtcaactatcctggttttaatatatctactcccagaggaattccagacgaatggaggatctttggttccataccaatgcaggcatgtcagcagaaggatgtgtttgccaattaccttacttctaacttccaagcggccaggtgtgaagtctggcaacaagaggtcttcatctcactctagcccaggtagtccaaagaagcagaagaatgaaagcaactcagcgggatctcccgccgacatggagctcgattcagatatggaggtaccacatggttctcagagcagcgaaagttttcagtttcaaccaccattacctcctgacactcctccactcccccggggaactcctccacccgtcttcacccctccactcccaaagggcaccccgccgctgactcccagtgactcaccccagaccagaacagcatctggagctgtggatgaggacgcactgactctagaagaacttgaagaacagcagaggcggatctgggcagctcttgagcaggccgagagcgtaaacagcgactccgacgttcctgtggacacacctttaactggcaattccgttgcctcatcaccttgtccaaatgagctagacctccctgtcccggagggaaaaacatctgaaaagcagacgctggatgagcctgaggtaccagagatttttacaaagaaatcagaagctggacatgcctccagtccagactctgaggtgacatcactttgtcagaaggaaaaagcagagttggctccggtaaacactgaaggtgcccttcttgataatggcagtgtcgtaccaaactgtgacatcagcaatgggggcagccagaagctctttcctgcagacacc

SEQ ID NO: 353678 - DNA, 288 bp, Homo Sapiens
  misc_feature (69)..(69): n is a, c, g, or t
  misc_feature (71)..(71): n is a, c, g, or t
  misc_feature (80)..(80): n is a, c, g, or t
tgacattctttatgaaatttagaattgttgaagaactataacatttcagtagggttcaaggtggtcccnanagttatatnaaagattagcttttactataaacccttgtcttttactcagatcctagcatcccttttcacatggtttctccatgtatataacagaatcaagaaacaaattttaattaaacaatctgtaacagaatcaagaaacaaatacattttaattaaacaatctatatggaacaaacattcccaaattctaagaataaatttttctttaagtttt

SEQ ID NO: 353679 - DNA, 1016 bp, Homo Sapiens
  misc_feature (23)..(23): n is a, c, g, or t
cttaaagtgaactaagctgacanaaaatcaaaatttgaatttgctaagtgctgaaaagactaggtgtagaactgacacagcaatgtgaaggaagacaaagagaaagaccagtctctctgaaatggtaagtgggccatatacacataatagaaacagatcccaattgtaaagaagtctgctcaggctattatcaacactgaaatgccttcaacaacctagcatctggctaatgcaaaatcttacaaatactgaagcctcaaagcatttttctactaaattatctctactgtggtaacaaacttcgtactttataatgcttaacatcaaaccagggtttaaaaagctgaaacttatttattggtgccctgatttatatggggaggagtttaaagtagctgagagccaaggtgcttcaagctctaaatctaatgaaaatgattctacatatgcagattttaagctaatatttgttgtcttttaccaacgggctaatatctgtgtcacccaggtacttatctcacttaatcatttttctgatttcttaggaaaattttgtcctggcaagtctctgtagtcacgtaatttaacaggaaaggtcttgtatacatctctctatccaaacctaggaaacagtgaggtgtcaccaccaacgacccatgtgatccctttccagtcatcatgcctctgatgaaaatgagccaggagaatcatcataagttaaccctgtaagctttaacactgccaagcaggaacagggaagacctaacctttgagtagcaagtaactgagtagctaataagccgctttatttggtggtaaagaatgaaaataacccacaggccacaccaaatgatattcaaagtcagaggggaagatccatatgcctactataaagaaaatgagccatggactgcgaatacagacacactctattggctctcacaagagttaaccccttgcttagcctcaagttacagaagtgcataacaaccccctcaactcagttcttaaaatgt

SEQ ID NO: 353680 - DNA, 994 bp, Homo Sapiens
ggggcctcctcagtcggccgctcaggctgcggctcctcccggggccggttcccgctgtctcagccgcggcgcagagggcacatcggcctgaccgactagccggctgccagtgccgggagccgccgcgtccatccccgcccgcctggccggggacccaggactgagtcgtccagctgcgcccctcgcccatagccccagcgggcgccgggcgggcgagcagctcttcggcccttcccggacagcgacgcagtcgcagcgcgcgccctaacacagatgtgggaagataaatgaaggggtctagatgtaaatgtcagtggaaaggagagctaccatcactaagggctgaaaacacagttaaatcactttcaaagttaaaagactattaagaacacaagatggggactcctgcttctggaaggaaaagaacacctgtgaaagaccgattttctgcagaagatgaagctttgagtaacattgccagagaggcagaggcaaggctggcagcaaaacgggctgcccgggcagaagcaaaagatatacgcatgagagaactggaacgacaacaaaaagagttggatgaaaaatctgacaaacagtatgctgaaaattatacaagaccttcatctcgaaattctgcctcagcaaacaacccctctaagtggaaactcatccagacgaggaagtggggacaccagcagcttaatagatccagacacttcattaagtgaattgcgggaatctttgtctgaagtggaagaaaaatacaggaagccatgggttccaatgcacagttagacaatgagaagaaccatttgatctaccaagtaaacaccctcagggatggttattgaagagcaggaggaaaaggatggccagaatttttataggagaaaatgaagaaaaaatcaaagggagttagaaaggcaaaaaacataatggggtagggtggctgcccccattagaatgggaagaactttaaaaaaaggcctggggg

SEQ ID NO: 353681 - DNA, 1928 bp, Homo Sapiens
ggaacagatggcagaattttatagagaaaatgaagaaaaatcaaaggagttagaaaggcagaaacgtatgtgtagtgtgctgcagcataagatggaagaacttaaagaaggcctgcggcaaagagatgagcttattgagaaacatggcttagttataatccccgatggcactcccaatggtgatgtcagtcatgaaccagtggctggagccatcactgttgtgtctcaggaagctgctcaggtcttggagtcagcaggagaagggccattagatgtaaggctacgaaaacttgctggagagaaggaagaactactgtcacagattagaaaactgaagcttcagttagaggaggaacgacagaaatgctccaggaatgatggcacagtgggtgacctggcaggactgcagaatggctcagacttgcagttcatcgaaatgcagagagatgccaatagacaaattagcgaatacaaatttaagctttcaaaagcagaacaggatataactaccttggagcaaagtattagccggcttgagggacaggttctgagatataaaactgctgctgagaatgctgagaaagttgaagatgaattgaaagcagaaaaacggaagctacaacgagagttacgaacagcactggacaagattgaggagatggagatgaccaacagccacctggccaagcggctggagaagatgaaggccaataggacagcacttctggcccagcagtaggaaaaccacccttcaacctgggtgatgctccttggggccctacctagagggactgacttttgtccattgacacaaaccccttttagtactgttttgagttttgtcattaaaacagccacctttgtattttataatttatgacagaatgaagtcattttgaatctacatgaatgaacactttggattttgttgtagtttgattctagggtagaaccagtccatgctgtttttattttttatctccgtaattgtagaatcatgtttactcaacgtttttccccagctgcctcagtaactgggcactcggaggccttggcacgggttctggaggacagacagcaattctatgagtgctcactgagatacttgctggagacctcagaaaacacaagtgccttctccacggtgcaattcagacttcagtgatctccagtggtcaaaagacatttacccttaatatcagacaacatttatattttagtgaagaaacaagttctcgggtggggaatctatgtttcactcagatttatatgtttggaggaaaaaagcctttttttgtaaaatatttaaatttatataagaaaatgttagaaaaaaatatggggagtgtatataaaacttgctttattgcatggggcaggggaagtccaggcctaatactcttaaagtaagagttgggtcctttttttcttcaatacaactgtgctgtaccttgtaaagtattttatctgctgcttatttgtggaatgaaacctcaaacaaacccaaagggggagggtagggcagggaaggcagattggaaatctgcctgcagattctattaaatacacccttttgccaaccacaattggctactgacatgttcattttgttataggagactttaaaacaaatcatggcaaccacatccctcttcttttgtctccttctcaaggaaaaacaatctggaatgtagaacttttaaagacttgagtttcacctttagaggtaccctgtccaagaggtttttttaaaatcatggagtgcaactactttgcagaatttatgattctcttttgctcttagtacccaggtggttttatagaaatgattattgtatctttaaagtgcttacacagaaaatatattgggggaaaatctagtgactaaaggcacataagataataaaactagactttaaaaaggtaac

SEQ ID NO: 353682 - DNA, 1080 bp, Homo Sapiens
  misc_feature (131)..(139): n is a, c, g, or t
gtgtgggggctcgagggcctgttagatcctggacacttttgggagggccaaagttggggaaggtccgcttgaggggcaaaaggttcaaagtcaagcctgggcaacataagcgagaccccctatctgtattnnnnnnnnntctgatttaattctttttatttatcataaggggtttaattcctgaagtaaaggtttgcacctattaaacttaaaactgccaaatgatttttgttcttttatgtgcgtgataaaaatacaaagaatggtgtggccacctcctccctttcaagctagggcagcaggtagctcttcccagcccctgagcccagccccttcccaagtggtgccggacaaaaaactacatggccctttcgtgtcttgggggtggaaagggagggatgaattggggtgatagaaccctggtgaattcagagtaatctttctttagaaaactggtgttttctaaagaaacaggataggagtttagagaaggcaccaaagctttcactttggtttggcaccagtttctaaccatctgttttttctaccctagctatcttttattggtaaaatataaatgtataattatgtttgtagagctttaccaaggagtttccctccttttttgtttgttgattagcaaatttttgattctccattttccaaaagtaagagactccagcatggccttctgtttgccccgcagtaaagtaacttccatataaaatggtatttgaaagtgagagttcatgacaacagaccgttttccatttcatctgtattttatctccgtgactccaacttgtgggtttgttctgtttttccatgagaataaaatactggcggtttttttctcagatgtgtgttcattgagaagtaggttactagaattatgttactgtgtcttatgggtgcaatgatgattgctctggcatattagacttttattttttcctccatggaagcacttgaggaaataaatagtacacgggctgtgttcggccagcaactgtggtgatttttctccctgtcctttgagaatggctagtctgcttctgagccaagcgtggactagtgggt

SEQ ID NO: 353683 - DNA, 462 bp, Homo Sapiens
gttcacatcatcctgtttcaaccccagaagaatgttgtcacacacagactgcacctcaacaggttcagtgtcagtggaactgggaccacatactctcagtcctctgcaagcacgtatgtgccaacggtgtgcaatgggcgggaagtcctcgactccaccacctcatctctgtgattgtgaattgcagttcagttcttgtgtttttagactgttagacaaaagtgctcacgtgcagctccagaatatggaaacagagcaaaagaacaaccctagtacctttttttagaaacagtacgataaattatttttgaggactgtatatagtgatgtgctagaactttctaggctgagtctagtgcccctattattaacaattcccccagaacatggaaataaccattgtttacagagctgagcattggtgacagggtctgacatggtcagtctactaaaaaacaaaag

SEQ ID NO: 353684 - DNA, 1383 bp, Homo Sapiens
cgtgtcgggttgtatccatgctcggggttgaaacaggatgatgtgaaccttgggtgcaaacaaacagcccaagaccacaaagccactcaggctgacagagatgcacattgttgtcgtctgcactctgtagtcacttgatgtcacataacatatagggaggaaggccaaccagatgatgcacgtggtgtacatggtaaaacctatgaacttagcttcgttgaaattttctgggcacttccgcgttttgaaggcgtacacagtgcataagatcaccaggatcacatcgtaggtaagagagatcaacatgctggaatctttgacattgcattttaggatgactgtttcccgcttctctgcaagggtatacctcctggtgcctggggcctccaggatgagccacacagacaccatcacaatttgcaccaggatcagacccaggcagatgaaaacctgagaactggggctgatgaattttggcctctgagcgccattcttgaccccatcgaagatgcgggcaatgcagtttgtcttggtcagcagggctgagtaacagatagcgaaggaactccccagcccgagtcggcgcaatgcacagatgactggtgatggcttggcaatgaagaagaatgtcatgcagtatgacaggccaaccccaaacaataagatgtagcagagttctcggcccgatgctttgaccaagggtgtgttgttgtgcttgataaaaacagttacaaccatgcatgtacacataaaacccagacaggcaatggtgactgggccaatggcccaggcgtcttcccacctgatgtagtcctcaggaaggtcatagcatccagttaggtctgcagtgggccactgtccagacccacaatccatacaggtaaactcatccagccaggtattccgtagggttccacaggggatgcaaatccagcagcagacatcccctggttgcatattcttcatttcattgggggcacaggggtcgctgcactgggaagtggggactgagttccgggaccagtggatagagttgacatctagcgataaggtttctgcccagtgaccaactttcaagtaggaatactttccacctacattttggaaattgaacacgttgtatcgccccattccatctccaaaagtgtcaaacttgactatgctatctgcatctttatttgggttgaatggagccgtgaagttgattttcagcaagtaatccttgtacaacttcttcccatccaggatcttcatagcatcacaaagcttggtagtgttgggacagagggtgcgctgcattttgtgcaaagcgtgggccatggcatacaccgcgttcaccacaaacatgatcttggactcttgctcgtagttgctgcacgaagg

SEQ ID NO: 353685 - DNA, 192 bp, Homo Sapiens
  misc_feature (138)..(138): n is a, c, g, or t
tacggtggcaatattatgtaaccttttttcctatgaagttttttgtaggtccttgttgtaactaatttaggatgagtttctatgttgtatattaaagttacattatgtgtaacagattgattttctcagcacaaaatnaaaagcatctgtattaatgtaaagatactgagaataaaaccttcaaggttttcc

SEQ ID NO: 353686 - DNA, 1190 bp, Homo Sapiens
  misc_feature (43)..(52): n is a, c, g, or t
  misc_feature (75)..(75): n is a, c, g, or t
  misc_feature (79)..(81): n is a, c, g, or t
  misc_feature (490)..(506): n is a, c, g, or t
  misc_feature (625)..(704): n is a, c, g, or t
  misc_feature (706)..(708): n is a, c, g, or t
  misc_feature (859)..(882): n is a, c, g, or t
  misc_feature (1003)..(1014): n is a, c, g, or t
cacacaacagaccccccccgcgcgtaccgcggcgcaggccgcnnnnnnnnnnccagaatacggacccgggggagngccnnnaaaggttactgaaacagggaagtgactttgctacaaataatgttgctgtgttaagtattcatattaaatacatgccttctatatggaacatggcagaaagactgaaaaataacagtaattaattgtgtaattcagaattcataccaatcagtgttgaaactcaaacattgcaaaagtgggtggcaatattcagtgcttaacacttttctagcgttggtacatctgagaaatgagtgctcaggtggattttatcctcgcaagcatgttgttataagaattgtgggtgtgcctatcataacaattgttttctgtatcttgaaaaagtattctccacattttaaatgttttatattagagaattctttaatgcacacttgtcaaatatatatatatagtaccaatgttaccnnnnnnnnnnnnnnnnnagatgtaagagcatgctcatatgttaggtacttacataaattgttacattattttttcttatgtaatacctttttgtttgtttatgtggttcaaatatattctttccttaaactcttannnnnnnnnnnnnnnnnnnnnnnnnnnnnnnnnnnnnnnnnnnnnnnnnnnnnnnnnnnnnnnnnnnnnnnnnnnnnnnnannncccttgtcgggccgccctcggcccttcagaaaagtttctctaaacccattcgttggggggccggggcccccagaagggaaaggtgaacatgggccaataccgtgttccccaaggaaaatcccggggccatgaacaagggccttggaatttnnnnnnnnnnnnnnnnnnnnnnnngggggggaaaaccgaagggttttcttaaaccaaatcccaaaaggggaattcctggagggccttttactgggattctatccacaggggaagcccaaaggcgaaccctcaaatttaaaattannnnnnnnnnnnttgccaatttttttgaaaaaaaggggtggaaattccattaaaaaatttccgccccgcacttgggaaaccccttccccaaccggggtttgaaaggaaccctttaaattccgccaggggggattttaaaacccttggttccccccttggccgaaaataattttttcgccccaagtggg

SEQ ID NO: 353687 - DNA, 661 bp, Homo Sapiens
aaaggagcacttccccgtcaagagtctggggcaaacacaccagtatgagcaggaagtagccacaaatggagggggtgcttcaagccatccgacggcagtgaaaacgaaatggagacagagattctggactacgtgtgacagggcccaaggctgggcctccctgacccggccagactggtgtctggcctaatgagggagccggggctccccattgccacccacagtgcccggaatggccctaggaggccctctgaggagagctagagtcccagcaaagggtgcagctgaccctagcactggctgtgacatgctgcttggtgctgcctctggtcctgaggggttagggacatccccaaagggtataccctggctctgccacccatgaaccagcccagcatccagccagtgagtgggcacccaatgcctctcaggatgagaccagtaaatgccggaggtggagctgggcagctgtggagccccaggccacaggccagtctcgcttggctctcatgactgtggtggtggagatagcgtggggagcctcgcccatggtctcacgtggcaagaagtgcctttagctctggatcccaaccgtttggcacagctttggccacagccaggcccctctggaattgtccttattaaaccagtttcccgagaa

SEQ ID NO: 353688 - DNA, 396 bp, Homo Sapiens
  misc_feature (25)..(25): n is a, c, g, or t
  misc_feature (43)..(43): n is a, c, g, or t
  misc_feature (74)..(74): n is a, c, g, or t
  misc_feature (78)..(78): n is a, c, g, or t
  misc_feature (98)..(98): n is a, c, g, or t
  misc_feature (107)..(107): n is a, c, g, or t
  misc_feature (117)..(117): n is a, c, g, or t
  misc_feature (132)..(132): n is a, c, g, or t
  misc_feature (135)..(135): n is a, c, g, or t
  misc_feature (138)..(138): n is a, c, g, or t
  misc_feature (144)..(144): n is a, c, g, or t
ccatgtcccctcatgatcccggcanacccatcccgctcccaanaggcctgctctcttttcccagcctacccaangctnatggcggaaaagagcagctnacgtacgantctggggaanacgaggaggatgagnagnagnaaaaancaaggaggaggaggacttcaagccatccgacggcagtgaaaacgaaatggagacagagattctggactacgtgtgacaaggcccaaggctgggcctccctgacaccgcagactggtgtctggcctaatgagggagcctcgcccatggtctcacgtggcaagaagtgcctttagctctggatcccaaccgtttggcacagctttggccacagccaggcccctctggaattgtccttattaaaccagtttcccg

SEQ ID NO: 353689 - DNA, 1456 bp, Homo Sapiens
  misc_feature (356)..(379): n is a, c, g, or t
gtaagatccctattaactatctgaaaggaaaatagagccaagacctctggtctcaaatatataggaattgcctttctttagtcttcaggactattgtgtgaaaacaagtaggggtctaatctcctagaaggtaggggcttttatccttaaagagaatatgtccccagattattagcacttttagaggagaagccaaggtatgtagggtgtgtggctggcccatcagtggagcacgaagagagaatgggataccattgtgggaagagaagtgcttcctggatttgacttttaaaggaattattctggcagcacatgtagtattcttggatgatcttgctgctcttatttctcctttnnnnnnnnnnnnnnnnnnnnnnnncctatgggttttcatttgtaactccacacttttagatcccatggggctgctgcttcccaaagctggtaaagtgaaagcatttcccatcatcaagtagcagtactctctctcctgtctgctttctaagcaggccccaaggagggctcaagagtgagtataagacttgagagaagtagagaaaatactgcctaggtacacccagtcctccctgctattccagctccagccacctgaggggctcctggcttcagaaaatcaggcacccagcccctggctttgctcccagaaaaggctgggaatcaggaagcctatgcccagcgagcctgggggcagctctgtttcaccaacacctgagggcggtcgagtgcactacaggtctcaggtttcaggggggatggcagttgcctgtctaaaggcttctctgttccttggaattgtacagaatgtctcttgtggcttttcctcctccctccttttttcctgttgactctccccatccggctctatgaatcaccagagtccacaggaaagcagcagatgttgactttactcctttcaagccaacgtcagctccctcctgtggagtggggaacaggcaggaaagtgagagggtggaagaatcgaggaagataaccctcatcctttccaaactgtgagggaagataaagagggaatctgaaaggagtcaggcacctaggcaaaaaaattattgattcctggggataaaaggaccccaaacaaaagccccagtgttggctatggaaccaggatcacgaggaggagggaagcagagggtgggagcatggctagttttggtgccagctcttcttgtctgaggtaaagcctcatctctagccagcagcatccctaggactcaaaagtcaagtcaggctgctggtctggggagatagtccagaggcggcttcttgtcccatctgagcccccaaacctctgcttttatgcaagtctcttgaagaagctgccagggaggactttctagacccttattctacattcattgctccaacttctcttctcttttttcttcctcagggattttcttagggcaaagaagcc

SEQ ID NO: 353690 - DNA, 1849 bp, Homo Sapiens
  misc_feature (1569)..(1592): n is a, c, g, or t
aagcagaattttgagctaccctggttggatgagcgtagccgatgcagattgggagatccagaagaagcaaacacctcaccggacgtgtaggaaatagctgtgctggcaagaaccctgtcttcagatagttgtagcatgccattcccgagagtggcagagacctgtatatgtgacctttgtcctcacatatgttatcactcgctgataataccctttcatacttccttgactttgttttcattactctgatttcacaaaaactctttcattcggctaattgtgagttatggagggtgattgggatttcttttcccttttttgggaaatgggctctcaagctaaagctataggatggcagattcagaagtttcaggggtctgtttctatacatttgcctatgttaaaggggtaaaagggctctcttcattagacatgtggaagatgaagcagccccttcctttagagctgtgcctgcatggcactcttctcaccctggtacaccctccttatagtgggtatagtgatttttaaccctaaaataaaacaaacaacctcaccatgagctttaggaccagaagaggaatgacaagtgaagcgatgaaccaagccatcctcacaagagtagaaaagacatcggagagttggtagataactgtctgaaaagacactttgttcatttgaaactattctgtgatacagtcatgtgggaagggatgtttggctgtgattattttttcagttaatggataacaatttctttactgctcaaaaaccaaaatctttggaaaagaaagtggggatggttagtttcagaacaagttacagctgtaaacaaaagcacttagtatttgggatggcatgccaaaacctgtataaatgtccttgtatcacatcacttctcaagtattccttcattgggcttcatccttttagcagaactcttggtggtgggatagagacttagggagggtagggggagagtgtggaaataggtgcttcctttggctggcaaatgtctacatcttgaaacaaacagatgtacctaatgagcttctccattcactttgtaaaaataatttgtatgtgtaccatcttggtcctctcccctcccgttttgttaaaatatcaggatagcactcccaggccactttggtctcagtgtaagatccctattaactatctgaaaggaaaatagagccaagacctctggtctcaaatatataggaattgcctttctttagtcttcaggactattgtgtgaaaacaagtaggggtctaatctcctagaaggtaggggcttttatccttaaagagaatatgtccccagattattagcacttttagaggagaagccaaggtatgtagggtgtgtggctggcccatcagtggagcacgaagagagaatgggataccattgtgggaagagaagaaaagttcctcaggggcctcccactgctaaagtttttgtgagatgttgatctgtgcttcctggatttgacttttaaaggaattattctggcagcacatgtagtattcttggatgatcttgctgctcttatttctcctttnnnnnnnnnnnnnnnnnnnnnnnngctatgggttttcatttgtaactccatctgcttaaggagagtgggctctctataagggaacctgctgtaaacttcattgcagcaaggatgtagagagaaataggacttaattccactagggggctctcatctcacaccttaaggaggagatttctagaaaaactgggccagattttctttgttctccatcattttaatgtggcaggctgttcagttttcttactcttacctatgtgatatttcttcgtaacgtgtcc

SEQ ID NO: 353691 - DNA, 412 bp, Homo Sapiens; identical to SEQ ID NO: 6163

SEQ ID NO: 353692 - DNA, 529 bp, Homo Sapiens
  misc_feature (39)..(39): n is a, c, g, or t
  misc_feature (57)..(57): n is a, c, g, or t
  misc_feature (64)..(64): n is a, c, g, or t
  misc_feature (72)..(73): n is a, c, g, or t
  misc_feature (75)..(76): n is a, c, g, or t
cttgaacttgccagatgcaaataccacagactccaaganaacccgagttggggtttnccttgtnttgatttnntnnttttaaagcgggtaaaagagaaaacactgaaaattgaattcttatcttccagaggctacaattattataatggacaatacttttacctttgtctctaaagatcagattagttttatttgttcacttacgtgctttgattatcccctctgaattatagaccgagtcttgttgtttagcctaagagaagatttatgtagtaatttcttctcaggtatggaaccacggtcataactaacatgttggccagaatagaaccactggttaaacatattttattcaccattaagtgatctttatcaatattctggattagacaacaaattacctttctgggtgtttcttgtaaactatactcctgtttgaatgttaaactttgttgctaaagtttaattttaagatgtttgaatgttcagtttatgtatttgaactacaataaaccaaccctttttatat

SEQ ID NO: 353693 - DNA, 421 bp, Homo Sapiens
  misc_feature (21)..(21): n is a, c, g, or t
  misc_feature (221)..(221): n is a, c, g, or t
catttccccctttgctggaanctatagaaggtctgcgaatgctgaagaagatacaaatgtcacttgactttctctgcatattcagaaatgtttaacagtggctgtagacagtcaacccatcgaaccagagaaatgtttaaaagaaaaacataaaactcaaacaaaaccttgtgaacagaacagtactttcatacccacagctgaggtgtcctgccccagtnacttacacttgggtgagtggtcctgtagttgtttctctgaggttacatttcgtccattttccagctctgatggttcttttcctgccttgttagttaggacaagacacttccatttaaaataccatgtgagtcaggaagagagcttcttgcctggacacagggacacatgaacacttgttgagtggtgtggtgtatgtgtg

SEQ ID NO: 353694 - DNA, 2021 bp, Homo Sapiens
  misc_feature (524)..(524): n is a, c, g, or t
ggaaaaagccaacaatagtgtaccatttttctatttattttattgctgcctaatcaataaagaatgcagagctgtcaaaaaatgtgtcttacattagctgtcccaacaggattgtcttccctcccagctctgttttaattggcttttagacccactatctgtcagatccttgccatctgtcagtgtctgcctgcgccacctccgtgcttgcttaacatcctgttgcatgtctagcgtgattgagctagatttttcaggcatgtctttagattcccttgttcttgtcaaagccttgttttgttttacatttgtagtgcaaatcactttgtcaaacatctccagcactaatgtttccatcttagtatttgtgcacactgctataacttccccactgcaaacattccagttttggcattacgaagaagtagctgtgaacctgaagtatttatgataagaaaaagaaaacatctctgctgtagcctacagcccagttgaaagaactctttgaaacgtgatacatcttnagcacctcagtctgggaagaatctagtcagcactgaaatcctggcataataaacacagaagatattcaccacctcaagacaaaggactattgtcaaaagtcagctgcttccattcaaatgctgccttaaacttgagtgcctaaatctgttgattgccaacactaccactacagtatcccacaaagggctttatgtgtcagctcagtgcgacctgctttaactctgcagcaccgctgccgtggccgatgtagcctcggtaggtggctattagagctctaccatatacagtggtgcatcttcaaatttatgcatcaaactaaagacatgtccaagtccattttaatttcctcagtggttttatgagaagttttatgggcctcccccaattgtctttttattttgggttatgacgatcatgtttgataattacaatgatagtctctttccacgtgatgcttttgtttggaacctgataaaatttagtgaaactttgtaatgatctatgtgcacttttacttgtaaaatggaatttctgtatgtttatacttgtaaatatgattgttgttagtgctcctgttgctcatggtgtcctgcctcgcatttgtgattctgttaatgacatgtatcttaactaatttcttagtggtgttgtaatagggagatggggcaggtggggggttatttgtaccactgaatcttcattaatttggttctttactgttttgaggggagaaagaacgtgaaatggtttgtgtattattgaattttaagcaatattttagaagctgtgtgactgctttaataactttttcccagtgttatttgaatcatactacccgttatactaaagctgaatgacaattgtgtgaaagttactgccttcataagatcaagtcaccactgttacacagctgacatatagtgtattacctttgcagctagtaaactataaagtttagatattgaatctcgttacagggttatttatataatgtgacattattcagtactgacagactacatgaagtagttttaaaatctagtgctatttttattttaaaggttagcaatgaggaggaaatgtgatctggctgtgtttgtcttctgtacaaagcctgaagtgcttatggttttttggctaacagccacagagggcaaagtttaagactttcttgtaaggactaactgttcttttcaagctactgtttgtttttctaaaagcaggatttgcttccgtaggaggcaagttccttgatgtggaatagtgcaacctgtatatgggttattataataggaaagacatttgtacttgcacagtttaaatcattcttaaattttgaacatgtgaattgtcccaaaaaatctttaattttttggtaatttttactctttttgtgcacatgttgatttcttaatggtaaatccttcatttaaagatagtgttctctgttgagaatatttacatggaataaaacaatcttttcatggccctgtaaa

SEQ ID NO: 353695 - DNA, 960 bp, Homo Sapiens
ttctgcccagggggaggaaatagtaggtcttttatgagggtctatcttgttagggggagacagtttagggcttagggaaagaagctctgaaacagttaaaagcaaattttttaaagcggtgtatataaagttgctaatgatgaggctgtgattttcaagttattgaaaaaaggccgtagagattaaaattaaatatacacagcttttccatagaaagatgggtattcaaaatattcaccatcacaatctctttgtaaattaaatagaccacaaatcaggattttccccggcataaaattactcatgccagtgaattcattaagaattttaaagcacacaaacattttagccttgtaaaacaaaagtatcctgaacagaatgtgggttactttccacactagttgttatttctaatataactgtgataggacaactgcatacatcttaacagctactacagaaatgtccttttccactttcatacactagacactagctgtcaaagacacataaaaatctaaaagctaaaatgttaaagtttgattgtgttgaagatttttctttaataaagctacttattttttgttaaatgatccaccttctactctgcattccaggtacttgtccaactctgcctccttcttcactgcttctggcgatactttgggtgcatttggaaaacagatcaaaatcacactcatgttgtctcgacttcccttatacaaacaggtgtcgactacttcattgcaaactttctcaaggtcatcagtgacttcaagtctggatcttacaaaatcacagagctcttcatttcccataacatcccagataccatcacatgcaaggataatgaactgatcatcttcttcagatctttcaatatcatggacttcaggctctggtgagacaagctgctcagtaggaccttttccatggacacatttgtaatcaaaatccccc

SEQ ID NO: 353696 - DNA, 1176 bp, Homo Sapiens
  misc_feature (369)..(385): n is a, c, g, or t
tcctctgggaatggttacagctttggtaaaaatttttgagggttatttttcccataattcattctgccacattttgaggcgtgtagcctgaccatggcttgctgcttcttccctgttcccaaaccccaagttcccaaaacacaccatggactggaaagggctatatatctgttgcatcacacaataagccaaaacatttcttgtaactttgatagtgatttaaagcagttcataattaaatatgagcattttgtacaaggacaattacactttacaaaaaaacaaaatcatacaacaaaaattgctggagtctgatttacaacacgaattatggtttgaaatcacgcttacataagtctcaaatttacnnnnnnnnnnnnnnnnntcagttctgggctagctgttgtactgctgaagttctctgatgtaatcattctcacccatgtcatatccccttccttaaagttgaggatggatgttaaaagtttcaacaaagttgagctgtactctcctttggaggtgaaggtaaactccatggctagatgagcagttttaccacatatcatctgttgatgtagagtcagtgtcgtcatttttgtaaggattcagtctattgtaaacggcttcaataacattcctcttgcttgccaattcaccccctggtgggaggctggggatgttctcactcgctaatgtgcgcatcacatggactaagtcggggacgccttccccctgcttctttatgatttcttctactctgcattccaggtacttgtccaactctgcctccttcttcactgcttctggcgatactttgggtgcatttggaaaacagatcaaaatcacactcatgttgtctcgacttcccttatacaaacaggtgtcgactacttcattgcaaactttctcaaggtcatcagtgacttcaagtctggatcttacaaaatcacagagctcttcatttcccataacatcccagataccatcacatgcaaggataatgaactgatcatcttcttcagatctttcaatatcatggacttcaggctctggtgagacaagctgctcagtaggaccttttccatggacacatttgtaatcaaaatccccaagggccctcgatacagccagagagccattcacacgctgaatcattacagagccacctgcattccc

SEQ ID NO: 353697 - DNA, 693 bp, Homo Sapiens
tgactttgcattctgagatgtttgcttggttacagctgaatcaaagcttaaacgaccattaaagtcagcgtttggaaagtaatgtgtaaatgtacctgtacttttcttttattctttatgtctttctgttcattgggcaacagctaagagggcccagcaaggtaatttatggttgagctgatgtcaattggttcttgtcttgagtcgactcaatttagcccaagtgctgaaacaagaaatgtcatttttttcatcaaagacaccagggcagatttttaagtaaagaaagacaattggacccttaagaatttatgcatttgtaaagttgctgttgatccaaatattttcaagccatgtaatccattggttttgtgggcagtttaataaacctgaacctttgtgtgttttctaattgtacctgagttgaccatcctttctttttatagtatatttcttgtatgatattttgtaaagctctcacctggttcttttatggggacttttcgtttttgggcaactccagtgtatttatgtgaaactttataagagaattaatttttccatttgcatattaatatgttcctccacacatgtaaaggcacagtggctccgtgtgttaaaaaacagctgtattttatgtatgctttactgataagtgtgccaataataaactgtgttaatgaccaaaaaaaa

SEQ ID NO: 353698 - DNA, 698 bp, Homo Sapiens
  misc_feature (98)..(98): n is a, c, g, or t
tcaccagtcggccagatggtatcgatctcatgacatcatgatcaacccacattggcatcaataagtgtgaggattccaggcagtgagcctctgcgccntgactagccatgttgtctttcaaagaacctcggccccagtgatggctgatctcactcccactgtctcgtagaattacactccttcctggggatccctcttcctgcagccttgtccttggggagtacagggaagtacctgcagtgaccctgcccccatgaccttggccaggcaggatgattccagagcccgtactgtggggatcctcactgaccagcccagccccatccgcaagccaggctgggcctgggcataacttcgctgggctctcccaagaccatcagcagtgcatccagccccctggggcctgggctgctgctggttcttcatcagtcccttggtctctagcctcggccagggctgctctgctctccgccctcctttgtgtatcaagtgtcgctcacagccccattcactggggagcctttcggatctatttggtctttctcatgtcccccactggtctgtaccccagggagcgggtgcttgtactgtgtgaatccagtgttcacattcacacttaatgacttccttggcaccaatcatgtatttcaccgtttgcactttttgtatttcaataaaaatgttgatgcaaaactgct

SEQ ID NO: 353699 - DNA, 513 bp, Homo Sapiens
  misc_feature (86)..(86): n is a, c, g, or t
  misc_feature (91)..(91): n is a, c, g, or t
  misc_feature (126)..(126): n is a, c, g, or t
  misc_feature (134)..(134): n is a, c, g, or t
  misc_feature (187)..(187): n is a, c, g, or t
  misc_feature (431)..(431): n is a, c, g, or t
  misc_feature (452)..(452): n is a, c, g, or t
  misc_feature (465)..(466): n is a, c, g, or t
  misc_feature (488)..(488): n is a, c, g, or t
tattttctaatatttagactttaatatttagaactagaggtcctattttcagctagttgaaaacagagaaaacctagtgattctgnctggncatcccacacacctctctactgagtgctccagagncttagctnacatgcactgagaattctttacagcaaaggaagagatttttagagtgggaagnaagaggcttatccttctgcattagtataaagagtctgtatttttaataaatgttaaataagctaacaatgtttgtacttatgcattccccatgggtaaaaataaataatagcattgttaaagatagttattaccaaaaaaagagagttattacaaataaatatgtctctttatttttaaaaatgaaatcttaattcatttactctatttgatgataaactataaattcattgaaaatgtgaatnctattatgggtagcctttttnccaattataaggnnaatttacagcagtgaacatgancattcacttagcttcctcagtctct

SEQ ID NO: 353700 - DNA, 603 bp, Homo Sapiens
  misc_feature (404)..(443): n is a, c, g, or t
actcggacccactttcagagtagctggaaccacaggtgtgtgctaccgtgcctggcacttttttgccttcttaatggagatattcagttttctttttttcatttaaacaaagaaaaaaatgtatctactctaccttccctctgctctcctccctccctatcctacttgcccatatgagcacggctccccatggccacatactcctgcaaagcttttatgctgcttcgcttttctctaaacagatctgatattgctgctcctgtggttttctcaaaattaactttgccgtggtttttaaaaaggaatcaaaatgcattgttgcattaagctttttcaataaaggaaaattacggaaggaaaataggcaacaccagcaaattatatgtggacaggttctaaactcnnnnnnnnnnnnnnnnnnnnnnnnnnnnnnnnnnnnnnnncgtaatcatctagttctgtcatcttactgaaaggaataacacttctaaagatcaccatttctgagaagttcttggaaatctttatgtctaagtgattgtattagatcagcaataatgactatgtaatctcaaaaaacaaataaaatattcttaacatgga

SEQ ID NO: 353701 - DNA, 873 bp, Homo Sapiens
gaaagtaagaattgcatctttacataatgatcaaggtataatggaaaaatatacctattcttgaagtagtttattatagttttcaaattgatttataccattattaacctgatgtggtctgcttaaaaaatgaatatatcagtatttagaaataaattgcaaaggtgggaatatatacttaaataatttgtcttaagtaaattagcatttggtagtctgaaatggtgacagattacttgttaaaattgtgaaaactctgttgtgtcctctcttcctacatttgtccctgagagtactccacgattactaggttcttgattcccttatatggcaatcaggcagaggcgttccttaagcattagagagttctgaagcttaagatttgttttggttggatgaagtccttagtacagttgaaaaacagagcattaaagactaatcaattgttttgcctcaccagtcattttaaatagtagaatacttatttctcagtgcttaaaatttctttttcaactgtgagattgaataaacagtctctatttctgtggaaaaaacaacagaaaagagatattaaataccataaaatgtaactctgccttttaaagttttgctgaagaatgtgtctgtggttaggatagcacaagcattaacttttgttttatagttatgctttttaaaattcattgtttttaaatttagacttcttatttccacactggattatgagatacttaacaatttttccaccttatatttcttttacacattttgctgttctcttttttgttattgttatgccaccataccattttgttaaaatgttttctttgtgaaacatttgttcaagttctaataaaattaatgttttccctt

SEQ ID NO: 353702 - DNA, 585 bp, Homo Sapiens
ggcacgagggacattttcagctcttaaaaagaagcaaggagattttcaaatgctagagtatctctatcagaaggcataggacattgtgtccaaagtctcaagaacaaacaacactttccttctgacctggtccaaaagtcagcaaacagcaagcaggcagaggccctcataaggacttttctgtcctcctttgaccaaactgtttaaccgagcctaggggtgacggggagcgacccaagctggcatctttctctacggagacagattttagaaaatacttttcttgcccatgaatttcttttctggttgatttttatcattttccctttacttacaagaaaataagattgcaaccactcctgctaatgatttagtagttccttttcatttcagtttttgtaaattaggagataattctaagagttactaaaggatgatttatttaagagaactacgtcaaatagcgaatgagttatgggtaacattagacgaaaataacctttcccgtgggaaaggtttctcgaaggcatggatgcaaatataaaatattaaaaaaaatctaaataaagcttattttaaaatatg

SEQ ID NO: 353703 - DNA, 1132 bp, Homo Sapiens
  misc_feature (101)..(139): n is a, c, g, or t
ttgtctgttctgttaccatgctgctacccaactgtgcaaagtagtttagggtggccagaacccagggaccattggatttcaaagcttgctttttctgttgnnnnnnnnnnnnnnnnnnnnnnnnnnnnnnnnnnnnnnnctgcccatgcatgaaaaggatcctccaacttcttcccacccagagctccctccaggcctttctctatatatttatttatctgacatacagaacacgactttagtgagcagagtgctgacagtcatggtccccttctttgggtctgtcttttgagagaggttgagttcagggcaagacagcctgccacacatccaagggtacgaccagtgggaccctggcctgagtctgttctccgaggggcctccagcagcttctgttcctccctgcagctgtgtctttcttgtcctgggtttaggatgcaggtgggccaggcaggtgttgttaggggaggcacccacttcaaaaggagggccacagtggggacacagagtccagcacctgagccctccaccctccccattctggttggttccatcagccacacttagaatctcccaggatcccttggactccgtcccccaacttgtcacagcagcctgagcctacccaccccaggagacaagagctggcaggaacatctgcctatatggggggtggcgttggccccaaagaggcttcaccagcaaaggaactgtgtgtattttaatgccaggggacggaggatgtgtgagctgttcagcaaggtctgcccaaggcctaaaactcaatttccttattcttttgcttctgctcgtccttaacaactaacagctcaacccacacctctagacaacagtagtcgtgctttctgctaacggtgacattttcagctcttaaaaagaagcaaggagattttcaaatgctagagtatctctatcagaaggcataggacattgtgtccaaagtctcaagaacaaacaacactttccttctgacctggtcccaaagtcagcaaacagcaagcaggcagaggccctcataaagactttttctggtcctcctttgaaccaactgttttaacccagccctaaggttgacggggaagccgacccaagctggcatctttctcctacc

SEQ ID NO: 353704 - DNA, 294 bp, Homo Sapiens
ggcatctagcggatcttacgtctcacccacacctctagacagcagtagtcgtgctttctgataacggtgacattattcagctcttaaaaagaagcaaggagattttcaaatgctagagtatctctatcagaaggcataggacattgtgtccaaagtctcaagaacaaacaacactttccttctgacctggtccaaaagtcagcaaacagcaagcaggcagaggccctcataaggacttttctgtcctcctttgaccaaactgtttaaccgagcctaggggtgggtggagagcgg

SEQ ID NO: 353705 - DNA, 124 bp, Homo Sapiens
  misc_feature (32)..(32): n is a, c, g, or t
  misc_feature (38)..(38): n is a, c, g, or t
  misc_feature (71)..(71): n is a, c, g, or t
gcattcaactggaacattatgttcaacgagtntatgtntatgtattttattaaaaaagagttctgatcatnagaagcatcagtaggcggcatttcattgtgctcattcacaaagtcaaagggcc

SEQ ID NO: 353706 - DNA, 927 bp, Homo Sapiens
  misc_feature (686)..(749): n is a, c, g, or t
  misc_feature (809)..(809): n is a, c, g, or t
  misc_feature (903)..(903): n is a, c, g, or t
aggctggaccggtccggattcccgggaaaaggacaacagagacacacggcattgttcatgggaggcatcgtcaccctcctgggtgttctgtgggaatttcctgtgtgaggaaaacgtggccacagggttgtgctgtacccacccttccccggcgagatggccctcggcctgtgccgctgcttccaccctcgccactccatggcagcttttggtctgtttccggctctgccctctgccctgaactctcatccggcttgtacctgcctgctggacccctccacctggaggccagccctagcctcttctcctcaaattctaagtgttttctctttaggtttccctggctttgtgaatggatcatgtgtctctaggtataaacctgacatcatctttccacccggcttacctccaccagatctccccagttctgtctccatcttctacctgcagctgctctgttctcatggtcactgctgcatcactgagtctggacccttgttatcattttcaaactggcctccttccctcgttccccacttcttaaagtcacctgtccattgccaccagattaagctttctccagccagatcacctctctctgagaaacctccattgacatggaaacaccattgtctggcacacatactcacatactcaccttcccgtcttgatccccacacatcttnnnnnnnnnnnnnnnnnnnnnnnnnnnnnnnnnnnnnnnnnnnnnnnnnnnnnnnnnnnnnnnntcccctctgaatccagcccagcgggtttctcctgcctccatcacatcacagaagtacctnctgcttctggttttaattagagccttccccgatttacattttcctctgaaattttttccgatctgacatttgatctgtcatgtttaaacccctnattttaagggaatttttctaagtg

SEQ ID NO: 353707 - DNA, 1569 bp, Homo Sapiens
  misc_feature (603)..(603): n is a, c, g, or t
  misc_feature (1035)..(1092): n is a, c, g, or t
acggctgaggtacagctgagccatccctgctgggtgatgctgggcaagacccttggcccgtctgggccttggcttcctcacttgtgaaaggagcgggaagatgactctcagttccttccacctcttagacatggtgaggtaacagacatcaaaagcttttctgaaatcttcagaagaaatagttccattacagaaaactcttcaaaataaatagtagtgaaaacttttaaaaactctcattggagtaagtcttttcaagatgatcctccacaatggaggcagcgttcctacttgtcatcacacagctgaagacattgtttcttaggtgtgaaatcggggacaaaggacaaacagagacacacggcattgttcatgggaggcatcgtcaccctcctgggtgttctgtgggaatttcctgtgtgaggaaaacgtggccacagggttgtgctgtacccacccttccccgggcgagatggccctcggctgttgccgctgcttccaccctcgccactccatgggcagcttttggtctgtttccggctctgccctctgccctgaactctcatccggcttgtacctgcctgctggacccctccacctggnaggccagcccatgtctcaggcccagccctagcctcttctcctcaaattctaagtgttttctctttaggtttccctggctttgtgaatggatcatgtgtctctaggtataaacctgacatcatctttccacccggcttacctccaccagatctccccagttctgtctccatcttctacctgcagctgctctgttctcatggtcactgctgcatcactgagtctggacccttgttatcattttcaaactggcctccttccctcgttccccacttcttaaagtcacctgtccattgccaccagattaagctttctccagccagatcacctctctctgagaaacctccattgacatggaaacaccattgtctggcacacatactcacatactcaccttcccgtcttgatccccacacatctttccagcctcccctnnnnnnnnnnnnnnnnnnnnnnnnnnnnnnnnnnnnnnnnnnnnnnnnnnnnnnnnnntgaatcagcccagcggggcttctcctgcctccatcacatcacagaagtacctcctgcttctggttttaattagagccttccccgattacattttcctctgaattttttcctatctacatttgatctgtcatgtttaaaccccctacttctaagggaacttctctaatctcttatcctcatccccaaatagtgttttcttcctctgggttcttataatgttggtatcaatctcacagcatttagtgcttcctgcctggtgtgacagttacctgtgtgcatgtgcaatttctaatttcccacgctagactgtgagcttcctaaggcaagaatcatgccttgttggtttctgtattcctcatggtgccaaacacagtgccttctacattgcaggcgctgaataaacatttttaaaggcaaaatgatgtgggatttttaaaataaatatttaagtgctgggtaaggatgaggcatgtatcc

SEQ ID NO: 353708 - DNA, 391 bp, Homo Sapiens
  misc_feature (53)..(53): n is a, c, g, or t
  misc_feature (84)..(84): n is a, c, g, or t
  misc_feature (93)..(93): n is a, c, g, or t
  misc_feature (286)..(286): n is a, c, g, or t
  misc_feature (291)..(291): n is a, c, g, or t
  misc_feature (348)..(348): n is a, c, g, or t
catggtcactgctgcatcactgagtctggacccttgttatcattttcaaactngcctccttccctcgttccccacttcttaaantcacctgtncattgccaccagattatgctttctccagccagatcacctctctctgagaaacctccattgacatggaaacaccattgtctggcacacatactcacatactcaccttcccgtcttgatccccacacatctttccagcctcccctcccactccactccctgctccctcctccacctccccatcctcttgtctccnctccnctctggaatccagcccagcggggtttgctttctgcctccatcacatcacagaagtanctgcttgctttctgggttttaatgagagcctttccccggaatt

SEQ ID NO: 353709 - DNA, 1330 bp, Homo Sapiens
  misc_feature (1108)..(1108): n is a, c, g, or t
  misc_feature (1124)..(1124): n is a, c, g, or t
  misc_feature (1133)..(1135): n is a, c, g, or t
  misc_feature (1141)..(1141): n is a, c, g, or t
  misc_feature (1165)..(1165): n is a, c, g, or t
  misc_feature (1181)..(1181): n is a, c, g, or t
  misc_feature (1196)..(1196): n is a, c, g, or t
  misc_feature (1217)..(1217): n is a, c, g, or t
  misc_feature (1223)..(1223): n is a, c, g, or t
  misc_feature (1227)..(1227): n is a, c, g, or t
  misc_feature (1229)..(1229): n is a, c, g, or t
  misc_feature (1244)..(1244): n is a, c, g, or t
  misc_feature (1246)..(1247): n is a, c, g, or t
  misc_feature (1269)..(1269): n is a, c, g, or t
  misc_feature (1274)..(1274): n is a, c, g, or t
  misc_feature (1276)..(1277): n is a, c, g, or t
  misc_feature (1285)..(1285): n is a, c, g, or t
  misc_feature (1290)..(1290): n is a, c, g, or t
  misc_feature (1301)..(1301): n is a, c, g, or t
  misc_feature (1303)..(1303): n is a, c, g, or t
  misc_feature (1305)..(1305): n is a, c, g, or t
  misc_feature (1308)..(1308): n is a, c, g, or t
  misc_feature (1325)..(1326): n is a, c, g, or t
atttaccccacgctttttctacaaacaactttgacgaattaaggttccttcccccaaggagtgggccaccaaatatctgcaacaattccctacccagttatcaggcactaccgtgccaaccttgggcaacaccaatgcattgccaagtccccaattggccctcaaagaccaaccctcataattcttcactttgttttttaagggcataggtatatattttggatcaaaatccttccaaatttgaaaacctcaataaaaataacacttattaaattctagttagtgtagcactcatgctgaagtaaacatgatcgtaggcagaagcaaaattttattataaaatctaaaacaaaactttatagagttgaatctattccatctgacttcaatatttgccaaacgtttattttacctcctagattgatgttggtatagtatccttaatacagtgtagtatattaatgtccttaatacaatcaggaggtttttacctttaagcaaataaattatgtcattattgaaaaagacttaagggatgattagacttggcaatctgtaagcaggagtataaatgttttaaattgcattgtccctatgtaactatcttaatggctatatatatgtattttataaagccatttatgtatacacatgtaacttggaatttccttcatcccctacacattttctacacttacatcaccttattgcataaaacaaagtcacgcgctttctgcttgaacatcaaaatatcaaaaaccaaggtacccaaaaagatacaagtcagagacaacatccttgtccatatccaaacccagtgtttcagtgctagcaacttaatttctcatacatttatagagtttggtttgctttgctagttgtgtgaatcattgggctgtttttagagccactgttaagagagaatataaaataatcatgacaattactactgtttccacatttacaaattgtgtacttaaatgaacctcatttcccttttatttctgaatggcttgtctgagaggaaacaaaattaaaattcatctgggaatttgtgcctcttgtctagtatatagtcaccactaaataatggcttccgtttttattntctttcaggttttgcnttaaatttnnnttcccnaaatagatgtacgtggagggaaangcaattattcttatcnccttttatttaaacntctttagatgaatactgaagnaaaatnctancnttaaaggaaatgtgngnntgtattttatgggtgagggggnaaagnanntttgtacntttcntcatataatangngnggnaattgctaatcagtttnntaaa

SEQ ID NO: 353710 - DNA, 1647 bp, Homo Sapiens
  misc_feature (90)..(90): n is a, c, g, or t
ccgttctgtttacttcagcatggggctacccaaccaaatttaataagggttattttattgagtttcaaatttggaaggattttgatcaanaatatatccctatgcctaaaaaacaaagtcaagataatcagtatgggctttagtaccaattttactttccaatccatttctttccgcagtatttcacttgtatccctcataacttcatagcaaattatccagattatatcttccagactactcagtgaaggaacctaaatctcaaatgttattttgaagaagtgtagagtaaataattttggtaatctgtaaaacagctgcatgcagtgtgtactgtattataacagcaccaaaccctttataaaaaccaaacactccttcctcctgccttatggtattgatacagtctctcattccctcatattgtgtattaattggaagcacttcatagccaaggtctgtattgtcaattattgtgcgtgttccttgaatgtgaaggcggtgcaaaactgtttccaatgggtaaagtataacgtcagaacaaagactggcagcaaagttagcaatcagttctggaaaataagcatccaacatactctgcacagggctagtgctctcagctaggtggctattgtaagtctttctctttagaattagtaggacaaacttctgaataactgagctgatgatgtaatgaagaactccatgaagcaccgtagggaagatcaaggaaagaagcggaagaagtcgtttgctatgaggcactcccatgcctatcactcttccaattccttctttaacacactccaaaatgccagtattatctcgaattatctcactctgcactgtttcaatcagacttgctgaataaaaaggcattgccaccacgtaagttagggatttcagtagaaggtgttctcctatttgtttaggactccatttatgtaaaacctcccttggcaaaggtgtaaattcactaattatgccttctgctccaagtgtgactcctggacaataaatgtacttcccattcctttccacagggctctaggtccctgagttttgttgaaactgtacataatattgatgactgtaaatggagtgagatggtaatgctgagcatggtaattaacctgacattggcggcgtagaacaatgcaaggatgtgccaatacattttctgtaaagagacttgcaagtccaataccaaatccagcaaatctattcagctgttcactgctctgcccctgcacactgccgccgccgccactggaaaagggttcctccgtggggccttcgtacggggtggaggtggtgggcacgccgtagggcgggctcttctcgccccagtgcaggttgcggctgccggggatatctgggggagtcgtcacccagtggcccaggtccgacccggtgctgaaggaccttgcagggaaggcgccgccaaagccctgctcgtcccgggcaccaccccggtagcccaagccatcaaatccgtccgggcgccgcggatgcatcgcagcgggggcaggatgacgcgagcccgcccggagcccaccaccaccggggccaccacgacctaagcacacacagcttcccgtcggccgccgccgcgtcaggggtaaattctgacaaccggaagtcccc

SEQ ID NO: 353711 - DNA, 761 bp, Homo Sapiens
cagaaatctcaccagtgtgctcactgtgagaagacgttcaaccggaaagaccacctgaaaaaccacctccagacccacgaccccaacaaaatggcctttgggtgtgaggagtgtgggaagaagtacaacaccatgctgggctataagaggcacctggccctccatgcggccagcagtggggacctcacctgtggggtctgtgccctggagctagggagcaccgaggtgctactggaccacctcaaagcccatgcggaagagaagccccctagcggaaccaaggaaaagaagcaccagtgcgaccactgtgaaagatgcttctacacccggaaggatgtgcgacgccacctggtggtccacacaggatgcaaggacttcctgtgccagttctgtgcccagagatttgggcgcaaggttcacctcacccggcataccaagaagacccactcacaggagctgatgaaagagagcttgcagaccggagaccttctgagcaccttccacaccatctcgccttcattccaactgaaggctgctgccttgcctcctttccctttaggagcttctgcccagaacgggcttgcaagtagcttgccagctgaggtccatagcctcaccctcagtcccccagaacaagccgcccagcctatgcagccgctgccagagtccctggcctccctccacccctcggtatcccctggctcatcctccgccaccccttcccaatcacaagtacaacaccacttctacctcatactccc

SEQ ID NO: 353712 - DNA, 583 bp, Homo Sapiens
  misc_feature (448)..(474): n is a, c, g, or t
  misc_feature (500)..(516): n is a, c, g, or t
ttataaataacccagtctcaagtgtgttttgttatagcagcacaaatgagcccaagataatacctccaagcaaactgcttttatttattcctggagtatatgtaacttatgaagtgtgaaactattctgattcttttgaagattgaggtcaggattcagttgacgctagagatgaatactgagtggctatttattggttttacttcaacatcatgtcctacatacaaaatttatataaaatcagagcataggcattaaaagtggaaatattttgttaaagccttgttcacaacttcttgaatttcataaaaccatttaagtcaggggtgatgacttttgatgatcattgaaagagggaatcaacagaaactcccaatgagagcaagataaacaatttgtgtcatgtataaaatgaacaaaacaaaaatgaaaaagagctgttcaatcnnnnnnnnnnnnnnnnnnnnnnnnnnnggggaaaagtttgggggtttggcccnnnnnnnnnnnnnnnnncccaaccacggctcttgggttcccaaatcccccgggccaatagaaactccccaccgtgtgggggggg

SEQ ID NO: 353713 - DNA, 1372 bp, Homo Sapiens
  misc_feature (71)..(107): n is a, c, g, or t
ggggaaatgtatacgaactcacttatagggggcgaaacctcgggaggctgttcaaccggcggtggcggcgnnnnnnnnnnnnnnnnnnnnnnnnnnnnnnnnnnnnnatcaggccaaatcggccgagctcgaattcgtcgagagcggagcgggtcctgccgcgccggcagccacaggctggcatagcggctgccgaccagccctcgttcctccaccacctgcacgggactgctgggcccgccccgccccgcctgcaggtgaagcggccgcagccgccgagtaggtgcgtggggatgatctcactcgcgcgctccgcgccaggaggaggaggagcgggagcggatccaacttccgggtagtggagccgcaagccaccggcatcttgctttttcttccccctcctcctgtgtgccccgcgccgctccctctttcccttttattcccggccccacccgccaaaatgaacagctcggacgaagagaagcagctgcagctcattaccagtctgaaggagcaagcaataggcgaatatgaagaccttagagcagagaaccagaaaacaaaggagaagtgtgacaaaattaggcaagaacgagatgaagccgttaaaaaactggaagaatttcagaaaatttctcacatggtcatagaggaagttaatttcatgcagaaccatcttgaaatagagaagacttgtcgagaaagtgctgaagctttggcaacaaagctaaataaagaaaataaaacgttgaaaagaatcagcatgttgtacatggccaagctgggaccagatgtaataactgaagagataaacattgatgatgaagattcgactacagacacagacggtgccgccgagacttgtgtctcagtacagtgtcagaagcaaattaaagaacttcgagatcaaattgtatctgttcaggaggaaaagaagattttagccattgagctggaaaatctcaagagcaaactcgtagaagtaattgaagaagtaaataaagttaaacaagaaaagactgttttaaattcagaagttcttgaacagagaaaagtcttagaaaaatgcaatagagtgtccatgttagctgtagaagagtatgaggagatgcaagtaaacctggagctggagaaggaccttcgaaagaaagcagagtcatttgcacaagagatgttcattgagcaaaacaagctaaagagacaaagccaccttctgctgcagagctccatccctgatcagcagcttttgaaagctttagacgaaaatgcaaaactcacccagcaacttgaagaagacacgaattcaggattcaacaaaggtcaagaattgaaggagcactggaaactgaacacatccccaatgaaatacaca

SEQ ID NO: 353714 - DNA, 439 bp, Homo Sapiens
  misc_feature (54)..(56): n is a, c, g, or t
  misc_feature (60)..(61): n is a, c, g, or t
  misc_feature (71)..(71): n is a, c, g, or t
  misc_feature (75)..(75): n is a, c, g, or t
  misc_feature (81)..(82): n is a, c, g, or t
ggtacaaaatatgtaaaacatttgtgctaagaactttctccctccccaaaccannnagannatgagaaatnaganaattannaaaattaaaaattgagtattctaactacagctcaacaattgaatcaaatgtcactgttttgtaaatactttatccataacgaaagatataaacatgcaaaaaacctgaatccatagtccaaataatacatacacatgttctgaagtttctgcacttctccatagactatgccaataaaacattatgtacacatactatttttacagtgaagtggaaaaatacagaaataaaaaagtgtacatggattaagaccaaaatgtgtctaacattctagtttatgaaaaaattcaattttgctacaaattggtgatatgaaaactccctttatttgcaaccagctgagtaagttttaagatt

SEQ ID NO: 353715 - DNA, 1189 bp, Homo Sapiens
  misc_feature (1175)..(1175): n is a, c, g, or t
ggctagtgtaacactgactatgagtaggtgggcccaccacttgaggtgatttcatggtgtctttccaggctcttgatagggtgtcactgcatgcaagccatgaatctgttttgagaatcctctccattttcccaaataaaaacctatcccaacagtgactatatcactcagcattggatctaaatataaaagtggtgctttcagtgtttttggcagatagtgttccataacctttccatcagaagggattttagacaccttagaggtccgtgctacatcttcacagttcctccgaataaccttaggtggtagtgttacttgcctttgacacctctgcatatgttttaatgactagatccaaactgtgttgttcttaaatcaaaaattggataatttttaatatttatgtattaatcacacagtgtgctctctgaagttctcttaagccttcagtttatactcttaatttttctttctgagctggagaactgactttgcactttggttacacagaacattggtttccaattcagtttaactgaaatttgctgctgatatgttgagtttgttctttaaaaaatagctcatatatctcatctttcctcctgtcttagaagaacagacctaactagcgaatgtatgaatgaaaatgcatctatttcagagccgacatgaagagtttagtttttttactttataaactgtgaatatgagtatgccagctgcattagatgtaactaatcatatttaaatatatttcactttgactttagaccttttgaagtctgtataaacttgttttgaaatacagtctccacttacgaatgtcataacaaaatacttttttgcatgataaaaaattactttgattacaaaaggcatattctttcatggtttctgcaatgagaggaagtgtaatgattattttaatatttctattaaaactgtatatttttatggctgctcttttatgttacccactgtctctttggggttgttaattggtttctgaaagggaacttcaaactcctttactactggccttccatggttggtccctattaggtttttgtgagaacgtcgaccaactctttgatacccgccaggtagaccgtagtacctgccatgtctgacaccctgcatccaagctaaaaccagaaacagcgctgggcctnccctgtggaaagta

SEQ ID NO: 353716 - DNA, 834 bp, Homo Sapiens
  misc_feature (28)..(28): n is a, c, g, or t
ctgggaaaatttaaggggcaccggattncccagggcattatggccccaagtaggagggagggtgaggttatccagtttttttggaatgcattggctttgatccccctactcttgattttgttgtattttgcatttaaataaaagtgagcttgggaggaagaactggaagttttagtagttgattttcagccaagtgaaagttcttctaacagagaaagttttgaaaaagtaccatcttctatatcttctatcaaatttcctgtaaaatcgagtcttcttaagttaggtatgtctgcaaaatctttggcagtcagctttttaattttgttgaatcgtgcgtaaagataggctgattcctttggtaagggtggtacagcatcaatgtcaacttcttcacagtatacagagccacttaaacaaacacacagcagacacgtgggcatttcatcattttctttcttgggaggtaatggtgttattgcctcatctttttgtaattgaagacttttctcattgggtattatcacagtttctttttccttaatattttttccatccaggtatttatcctcataatcttggctaaatatggattcttcaaaattatctgttccataatcatagataatgcgtgagtcctgctgggttggtggtgctggctttatcagaggcacaagcagtaacaggagaagtgtagactgcagagtcttcattttagcaaaaatcaaggtgactggaagttaataaactagtggcctgctgactgtgggacaaaactctctttttccctggaaataaaaattcagaccatcgaagcaatatttaaaagcttcc

SEQ ID NO: 353717 - DNA, 461 bp, Homo Sapiens
ctcttgttgccttcgatttcggcaaagcctgggcaggtgccaccgggaaggaatggcatccgagatgctgggcggggacgcggcgtggccgagggggccttgacggcgttggcggggcctgggcacaggggcagccgcagggaggcagggatggcaaggcgtgaagccaccctggaaggaactggaccaaggtcttcagaggtgcgacagggtctggaatctgaccttactctagcaggagtttttgtagactctccctgatagtttagtttttgataaagcatgctggtaaaaccactaccctcagagagagccaaaaatacagaagaggcggagagcgcccctccaaccaggctgttattcccctggactccgtgacatctgtggaattttttagctctttaaaatctgtaatttgttgtctattttttcattctaaataaaacttcagtttgcaaaaa

SEQ ID NO: 353718 - DNA, 429 bp, Homo Sapiens
ctttgtctgttctccttcaaacctaaatgaaaaggtgtaattcctaagtgcctgggtgccatatcaatcccaggataatattctgccccaactcccatcctctgttactagatcccttaccagtcacatttgtggactggtggcccagtcgtataccatccctggaaggattctgggacaatattcccagggattcattgacttcttggctccttttctccatttcctttgggggaagggggaattgaccatgcttaagtgcatcctatcaaggggcagctccgtccccatggccattggatcatgagacactctgaagtcagaaggctggggcagatcacttcaagcaagcccccatgatggttctcagtcctgcttctctgtgggtacgtgcccctctgtttaaaaataaactgaatatggatgttt

SEQ ID NO: 353719 - DNA, 2495 bp, Homo Sapiens
gcatccgctcggacgcggcacgttgtcttgcgcgctttgcccgcctggccctgggactctgaccctcggctaccctttcctgccccactagcgtggccgcgagcctcggtgagccggccgtattcccgctctcgcttagggggcacaggcgcaggcatcggcccggccactccaagccttcggtgcgcgggcgcgtctgggatacgggcccgggaggcgccgccctccgtccgcccggtgcctctcaggaacagcgaaccggagagagcgccggagagttgggctcagtgcagagctcggcgccggggcccatgcccgtgcgcccccgcaggccggcgccatggcctccgggagtgtggccgagtgcctgcagcaggagaccacctgccccgtgtgcctgcagtacttcgcagagcccatgatgctcgactgcggccataacatctgttgcgcgtgcctcgcccgctgctggggcacggcagagactaacgtgtcgtgcccgcagtgccgggagaccttcccgcagaggcacatgcggcccaaccggcacctggccaacgtgacccaactggtaaagcagctgcgcaccgagcggccgtcggggcccggcggcgagatgggcgtgtgcgagaagcaccgcgagcccctgaagctgtactgcgaggaggaccagatgcccatctgcgtggtgtgcgaccgctcccgcgagcaccgcggccacagcgtgctgccgctcgaggaggcggtggagggcttcaaggagcaaatccagaaccagctcgaccatttaaaaagagtgaaagatttaaagaagagacgtcgggcccagggggaacaggcacgagctgaactcttgagcctaacccagatggagagggagaagattgtttgggagtttgagcagctgtatcactccttaaaggagcatgagtatcgcctcctggcccgccttgaggagctagacttggccatctacaatagcatcaatggtgccatcacccagttctcttgcaacatctcccacctcagcagcctgatcgctcagctagaagagaagcagcagcagcccaccagggagctcctgcaggacattggggacacattgagcagggctgaaagaatcaggattccctgaaaccttggatcacacctccagatttgcaagagaaaatccacatttttgcccaaaaatgtctattcttgacggagagtctaaagcagttcacagaaaaaatgcagtcagatatggagaaaatccaagaattaagagaggctcagttatactcagtggacgtgactctggacccagacacggcctaccccagcctgatcctctctgataatctgcggcaagtgcggtacagttacctccaacaggacctgcctgacaaccccgagaggttcaatctgtttccctgtgtcttgggctctccatgcttcatcgccgggagacattattgggaggtagaggtgggagataaagccaagtggaccataggtgtctgtgaagactcagtgtgcagaaaaggtggagtaacctcagccccccagaatggattctgggcagtgtctttgtggtatgggaaagaatattgggctcttacctccccaatgactgccctacccctgcggaccccgctccagcgggtggggattttcttggactatgatgctggtgaggtctccttctacaacgtgacagagaggtgtcacaccttcactttctctcatgctaccttttgtgggcctgtccggccctacttcagtctgagttactcgggagggaaaagtgcagctcctctgatcatctgccccatgagtgggatagatgggttttctggccatgttgggaatcatggtcattccatggagacctccccttgaggaggtgaattcaggccaaaagggctgttggctgtaatcctacgccaggcacaaggcatcttgttgccttgccacgtcctgtcacagctgggtatccttaccatgttccacgcccttgcagtgggagacaggatgtccatgttctctaccatccttttccttcccatgcagattgtgaaatgtaatgagatgtatcaagatatcctagaaataaaaaccagatgtccacctccagtgtttcatactttctggttttacacatcgctggagggataaagagtatggataatctttggatttggagagccgttcaagatacttccagcttcttggctcagcctggcttcctctggttcagccccacataatgattatggctatttgctgtcatttctgggctagggctcctttctaacaacctagactggaataaggccctgtcagcatggctccctttatcccagttttccgtctgggaacagtacctctgcccctgattcccaatgtgccatagttttattaactccattaaagaagcctgtatgtgttttggttagttacagttatttaacaataatggtgggtaatggcccacctctgtcatgagataa

SEQ ID NO: 353720 - DNA, 801 bp, Homo Sapiens
agagtatggataatctttgcgatttggagagccgttcaagatacttccagcttcttggctcagcctggcttcctctggttcagccccacataatgattatggctatttgctgtcatttctgggctagggctcctttctaacaacctagactggaataaggccctgtcagcatggctccctttatcccagttttccgtctgggaacagtacctctgcccctgattcccaatgtgccatagttttattaactccattaaagaagcctgtatgtgttttggttagttacagttattttacaataatggtgggtaatggccccacctctgttatgagataatgttctaatcaatgtctctgcctttgtatcttttctgagggctttgtctgttctcttcattctaatgaaaggtgtattctagtgctgggtgcatatcatccaggataatattctgcccaactccatcctctgttactagatcccttaccagtcacatttgtggactggtggccagtcgtataccatccctggaaggattctgggacaatattccagggattcattgacttcttggctccttttctccatttcctttgggggaagggggaattgaccatgcttaagtgcatcctatcaaggggcagctccgtccccatggccattggatcatgagacactctgaagtcagaaggctggggcagatcacttcaagcaagcccccatgatggttctcagtcctgcttctctgtgggtacgtgcccctctgtttaaaaataaactgaatatggatggtttaccacaac

SEQ ID NO: 353721 - DNA, 260 bp, Homo Sapiens
gcgcatgtgtgtttgcatgtaggagaacgtgccctattcacactctgggaagacgctaatctgtgacatcttttcttcaagcctgccaacaaggacatttcttaagacccaactggcatgagttggggtaatttcctattattttcatcttggacaactttcttaacttatattctttatagaggattccccaaaatgtgctcctcatttttggcctctcatgttccaaacctcattgaataaaagcaatgaaaaccttg

SEQ ID NO: 353722 - DNA, 1316 bp, Homo Sapiens
gcctttcctttcatcatcccaaatttcccctgccatgtgtgctgatcctgctggcaggaccacatttctttgccactgatctcaatggccagtgatgtaagtcttttgcctgtcttcttgagactcgttgagatctttgttgagaaccactactatcattcactagctcatatctgccggcagcaattgaagagatccaatatttgaagattggccttcatttctcgatgttctttccatgatggggatggaggtgttcagtgccaccgtggctgttacttttcaaagtagttgaagtattgaaaatgagtaatgttggtaaagtgaattcaaaatcctagtatgctaaagggatggtacaagtctagcacagattgtacgtaatgatacatctactagaaacatacattattcatcaaaagaaaaaaatgagccggcatttaccaaatggagatgcagtagagtccataggctctaaaaactaaaagaaatgggatgcagggggaacaagttatttgtcctgagttactgtacttgcttgacatggttgttgggtactaaatcacaaaagaatccattccaggtatgcatgtctgggggttgggctgtgtctagattagaaactgggtttcaagctttgcatgatgggagagcgtcctctcctctatcagctgcgtgtgttctggataggacagtagcccggagatggaaaccaccttcagtaccattagcccaccataccaagtaacaagttaggcaggaatcgtgggaatttattgagtcagctttgagtgtttgagagaatgtaaacaagattggctcgaattgtaaacgtttgtactttggatgagttcatggttctttaggtcaccttaataccagctatctttggtagaagctacagcattcagtttctctggaaactgtatcacatttttgcattttaaaaattttacagtatcaaaaaaccaaaatctgcttatgaaacaaaacatgaagcaggacatatttggattctatttatttaaaattaaattctttgcaaaattgaacttctcaactaaaacgtgtccatgtcagaattttaactgttagcaggtagtttgtggcaaagatggctaaataatgaagcaaattagaatctgtgtgtatactaatgagctgctttttttctgttgagactatcattatttgtcttattacccaagaggcaattacctgaatttggatgtctgaattataacttatgcaggaatagttctgtaaatacatttaaataaactgtaaagatatttaataaatatagtatttatact

SEQ ID NO: 353723 - DNA, 1044 bp, Homo Sapiens
  misc_feature (87)..(96): n is a, c, g, or t
  misc_feature (139)..(167): n is a, c, g, or t
ggctggaccggtccggattctcgggattgaacagagggtgtggtggctgtttgaatagagctcctgttgtaaaggagcagggaagannnnnnnnnnaagcttcagtttcatgtaatttcttggagttttgtttaactgnnnnnnnnnnnnnnnnnnnnnnnnnnnnnattctactagggtatactgacaaaccaaaactgcctggaatgcaagcatttgtctcctagtacttaatttaagtacacattttttattgacttttccttttaaaatatactgataggttctcattttcattgtaggtggaaagccagatgacatcaccgtccttctttcaatagtggctgagtatacagactagctgaggtgtcaagtcctgcctttcctttcatcatcccaaatttcccctgccatgtgtgctgatcctgctggcaggaccacatttctttgccactgatgtcaatggccagtgatgtaagtcttttgcctgtcttcttgagactcgttgagatctttgttgagaaccactactatcattcactagctcatatctgccggcagcaattgaagagatccaatatttgaagattggccttcatttctcgatgttctttccatgatggggatggaggtgttcagtgccaccgtggctgttacttttcaaagtagttgaagtattgaaaatgagtaatgttggtaaagtgaattcaaaatcctagtatgctaaagggatggtacaagtctaacacaaattgtacgtaatgatacatctactagaaacatacattattcatcaaaagaaatgttacatgtgtactccacaggcatagtctttgttatgatgattggtgtggctttatgtctttgttataaactcctatttttcaggggcttatgattctgctctaaaacattgctctgggttatacagttttgatcccaaaagcttttttgttacaaatcgggagaaaaatccattttagttctatggatggaaatatttcatgcttttaaaaagatgtttgtgtccctgtgaaagtaggt

SEQ ID NO: 353724 - DNA, 808 bp, Homo Sapiens
  misc_feature (677)..(677): n is a, c, g, or t
  misc_feature (777)..(777): n is a, c, g, or t
cccacatcggtccgtccctgcttccagctgctgcagcgcgccttcgccgccaaagcatccagcagccccctgctccggcccagcatggcgaccccgacccagacccccacaaaggctcctgaggaacctgacccattttactatgactacaacacggtgcagactgtgggcatgactctggcaaccatcttgttcctgctgggtatcctcatcgtcatcagtaagtgcgacccattcctgggctgcctcagcctccgcttcctctgctggctttcatccatatcctacccgctatgtcctgtcttcttgttctgtctctctctcccaacaggcaagaaggtgaagtgcaggaaggcggactccagcccaacctgcaaatcctgtaagtctgagcttccctcttcagcccctggtggcggcggcgtgtaacaccttcccgaggaaactccgctgccgaccctgcccgagcgcgggagcctgaggaccgggtggaggcggtggggacccagccgcgcgccgggagcgctccccggaatgagccgccccacccaccccaaggctggagccgctgcaccctgctgtccctctccaggccttggcaatgacgatcccccaaagagcccgtctgcaccccagacccagggcctcaggcctccagctcctgggatccgggagtncatcccggcccagcacccccagcatccccgtgtatggccccctgcacctccttgtctcatccccgaagatccgtccccctggcccctcagtgtccatgtnttgagcttaataaatgtgcatttggtttttt

SEQ ID NO: 353725 - DNA, 336 bp, Homo Sapiens
  misc_feature (62)..(74): n is a, c, g, or t
ggaccgggtggaggcggtggggacccaaccgggggccgggagggctccccggaatgagccgnnnnnnnnnnnnnaagggtggagccgctgcaccctgttgtccctttccaggccttggcaatgacgattcccccaaagagcccgtttgcacccccagacccagggcctcaggcctccagcttctgggatccgggagtccatcccggcccagcacccccagcatccccgtgtatggcccccctgcacctccttgtttcatccccgaagatccgtccccctggcccctcagtgtccatgttttgagcttaataaatgtgcatttggttttttcctttg

SEQ ID NO: 353726 - DNA, 2933 bp, Homo Sapiens
  misc_feature (594)..(655): n is a, c, g, or t
  misc_feature (1391)..(1436): n is a, c, g, or t
  misc_feature (2314)..(2314): n is a, c, g, or t
  misc_feature (2352)..(2352): n is a, c, g, or t
  misc_feature (2400)..(2400): n is a, c, g, or t
  misc_feature (2492)..(2492): n is a, c, g, or t
  misc_feature (2495)..(2495): n is a, c, g, or t
  misc_feature (2547)..(2547): n is a, c, g, or t
  misc_feature (2807)..(2807): n is a, c, g, or t
  misc_feature (2895)..(2895): n is a, c, g, or t
ctcgatgctggggaacccaggacatgctgaacccacagccccatctgccacagagggaacctcacgatacaaatacaaagttaccctcgatgttggggaacccaggacatgctgatctcacaggatggcgactgcatggcgcagccgcgtggaaggaggcagaagaaggagaagtgcgcctgggtgcgcacccaggcgcacttctgggggccttctttcagcaggggacagcccgattggggacaatggcgtctcttggccacatcttggttttctgtgtgggtctcctcaccatggccaaggcagaaagtccaaaggaacacgacccgttcacttacgactaccagtccctgcagatcggaggcctcgtcatcgccgggatcctcttcatcctgggcatcctcatcgtgctgagcagaagatgccggtgcaagttcaaccagcagcagaggactggggaacccgatgaagaggagggaactttccgcagctccatccgccgtctgtccacccgcaggcggtagaaacacctggagcgatggaatccggccaggactcccctggcacctgacatctcccacgctccacctgcgnnnnnnnnnnnnnnnnnnnnnnnnnnnnnnnnnnnnnnnnnnnnnnnnnnnnnnnnnnnnnnaagacttccaataaaacctcccccccacatcggtccgtcctgcttccagctgctgcagcgcgccttcgccgccaaagcatccagcagccccctgctccggcccagcatggcgaccccgacccagacccccacaaaggctcctgaggaacctgacccattttactatgactacaacacggtgcagactgtgggcatgactctggcaaccatcttgttcctgctgggtatcctcatcgtcatcagcaagaaggtgaagtgcaggaaggcggactccaggtctgagagcccaacctgcaaatcctgtaagtctgagcttccctcttcagcccctggtggcggcggcgtgtaacaccttcccgaggaaactccgctgccgaccctgcctgagcgcgggagcctgaggaccgggtggaggcggtggggacccagccgcgcgccgggagcgctccccggaatgagccgccccacccaccccaaggctggagccgctgcaccctgctgtccctctccaggccttggcaatgacgatcccccaaagagcccgtctgcaccccagacccagggcctcaggcctccagctcctgggatccgggagtccatcccggcccagcacccccagcatccccgtgtatggcccccctgcacctccttgtctcatccccgaagatccgtccccctggcccctcagtgtccatgtcttgagcttaataaatgtgcatttggttttttcctctgnnnnnnnnnnnnnnnnnnnnnnnnnnnnnnnnnnnnnnnnnnnnnngacgggcagccccaaagaaaccactacaggggcccacgcactaaaacccccaaggtttctttcccgaaaggcgcctagaccagagcctcgaaagtcaccccctaccgtatgtggtttcccctttccccatctccccctcttcgccacccacgcccattttcccgatccctgtggcccaccgcacgccaccccgcctatttttatcgctcttgcccgtcttccgcgatttccctccgccggaagcttctgtcggtattctccgacacattactcccctttcaacctgtctcacatgtcgcccttctacgcctcggcccaccccgttctctgcctcgcctcccacccctccccaccctaccttcaccgtttcgtttttagtccacttgaccctcttcccgcaagttgccgcgccagatggccccgactatctcacattccccggccatccattatcatatacacgaaaacaaccgccagagggcgcccctatcaaaccgcgcgccgcgacgaatcggccaccctcaactaaatactctctctctcgcccccgctatttttccgcccgccggatcccgcatctcattgtgagagtggaacgcaagggtcgcgccgtctactcgcccggcttctctcctctaacacttccgcccgcgcacagctcaaacattcgaccgattgaaagaacagctaagccacgcgcccatgaaccgctatatctgcgtatgccgcgccccgctcacccgctgcgtacaataccacgtctgtggtcctacccgcacgtctataatgctgccccctcgcacgctacagtgtgtggcacgagcgttcgtacatcacgataagcgctgacttactctctctgtttacgttaatatatnagccaccccatgctccgccctctctgtatcctcttggntgttcgctcctacgacagcacgtgacgcgagcgtgtatactactcatnatataatatgagtagcctgcgcccctagtatctgcctcgagcctcacttcatccggcgcgtcactctgacatcgcacgcaccctccgtctcntantagattcctctagatcgcacgcgcctgcccgctgatactattacacgtcgcnacgatctcaggaggactatcagcatatattgtatgatccgctcgcacgcgcacgcgcgtcgtcctctattttctacgccttcccgtttatctcagcccgccctgctcaccctgcccccatccactattgttttcgcgtcctcgcacttctcccgcaagttaattcgtctgcaccataagtgttttgccccgccgccccctacgcactatatgtataatcgcgcccctgcctctcacctcatcttattgctctggttgctntttaagccttcctccccccacccacccgcccttgtttgcccggtattgcggctccattacttcgcccggaataccggatacgagttantctcctcagagcccccggccctgagtaaccatcgtaga

SEQ ID NO: 353727 - DNA, 677 bp, Homo Sapiens
  misc_feature (103)..(103): n is a, c, g, or t
  misc_feature (108)..(108): n is a, c, g, or t
  misc_feature (127)..(127): n is a, c, g, or t
  misc_feature (134)..(134): n is a, c, g, or t
  misc_feature (159)..(159): n is a, c, g, or t
  misc_feature (163)..(164): n is a, c, g, or t
  misc_feature (173)..(173): n is a, c, g, or t
  misc_feature (252)..(252): n is a, c, g, or t
  misc_feature (268)..(268): n is a, c, g, or t
cagcagataaggcagatgctggaaaatttaaccacatataattacatctcaaaattacaatcagatggatgtttaatccttgtcactaaaatggttactacgnctgtntgagtggtcataaatgaantgtcatntgtatcaatagtaaatagcaaaatntacnntgcctatanagtcgcaaaacagtttgtataatagtttaccattacaattaatgtacccatacctcaaaacacatttagaatttaaaanaactggcttggaaaanaatcacaaaaaatttaagtgacaacaaatcttgattaactagtccatcttcctaccacacatgattatactctaatgtagatattctggttgaatttcttccaaccaagtttgaagggccccagtagaaaatcaagtgttaatactttcagatttttattgtccaaaactgttgacaaagaaaagctaacttcaacataacttgtttctggctatacaaagacctatttcaggtgctacagatactgaaaataggagtattttacttatttctcaagagacagacttatgccatctaagaaaatgaattcagtttttaaatgatttatagtaaggaaaaacaggaaaacaattccaaacgaaggattgactctgataggcttacaacaaaaatattcagtttactattt

SEQ ID NO: 353728 - DNA, 395 bp, Homo Sapiens
  misc_feature (45)..(45): n is a, c, g, or t
  misc_feature (81)..(81): n is a, c, g, or t
  misc_feature (214)..(214): n is a, c, g, or t
  misc_feature (225)..(225): n is a, c, g, or t
ctcataagtattctcaggagactattattttggagcccccatgcntcccttcctcaggatttgcaggcagtaattatttantatcggtctggggctataggttctttcctcaagaattcattgtgtatgtgaactgccttatattttcctgttcgagaactaacttatgccttaatcctagaatcaggcttgtatgtttgaacttaattagaanagaggcgcccnagaaaaggatgtaaggggctctcccttgaggctgccctgctcactgtgggctgaccaaaactactgacaccttcggagtatcatgacacccctgcacacgttcctgaaggctcttttgccatgtagcactctggaagaaatcctctgtcccagtttattcttgagttttt

SEQ ID NO: 353729 - DNA, 1087 bp, Homo Sapiens
gtggacgaaaccatagggctaggtacgaggccgggtggttaattcggccgaggagcgcttcctcctccccgccgccgccctcgccatggccgcgccggccccgggcctcatctcggtgttctcgagttcccaggagctgggtgcggcgctagcgcagctggtggcccagcgcgcagcatgctgcctggcaggggcccgcgcccgtttcgcgctcggcctgtcgggcgggagcctcgtctcgatgctagcccgcgagctacccgccgccgtcgcccctgccgggccagctagcttagcgcgctggacgctgggcttctgcgacgagcgcctcgtgcccttcgatcacgccgagagcacgtacggcctctaccggacgcatcttctctccagactgccgatcccagaaagccaggtgatcaccattaaccccgagctgcctgtggaggaggcggctgaggactacgccaagaagctgagacaggcattccaaggggactccatcccggttttcgacctgctgatcctgggggtgggccccgatggtcacacctgctcactcttcccagaccaccccctcctacaggagcgggagaagattgtggctcccatcagtgactccccgaagccaccgccacagcgtgtgaccctcacgctacctgtcctgaatgcagcacgaactgtcatctttgtggcaactggagaaggcaaggcagctgttctgaagcgcattttggaggaccaggaggaaaacccgctgcccgccgccctggtccagccccacaccgggaaactgtgctggttcttggacgaggcggccgcccgcctcctgaccgtgcccttcgagaagcattccactttgtagctggccagagggacgccgcagctgggaccaggcacgcggcccatggggctgggcccctgctggccgccactctccgggctctcctttcaaaaagccacgtcgtgctgctgctggaagccaacagcctccggccagcagccctacccggggctcaacacacaggctgtggctctggacatccggatattaaaaggagcgttgctggtaatatccgcccgctaccac

SEQ ID NO: 353730 - DNA, 958 bp, Homo Sapiens
  misc_feature (83)..(93): n is a, c, g, or t
  misc_feature (266)..(274): n is a, c, g, or t
  misc_feature (735)..(735): n is a, c, g, or t
  misc_feature (782)..(782): n is a, c, g, or t
  misc_feature (871)..(871): n is a, c, g, or t
aaaatgtgtgctctttactgtttttcatttttaaagaatattattatggaagcacgatttatttaaataggtacattgagacnnnnnnnnnnnaatgttctgatacattaggatgaagttaaatcttaaatcttattagttgaattgttgtaaggacagtgatgtctggtaacaagatgtgactttttggtagcactgttgtggttcattcttttcaaatctatttttgtttaaaaacaatacaagttttagaaaacaaagcattnnnnnnnnngcctatcagtattatgggcaatatgtaaataaataaatgtaatatttcatcctttatttttcaggtaaaaggtcatgctgttacaggtgtagtttgtgtgcataaataatacttccgaattaaattatttaatatttgactgatttcaataactgtgcaaaaataaaaaaggtgttgtattgcttgtgcagaacttgaactgtttactagttaattgaagaaaaagtgtaacactaaggtgaacttgcttcccttttcactaattttgctaaactttgtaatgcacattcttagcatataactgaacacaattgaaaaattgtgcctgattataatgtatgtataatggtaggtgtttgtgtgtgattcatttttaaagaaatatttttctcaagctcctattactatttgtggttgtattatttcactaatcattagttaagactgtgctagtcttcccngggaaactaagaagagagcttttttatatacagtatattagaatttncctagtagctgaatttctgtattaggtctaaatattactgtatgttatataaagcaggtatgtcaagtgtatagccgtagtctataatncaggaatgctttataaccatcagaagccattatttgcactacatatatgataagtatagacagcaataaaatgttaagatcattttt

SEQ ID NO: 353731 - DNA, 1042 bp, Homo Sapiens
  misc_feature (33)..(33): n is a, c, g, or t
  misc_feature (45)..(45): n is a, c, g, or t
  misc_feature (67)..(80): n is a, c, g, or t
  misc_feature (128)..(128): n is a, c, g, or t
  misc_feature (479)..(479): n is a, c, g, or t
  misc_feature (840)..(841): n is a, c, g, or t
  misc_feature (917)..(926): n is a, c, g, or t
  misc_feature (930)..(930): n is a, c, g, or t
cctcactgaagggctagagtttaacttttaatnttttatatttanatgtagacttttgacacttttnnnnnnnnnnnnnngacaagagagatgaaaacgtttgattattttctcagtgtatttttgtnaaaaatatataaagggggtgttaatcggtgtaaatcgctgtttggatttcctgattttataacagggcggctggttaatatctcacacagtttaaaaaatcagcccctaatttctccatgtttacacttcaatctgcaggcttcttaaagtgacagtatcccttaacctgccaccagtgtccaccctccggcccccgtcttgtaaaaaggggaggagaattagccaaacactgtaagcttttaagaaaaacaaagttttaaacgaaatactgctctgtccagaggctttaaaactggtgcaattacagcaaaaagggattctgtagctttaacttgtaaaccacatctttnttgcactttttttataagcaaaaacgtgccgtttaaaccactggatctatctaaatgccgatttgagttcgcgacactatgtactgcgtttttcattcttgtatttgactatttaatcctttctacttgtcgctaaatataattggtttagtcttatggcatgatgatagcatatgtgttcaggtttatagctgttgtgtttaaaaattgaaaaaagtggaaaacatctttgtacatttaagtctgtattataataagcaaaaagattgtgtgtatgtatgtttaatataacatgacaggcactaggacgtctgcctttttaaggcagttccgttaagggttcggtttaaaactttttttnngccatccatcctgtgcaatatgccgtgtagaatatttgtcttaaaattcaaggccacaaaaacaatgtttgggggnnnnnnnnnnaggnaaaatcatgccagctaatcatgtcaagttcactgcctgtcagattgttgatatataccttctgtaaataactttttttgagaaggaaataaaatcagctggaactgaaccct

SEQ ID NO: 353732 - DNA, 498 bp, Homo Sapiens
catttagtgacaaaggattaaaacatccatctggatgttaattttgaagatgtaaattatatgttgtttaaatttttccaggcatctgaaaaccttatctgctagacaatgtaagattcacacagagttatctgggattctgattttttaaatagtacatatcattaaaccattttctctaaatgtaagaagagcagaaaaaatcttataagattatcagatttttctaatgacacagaaatgtaagaaaaaaatccctttatattgaaaaaagatgcagtcaaagtcttttcagacatgcccaaactttgagaatttcttcaaccatctaatgctataaagatttttgttcttcctgttcacaaccagttgtataacagaaatactagctactgttttccttcctgtgtgtgaagtaatgaatcattgattatgtgacttgttatgtattcaattaaacactaaagaataaaacattcactcctttaattataaaaa

SEQ ID NO: 353733 - DNA, 1124 bp, Homo Sapiens
gctgggtggcgaattcggcacgaggaatgagtcagctggcagcatggtgaatggcatgcagaaccaggacccagtgggacaggggtacctggctcaccagctcctcggcgacagcatgcagcacccgggggcaggccgccccggtcagcagatgcttgggcagattagtgctacctcacacatcaacatctaccaagggccagagagctgcctgccaggggctcacggcatgggcagccagccgtcaagcttggcagttgtcaggggctaccagccatgtgccagctttgggggcagcaggcgccaggctatgccgagggacagccttgctctgcagtcaggacagctcagtgacacaagtcagacctgcagggtgaatggtatcaagatggagatgaaagggcagccccatccgctgtgctctaatctgcagaattactctggtcagttctatgaccaaaccgtgggcttcagtcagcaagacacgaaagctggttcattctctatttcagacgccagctgcctgctacaggggaccagcgccaaaaactctgagttactttccccaggtgctaatcaggggacaagcacagtggacagcctcgacagccatgacccggaaggggtacagatggacttcgatgccatcatagacgatggggaccactccagcctgatgtcgggggccctggagcccaagtatcatccagaacctttcccatagctcctccccgcctcaacactgcctcgggcgtccctcccattcccagcgctggccatgagcaccaccaacatggctatcgggggacatgagttctttgctgaccctccctagcgggaagaaagcaaattcccttggcagttatgcaatagggctttagggaaaaaaagactggcaaccaacggaaatcaataggagttgaagagattaaactgactttgtattggctgtttttttagttctgtatgtattttagcaatctcatctcacctaactgagatgtgtttcaattatattccttttatggaaaaggactctgaaaaaccctaaagtattctagcgagaaactgtcctccatttcagttttgaatcagtattgttacactcaaaccgccctcttttt

SEQ ID NO: 353734 - DNA, 609 bp, Homo Sapiens
  misc_feature (526)..(526): n is a, c, g, or t
  misc_feature (538)..(538): n is a, c, g, or t
  misc_feature (551)..(551): n is a, c, g, or t
  misc_feature (573)..(573): n is a, c, g, or t
gattggattaaaaaagtgtattggatttccaatactaaataaaaacatgaaatcgtttttaaaaagccatagagtttacagcatcaactacagaaaaggccaaacaagtgtgtacagacgccagtcccagcagccctctgggcccctcccacaggcagtgcggcgacagacacaggtgttccaaatccccccgaggaagctgctgagcggcagctcaaccaggacactacaggacacacaatggtttagtttcgaaaatcacaggaaaatgtaagaaaatgtattaaattgtgaaaaggtgcaatacagaatagctttcctttttcttaattttttaaaaaacccccaactttgaacagttattttatttaaaaataggcccctcccccacccgccccaattctgtggcagtatccaggtaccaaggccctgaggtaacagaagcagtcagggtttgtgggaggaaatgccccaaatactgagcatgttctttgggcaaaaggtagtttctggggaatctgggccncctggtggccanagtgctgggaagntctcttcagggttcagttaagngcctgggtttccagaatccggctggaacccatgttg

SEQ ID NO: 353735 - DNA, 856 bp, Homo Sapiens
ctatactacctacatcagcttagtgctgccataaaaaataaacagcctaatgtatccactgtggaataaactccatagactcaactcttctggagttcacaatgcctccctacctctattcttgatagtgagccagtatctctaaggaaaggagagccgtatttttagtcatcctagggcaggagccactgtggcatctgaggaagacccagggtacagtattagcatttctttcaaccctaagtatgggcatgtgaccagagacactgccaaaccctaagaaatcattagggcatgatcatgctcaccatatttcacaaatgaaatcttaatgtgggctgttttttatgatcaaactgtcatccatgttgacctgatgaaaataacaccctccttcacctccctcagggtaatgaaagtagaaatttgactgaagctcctacttccttatacagcctttccttctgtgggcttgtcacttttcagtacatttctagtggggaagagcagggcgacccctctgctgggtttctccttaaatgtgaagcaaaataaatttatataatggaatttggtggcagtgactgatgtttgtctctagctaaaaccaactgtttagttgactttttagttataggataagttggaagtccttgtttactggaatatattatgcttttgttaacacattagattaaatagaatttggtattctattataaatgtttattttttaaagcaataaataacttatttttggtaagatctggctttttacttccaaattgtttctgatatgtacataaggtatgattataacaagtgactgtctgcaataaaagagaacttgttcagg

SEQ ID NO: 353736 - DNA, 406 bp, Homo Sapiens
  misc_feature (398)..(398): n is a, c, g, or t
gagagagagccattgttctttgacacacaaccgccactgtcgagtgtggctctccatgatttgcttcaggaaggctacaggcagcgctcttccagcagtcctctcctttgaccatggaagtggccacagaaactcttactttttcctcaagtctgaaatatctcttagactgtgacataggaacacatccctacacctcagttttcttatttgtataacgagaccataaaactaactaattcataaaatttactgtgagagttaaatgagagatagcatgtggaattggacctcagctcactctgacgacagagtcttatcttctttttgtacctggggcagacagccagttggatggcctcaggagctgttattttttcaggctgccattgattttnagatttaa

SEQ ID NO: 353737 - DNA, 950 bp, Homo Sapiens
ggaggcggcttctcctaggcaactcgacgggcgttgagcggaccgctgacctgatggacgccgacagcctcctgctgtctctggagctggcgtccggcagtgggcagggcctcagcccggaccgtcgggcctcgctgctcacgtctcttatgctggttaagcgcgactaccgctatgatcgggttctcttctggggccgcatccttggcctcgtcgccgattactacatcgcgcagggcctgagtgaggaccagctcgcaccgcgcaagacgctctatagcctgaactgcacagagtggagcctcttgccccctgccacagaggagatggtggcgcagtcgtctgtggtgaagggccgcttcatgggggacccatcatacgaatatgaacacactgagctgcagaaggtgaatgaaggtgaaaaagtctttgaagaagaaatagtggtccagatcaaggaagagacccgcttggtgtctgtcattgaccagattgacaaggctgtggccatcatcccccgaggcgccctcttcaagaccccttttggacccacccatgtcaatcggacctttgaaggactgtccttgtctgaggccaagaagctcagctcctacttccatttcagggagcctgttgagctaaagaataagaccttgcttgagaaggctgacctggacccctccctggatttcatggactccttggagcatgacattcccaaagggtcctggagcatccagatggagaggggcaatgccctggtggtgctgcgcagcctgctctggccgggcctcaccttctaccatgctccccgcaccaagaactatggctacgtctacgtgggcactggcgagaagaacatggacttgcccttcatgctatagaatgggagccagcctggatgtttttaaacagagtctaaacatgattttcttaagcttcaaaaaaaa

SEQ ID NO: 353738 - DNA, 1650 bp, Homo Sapiens
  misc_feature (89)..(89): n is a, c, g, or t
  misc_feature (149)..(205): n is a, c, g, or t
  misc_feature (224)..(246): n is a, c, g, or t
  misc_feature (261)..(261): n is a, c, g, or t
  misc_feature (264)..(264): n is a, c, g, or t
aggtcagaaggtctaagcccatctgggcataacacggataaaacccggttttttcttaaaataggaaaaaatttccaagcttggtggcngggcggccgtaagttccagctactcgggaaggctaagccaggagaatgggcgtgaaacannnnnnnnnnnnnnnnnnnnnnnnnnnnnnnnnnnnnnnnnnnnnnnnnnnnnnnnngagcgagactccgtctccnnnnnnnnnnnnnnnnnnnnnnntgtgcagcacctacncgngccccttgtccctgctgtggccacgtaacatgcctgctcccactctgccttcaccgtgactgattctgaagcatccccaaaagctgagcaaatgacagcaccatgcttccagtacaagcctgtggaactgtgagccaactaaacctcttttctttataaaatacctggtctcaagtatttctttataacagtgtgagaatgaccgaaaacgacacccagatgcaaacattacctgcaggccactgcgtgctgactctctcaccaagcaggagcgggcccctccctcacgcggagccgctggcacggacagccccgggaaggtcaggctgagcgtcctttcctctgtgcacccccggagggtgctcccattggctttctcagatagcaccatctcagggtccagctggccatggcctggattaagtttaaaatgctgggccagtccccacttccctatatatgactttttacaagtctgacacttgaagcttttgggcctcagggagcagcttgataagtcaaagagcgcctgcctctccctctgatcttcttccacactgacttctgaatcatcatcagaatctggcagatgaccgtcggccaaatcatccctttttatgaactcagctttagctttatacttggcaggtcgagatacctgtctcaacgtgtcttcacttttaacgatggttttagtttctcagtatgttttgtatgcaagttggaaataaataaacgtcctgaactggatgaaacatgttacagtcggcaaactggaggccgacgaaggggtcaacatggtgccctgtccatttggagccttgggggctgggactctctttgcagggaccacctagagggctggcagtggtctctgtacaaacccctgagcaggaggctgatgtaggaaacatgactgtggctcggttctcacgaggggctgtaccctgagcagctgggggctggtgacgtggagtcccaccaggcgggaattcccccggggcggctggctctgtcttgcagattggggctggactgtggccagtagggacgttggccattcctgaccttttgtttctccagacgttaccttgacacaaatggcttctagttgcgttttgctcccagcctaggaatggtgctgggcatgcagtagctctccatatgcatctgtggaatgcattcattccagacctggattttcacctccaagacttccccgcaagtgggcccagggaacactaggcggtgatatctgcgagcacctgtcttcactgggcggttcctccaggccagaagcagcctcaggaaacgtggggggtgggggcgtgggatgtgcatcggttggagtcacagagtgtcctttaaaacgacatccggaaaatt

SEQ ID NO: 353739 - DNA, 642 bp, Homo Sapiens
ctccgggggtgcacagaggaaaggacgctcagcctgaccttcccggggctgtccgtgccagcggctccgcgtgagggaggggcccgctcctgcttggtgagagagtcagcacgcagtggcctgcagaaaaacgttgacctcttggcgagaatgcaaagaagggaacgcttgcttatacactgttggtgaactgtcacccctacaactcagcttgcaaccagccctggccaccagtttccccacactgagctgaatatcggacatgcccatcttagacattccagcccattctgaaattccacatcgattcacctgacaaagtctgaagttccagggcaatttatctggaaaagcttacctggaatcacgtgtcatttcaaccaacaactgttgaagaggacgtggcatcaaaaccaaggttatcaattatttataagggttgtgtggtggttggtccaagcatctctccttcatgccatcactcctttcaagagctgcctctattttctaatttagcacaggaatttagatgcccctaaataagtaggcatccagtatctgcccacaccagttttagtgagagtacatatggagacactgccaccacccctgctctcctactgcataccccaccatgccaaa

SEQ ID NO: 353740 - DNA, 387 bp, Homo Sapiens
  misc_feature (200)..(200): n is a, c, g, or t
  misc_feature (321)..(321): n is a, c, g, or t
  misc_feature (356)..(356): n is a, c, g, or t
  misc_feature (372)..(372): n is a, c, g, or t
ggccgacggtcatctgccagattctgatgatgattcagaactcagtgtggaagaacatcagagggagaggcaggcgctctttgacttatcaagctgctccctgaggcccaaaagcttcaagtgtcagacttgtaaaaagtcatatatagggaagtggggactggcccagcattttaaacttaatccagggccatggcagnctggaccctgagatggtgctatctgagaaagccaatgggagcaccctccgtgggtcaacaggaggaaaggacgctcagcctggaccttcccggggctgtccgtggccagcgcttccgcgtngaggggagggggcccgctcctgctttgggttgaantgttcacccttacaantcagctttgcaacca

SEQ ID NO: 353741 - DNA, 1069 bp, Homo Sapiens
  misc_feature (3)..(3): n is a, c, g, or t
  misc_feature (31)..(31): n is a, c, g, or t
  misc_feature (40)..(41): n is a, c, g, or t
  misc_feature (53)..(53): n is a, c, g, or t
  misc_feature (61)..(61): n is a, c, g, or t
atnataaccaagagagagagtctcagaatgnaagataatnngaagaaagcagngggaagtnatggaaatgaggaaaatagtggccgagtatgagaagaccatcgctcagatgataggcaagcctgaggacgaacagagagagaagtcagtctcccaccagacggtgcagcagctggttctggagaaggagcaagccctggccgacctgaactccgtggagaagtctctggccgacctcttcagaagatatgagaagatgaaggaggtcctagaaggcttccgcaagaatgaagaggtgttgaagagatgtgcgcaggagtacctgtcccgggtgaagaagaaggagcaaaggtaccaggccctgaaggtgcacgcggaggagaaactggacagggccaatgctgagattgctcaggttcgaggcaaggcccagcaggagcaagccgcccaccaggccagcctgcggaaggagcagctgcgagtggacgccctggaaaaggacgctggagcagaagaataaagaaatagaagaactcaccaagatttgtgacgaactgattgccaaaatggggaaaagctaactctgaaccgaatgttttggacttaactgttgagtgcaatatgaccgtcggcacactgctgttcctccagttccatggacaggttctgttttcactttttcgtatgcactactgtatttcctttctaaataaaattgatttgattgtatgcagtactaaggagactatcagaatttcttgctattggtttgcattttcctagtataattcatagcaagttgacctcagagttcctgtatcagggagattgtctgattctctaataaaagacacattgctgaccttggccttgccctttgtacacaagttcccagggtgagcagcttttggatttaatatgaacatgtacagcgtgcatagggactcttgccttaaggagtgtaaacttgatctgcatttgctgatttgtttttaaaaaaacaagaaatgcatgtttcaaataaaattctctattgtaaataaaattttttctttggatcttggcaaaa

SEQ ID NO: 353742 - DNA, 563 bp, Homo Sapiens
ggaatattaggataagtttttgtaggtcagaagaatttcaagtagtttttagacaaaacatatccatgagtgtgaaaaaagctgtgttgacgaatagattacatttcacatttaccagcaagtcagtaaaaaatagtgcttatttacatagtcaatataatttaatgttctaaaaataatatcttcgatctgcccaatatttaatgtatcatttgagatttttaaaaatgcagccgctccattatgtaaacattaagatatgcctatgtttctttaactatacagcctctttacaataaatttcttgatttttgtgcacaggatagtattgcaacctgctatttagcctttggtgccttagaattattataaatatttaacaatatgtacataatgtaaatactgccaagagatcagtaaggccaaatattttctctattcactttttattgctcttgctttctattgctactaaagcctcttttatccagctttgtaatagttccaacattgtagcgaatgtaaatgtttactttcaataaatctgaacttgttcaacaagt

SEQ ID NO: 353743 - DNA, 484 bp, Homo Sapiens
catttcaatggatttatggcatttactcagtgctgataggtggaaaaactacttgaacagggattttgtttttcttaatacatgccaagaattgtgtggctgtaaaaatagaaacaagttagagacaaaaggatgctgacaaatacttaactaggagcactatttgtttactgcactatacaccaaagtcaatcattataaagattcacgatggaagttggttcaattgtgcccagacgtcaaagctagctatctgatgagtcgctgtgccatagcttgatctatgtttctatcaaatatggtaagtataaacttcattcatactggccagagaaatactgcactacccctcctcaaaaaagtgcaacttaatgctttaggacttataaggcttgttataatgctgcatgatgattgaatattggcatttttcagacgaaggaggaggcagttaagtcatctacattttagtaaacccattttg

SEQ ID NO: 353744 - DNA, 2148 bp, Homo Sapiens
  misc_feature (1910)..(1985): n is a, c, g, or t
ccacacaccctcccaccaccacaccctacaaatgctggtacggtccggattcttcccaccggcggctgctgcggcggcgggagcgaggcgaccgctgaggccgcggagagtgacggcggcccggccgacgggagccggggcggggcggcggcccagcgaaggagcgcgcgggcggtctggccccgccccctccccgcccgccttcccggtgaccttcaggggcccgggtggcgggcgcaggcccctgcggcggcggcgggatgttcgtgcaggaggagaagatcttcgcgggcaaggtgctgcggctgcacatctgcgcgtccgacggcgccgagtggctggaggaggccaccgaggacacctcggtggagaagctcaaggagcgctgcctcaagcactgtgctcatgggagcttagaagatcccaaaagtataacccatcataaattaatccacgctgcctcagagagggtgctgagtgatgccaggaccatcctggaagagaacatccaggaccaagatgtcctattattgataaaaaagcgtgctccatcaccacttcccaagatggctgatgtctcagcagaagaaaagaaaaaacaagaccagaaagctccagataaagaggccatactgcgggccaccgccaacctgccctcctacaacatggaccgggccgcggtccagaccaacatgagagacttccagacagaactccggaagatactggtgtctctcatcgaggtggcgcagaagctgttagcgctgaacccagatgcggtggaattgtttaagaaggcgaatgcaatgctggacgaggacgaggatgagcgtgtggacgaggctgccctgcggcagctcacggagatgggctttccggagaacagagccaccaaggcccttcagctgaaccacatgtcggtgcctcaggccatggagtggctaattgaacacgcagaagacccgaccatagacacgcctcttcctggccaagctcccccagaggccgagggggccacagcagctgcctccgaggctgccgcgggagccagcgccaccgatgaggaggccagagatgagctgacggaaatcttcaagaagatccggaggaaaagggactttcgggctgatgctcgggccgtcatttccctgatggagatggggttcgacgagaaagaggtgatagatgccctcagagtgaacaacaaccagcagaatgccgcgtgcgagtggctgctgggggaccggaagccctctccggaggagctggacaagggcatcgaccccgacagtcctctctttcaggccatcctggataacccggtggtgcagctgggcctgaccaacccgaaaacattgctagcatttgaagacatgctggagaacccactgaacagcacccagtggatgaatgatccagaaacggggcctgtcatgctgcagatctctagaatcttccagacactaaatcgcacgtaggtggcgttgttccactcggctatcaggccacagcagccccctggtgcggcccgagaccgggcagagtggacctcacctggaaactcaccttcagcgcctcagccctggactgttagaggtgctgcagcggctcctgctctctgatcttattgcttataaactttggtgacggtagtgtgtaaggccgtatttttagcatctgacaggtgtttacaaaaaagtggttgtcgcactgggaagtggagtgatggcctcgtctccagtgctcctctgggctcttgagttgctgcttgaattgccgtgtagacatttgcttggagagtccacttgttatttgacggaggtaggtttcaacccagagttaatgtcaagcatgctaatttaactagtcactcacagatgacttttctttaataaagtcccttttcctannnnnnnnnnnnnnnnnnnnnnnnnnnnnnnnnnnnnnnnnnnnnnnnnnnnnnnnnnnnnnnnnnnnnnnnnnnnccttgtcggccgccctcggccctcgaaaaagttttctaaaccatctcttttggcgccggcgggccccagtaggttaagggaaacagtggccaataccgtgttctccaaggaagaatcctgtggccagtgaacatagggcctgtggaatctctcccacccaaat

SEQ ID NO: 353745 - DNA, 1025 bp, Homo Sapiens
  misc_feature (49)..(136): n is a, c, g, or t
cagacggtgggcccctggcgccctgtaccccgttttgaactttcccccnnnnnnnnnnnnnnnnnnnnnnnnnnnnnnnnnnnnnnnnnnnnnnnnnnnnnnnnnnnnnnnnnnnnnnnnnnnnnnnnnnnnnnnnacaggatcagggtctgggctgggcccaggaccaaggtcggggctggccacaaggtcgggaccagcgtcgtgcccagcctttgggtcagaagattccacaggagtagggctgggggtggatctggagccggggaggggtttggagctgggatccggcagagtgcccggcccagagccagggtcagggttgcggccagagctggtgccagggctgaggcccaagccagagccgagcacagaaacagcatcaggacccaggagggagacctgccccggcctcatcatggaatgcagggcataggccaggcccgaggcccaggccggcggccgctgctgcagctgcagcggccgcggcagctgcagcagcggctgcaccctcatgcacccgtttgtgcttggtgaggctggaggcctggccgaaggccttcccgcagagctgacagcgatagggacgctcgcccgaatgcacgtgcaggtgctggagcagcgctgagctctggccgaaggccttggagcagtgcgggcaggcgtagggccgctcgcccgtgtggatgcgcaggtggtgttgcaagttggagctctgcccgaaggctttgccgcagtgggggcagcggtaggggcgctcggccgtgtgtgtgcgctggtgctgcagcagcgccgagctctgcccgaaggccttgccgcactgcggacacgggtagggccgctcgcccgtgtgcgtgcgcaggtgtttgagcagcgcagagccctggccgaagcccttggcgcacaccgggcacttgtggggccgcgggccgccgtgcgtgcgcaggtgctgtgccaggagcgagccgtgcccgaaggccttgccacacaccgggcagtggtgcggcttctccccgctgtggctg

SEQ ID NO: 353746 - DNA, 543 bp, Homo Sapiens
ggccgccggcctgggcctcgggcctggcctaagccctgcatccatgatgaggccggggcaggtctccctcctgggtcctgatgctgtttctgtgctcggctctggcttgggcctcagccctggcaccagctctggccgcaaccctgaccctggctctgggccgggcactctgccggatcccagctccaaacccctccccggctccagatccacccccagccctactcctgtggaatcttctgacccaaaggctgggcacgacgctggtcccgaccttgtgcccagcccagaccttgatcctgtgcccagcccagaccctgatcctgtgcccagccctgatcccaaccctgtgtcctgccctgacccctgttctcccactcgtggcactgtcagcccagccctccctaccggcgagagtccagagtgggtacaggagcaaggggcactgctggggcctgatggctgaaggagacgccggcatcctcgggggcctggggaagttgtgtgttgtgcagtcagtaaaatcctcccactgctccggaa

SEQ ID NO: 353747 - DNA, 1043 bp, Homo Sapiens
  misc_feature (306)..(306): n is a, c, g, or t
  misc_feature (366)..(366): n is a, c, g, or t
  misc_feature (411)..(411): n is a, c, g, or t
  misc_feature (435)..(435): n is a, c, g, or t
  misc_feature (437)..(437): n is a, c, g, or t
  misc_feature (440)..(440): n is a, c, g, or t
  misc_feature (458)..(460): n is a, c, g, or t
  misc_feature (464)..(464): n is a, c, g, or t
  misc_feature (466)..(466): n is a, c, g, or t
  misc_feature (468)..(468): n is a, c, g, or t
  misc_feature (479)..(479): n is a, c, g, or t
  misc_feature (483)..(483): n is a, c, g, or t
  misc_feature (487)..(487): n is a, c, g, or t
  misc_feature (512)..(513): n is a, c, g, or t
  misc_feature (516)..(518): n is a, c, g, or t
  misc_feature (521)..(521): n is a, c, g, or t
  misc_feature (532)..(532): n is a, c, g, or t
  misc_feature (536)..(536): n is a, c, g, or t
  misc_feature (556)..(556): n is a, c, g, or t
  misc_feature (560)..(560): n is a, c, g, or t
  misc_feature (564)..(564): n is a, c, g, or t
  misc_feature (566)..(566): n is a, c, g, or t
  misc_feature (568)..(568): n is a, c, g, or t
  misc_feature (570)..(570): n is a, c, g, or t
  misc_feature (576)..(576): n is a, c, g, or t
  misc_feature (588)..(588): n is a, c, g, or t
  misc_feature (590)..(590): n is a, c, g, or t
  misc_feature (601)..(601): n is a, c, g, or t
  misc_feature (604)..(605): n is a, c, g, or t
  misc_feature (613)..(613): n is a, c, g, or t
  misc_feature (623)..(623): n is a, c, g, or t
atcagtaggtaataggatattttatttcaaaacagtgaagaagctgctaagcataaaatttgtcaaatgctacaaaggtgatgaatatacaactgggaattccaagaaatttaaatttaattacattctttattatcttttcctcaaaagaaataaattagttccaccatttggctaatattatttcattaaagactgaatttagattttaggaaataaaatatggaatctgttataatgtcccaatttatactacagtattaatctcaatcctgatcattacataattatagcatttaccaatcngggattttataaattaaccaaatttgttaaattaagaagaaattcatagacaccattttnttcctgttacaacatatggaaaagccatcaaaaaacttaacaganccaaatcaaaaagaagtatatttnangcnaaagttacttcccgcccnnnccgncncnccgccccactncgantttngcgcctcgggggggtgggagggcgnncannnggngcggcgaaatnctgncagtcatcttcactaatggngggncttntntnancaagtncagtcattaaangngactgactaanagnnagtctggntttgattggncctggttggttcatggattcgtcctctccactttggctccggtatctgcctttgataatactgatatctgccctcagttgatctctttgttcttgtgtaagttcttggcaaccctcttgtgaagctgtccttaacactggaggctgtgaaaacaactggtctttcccaggaactccaggcaaatcctgagtcatggagcttggtgcagagagacattgtgagctcaaatcagaagaggttccatttccaagttctgattcataagagcttccaaagtagagccggtacatattgaatcttgattcatctggaaggatctcggacatctctaaagaaacaagggactgatctatagccacattcttccatctccagctgaatcgtcagagccactgctatggttcagaaagaccattgaag

SEQ ID NO: 353748 - DNA, 926 bp, Homo Sapiens
  misc_feature (13)..(13): n is a, c, g, or t
  misc_feature (84)..(84): n is a, c, g, or t
  misc_feature (95)..(95): n is a, c, g, or t
  misc_feature (239)..(251): n is a, c, g, or t
  misc_feature (688)..(721): n is a, c, g, or t
  misc_feature (908)..(908): n is a, c, g, or t
ggcagaaatgggncaccataaggcaattaattcatgttaggcctgttgctaccaaattttacttggccaaaatttttgtccagnggggcagatanctgcattatttaaggacatttaggccatttgtagctaaccacctgaagtaaactaccctcaatcaatttttatatttcagtctagtcactgtagacaaactatttaaatcttttataatttactttgtgtagttatttggcttnnnnnnnnnnnnngagggctcacattctatttaaattaagacaatatattttataaagcccaaattatagtacactaagagccagaggggtctagggaattgatctcagtgggtatacagcaaagacaaaatttggaggcagacgctaaaggaagttgagataaataaaattcaaatcagtgtattaacagaactacacaaatgtttacaacacagtaactacacttttcaattagttcattgtgaaaactgagcaaaatattttcaacaattttgggtcaacaaaaagtatggaatattttaagacaataaagagtgactggtgttgagagtactgaggctacacagaggtactgaaattcaaatctgaaaaatactgtgctggccacacaacactacaaatttctaatggaagaattccctttttgatccgcagcttaggtggtaagnnnnnnnnnnnnnnnnnnnnnnnnnnnnnnnnnntattaacatttaggagtctcaaaactttgtattggctgtgagtctgggggaaaaaaacataaatgtcatactaccaattaaactttcaagagtcatcagattaatttagccttaaaattttactaaatcagaccttaacctacacattcaaatgccggaccaggttatcccttttaaaagggaatgncccctatccgtgattacc

SEQ ID NO: 353749 - DNA, 638 bp, Homo Sapiens
ggctctcttccatgctctgagaattatataaaagcatcccagctaaggctggagtgaaggggttggggaaagctaagcaaaggctaacttgaccaataggctcaataaattcagtcttgttggccaggcccacttgaagggttttttgtttcatcttggaaaaggacagggaggtcatggtataattgttatgagtaaagtcaagaacagcttctaggtaaaagtaattatgtacccaaaaggagttgaagggaaaatcaatttaggtttacattaaacatccttcaagttcttatctttaaatggagtttcagtgtctcccaaaggctggatgagttttacagttataaccactggattgtgagaccataggacatttgaacaatcttttcttctacccatctagaaaagcatcttttttatataccaaatttttacacatatatccacatctgtttttgaaatctagagcagaggtactcaaagtttggttcatggactagtgccagttcacaaattgttaatgttttataatgagataagtacggaagttgagagtaaccatttagaaactgtgtaggaatttaaaaagtaatatctgacaaatttaataataaaaatggaggcttgtaaaaaaa

SEQ ID NO: 353750 - DNA, 443 bp, Homo Sapiens
tgtaagagtacttacagttggggtcatctaggcaggaaaagtatggtcatgttccccagaactcttagaaatggatcacgaggtagatgagcttacaggaaaccgggccagcatggtgccatagaacagttcccatccctgccaaattcttcagcccttgtgtccaaggtcagatgccttgtcttccacaaaacattccctggcgtccacccttcgtccccttcagctacaagtgaccctcctctcctgcaagtattcatccttctgaaggctgggcgccaggcactaacagacaggcagctgcctcccagacataaggagcatgggtcctaaccaggaataagcttcacagccattgctgtcaggccaagccgtggtccaggcacctcaggcattaattcgtgtcctcagccccacagagagagcgtcggtaccagctgaga

SEQ ID NO: 353751 - DNA, 443 bp, Homo Sapiens
  misc_feature (51)..(51): n is a, c, g, or t
aattcatgagatccctctgggctcggtggctgtcagagggtcgaggcaggnccctgggcagtgggtggacagggtccgtgatcagagggaccgtcacccagcccgcccttggacgtcagccaagacccaggttcctctcttcccagaagttcatccccctaaatggacttacgtgcttagctctcattaaccttctgaaccttccagaaagggagtggaaatgtcctgcctcatctcctgctgaggaagcctgggtaggagtggaggaagataaagggacccccccaagggctgctgctggggccagagatgtgggggtcccaggcaagggtgttgtcctgagcagagtctctgcaccggctgggtcaccaaggaggctctgcaagttcatccagcagaggtgggagagctgaacacccctgcctctctcttagggatccttg

SEQ ID NO: 353752 - DNA, 1316 bp, Homo Sapiens
  misc_feature (620)..(685): n is a, c, g, or t
  misc_feature (853)..(912): n is a, c, g, or t
cgcctctctgtcgtggcgcggcttcccgcggtcttctctgcaaatgggctccgtggcctagcgcccccgtccccgccacccgtgatcgtgcgccgaggcccgcgaggggtcgccgcccagatcccaccagccagcaagctaaagcatggcggccatcccctccagcggctcgctcgtggccacccacgactactaccggcgccgcctgggttccacttccagcaacagctcctgcagcagtaccgagtgccccggggaagccattccccaccccccaggtgagtgcaggatcgcccctttctccccccgctcctccaggagctggcagcatcaagaccccacttcgcttctctcaggtctccccaaggctgacccgggtcattggtgggccagcttctttttcgggaagtccaccctcccgttcatggccacggtgttggagtccgcagagcactcggaacctccccaggcctccagcagcatgaccgcctgtggcctggctcgggacgccccgaggaagcagcccggcggtcagtccagcacagccagcgctgggcccccgtcctgacctgagcggttaccaccagccccaggcctgcggaggcgctagtccaccagannnnnnnnnnnnnnnnnnnnnnnnnnnnnnnnnnnnnnnnnnnnnnnnnnnnnnnnnnnnnnnnnntgtaaactaggcggctgcagcaagcagaccttcgcatcaacacagcagacaccaaaaaccagtgagagccccgctctctaccgcccggccccagcactcgctagctttcctgacacctggaactgtgcacctggcaccaagcggaaaataaactccaagcagccagtnnnnnnnnnnnnnnnnnnnnnnnnnnnnnnnnnnnnnnnnnnnnnnnnnnnnnnnnnnnngggggggggcaaaaacccccgggggcgccaagccttgacgaccgatccccgggtttttttgggtaaacaaagggcgccctatataggggcgccttctattaataatgaccgacaggcagcgggcacgccgcatttcaaaacagcctgcgcggtggctggggaagacacgcatcgtctcggtagggacactttggtgggacacgaccccccacctctcgtggtgggtgcgaccactatatgtcggacacacccatcatccgtagtaaattatttaagccccttgaggattaaattataaaaactttgcacggttactattggggggtttaccaccagcccgatatgtatcccgggcgcgtgaaaaatttttgctcactgcacagttttttattttacaacaattt

SEQ ID NO: 353753 - DNA, 839 bp, Homo Sapiens
  misc_feature (565)..(628): n is a, c, g, or t
  misc_feature (670)..(670): n is a, c, g, or t
  misc_feature (672)..(673): n is a, c, g, or t
  misc_feature (676)..(676): n is a, c, g, or t
gcctgggtggcgaattcggcacgaggctctgtcgtggcgcggcttcccgcggtcttctctgcaaatgggctccgtggcctagcgcccccgtccccgccacccgtgatcgtgcgccgaggcccgcgaggggtcgccgcccagatcccaccagccagcaagctaaagcatggcggccatcccctccagcggctcgctcgtggccacccacgactactaccggcgccgcctgggttccacttccagcaacagctcctgcagcagtaccgagtgccccggggaagccattccccaccccccaggtctccccaaggctgacccgggtcattggtgggccagcttctttttcgggaagtccaccctcccgttcatggccacggtgttggagtccgcagagcactcggaacctccccaggcctccagcagcatgaccgcctgtggcctggctcgggacgccccgaggaagcagcccggcggtcagtccagcacagccagcgctgggcccccgtcctgacctgagcggttaccaccagccccaggcctgcggaggcgctagtccaccagagcnnnnnnnnnnnnnnnnnnnnnnnnnnnnnnnnnnnnnnnnnnnnnnnnnnnnnnnnnnnnnnnntgtaaactaggcggctgcagcaagcagaccttcgcatcaacncnncanacaccaaaaaccagtgagagccccgctctctaccgcccggccccagcactcgctagctttcctgacacctggaactgtgcacctggcaccaagcggaaaataaactccaagcagccagtagccccgatggtgtgtgcctgacctgtgtggcccgaggttccat

SEQ ID NO: 353754 - DNA, 806 bp, Homo Sapiens
  misc_feature (11)..(11): n is a, c, g, or t
caatatcggcntagtcgaggcgtgcgtggcgtttcggcacgaggctctgtcgtggcgcggcttcccgcagtcttctctgcaaatgggctccgtggcctagcgcccccgtccccgccacccgtgatcgtgcgccgaggcccgcgaggggtcgccgcccagatcccaccagccagcaagctaaagcatggcggccatcccctccagcggctcgctcgtggccacccacgactactaccggcgccgcctgggttccacttccagcaacagctcctgcagcagtaccgagtgccccggggaagccattccccaccccccaggtctccccaaggctgacccgggtcattggtgggccagcttctttttcgggaagtccaccctcccgttcatggccacggtgttggagtccgcagagcactcggaacctccccaggcctccagcagcatgaccgcctgtggcctggctcgggacgccccgaggaagcagcccggcggtcagtccagcacagccagcgctgggcccccgtcctgacctgagcggttaccaccagccccaggcctgcggaggcgctagtcaccagagcccctccccggccctttccgcatcgcatcgctgcccccctcccaatcccacccccaacctgtaaactaggcggtgcagcaagcagaccttcgcatccacacagagacacaaaaccagtgagagccggtctctacgaccggccagcatcgtagcttctgacactgtaacgtgcacctgaccagcggaataatcaagcgcagtacccatgtttctaactgtgccggtt

SEQ ID NO: 353755 - DNA, 714 bp, Homo Sapiens
taatatagtgctaggtcgaggccgggtggctgattcggcacgagggcgcgtctctgtctgtggcgcggcttcccgcggtcttctctgcaaatgggctccgtggcctagcgcccccgtccccgccacccgtgatcgtgcgccgatggcccgcgaggggtcgccgcccagatcccaccagccagcaagctaaagcatggcggccatcccctccagcggctcgctcgtggccacccacgactactaccggcgccgcctgggttccacttccagcaacagctcctgcagcagtaccgagtgccccggggaagccattccccaccccccaggtctccccaaggctgacccgggtcattggtgggccagcttctttttcgggaagtccaccctcccgttcatggccacggtgttggagtccgcagagcactcggaacctccccaggcctccagcagcatgaccgcctgtggcctggctcgggacgccccgaggaagcagccccggcggtcagtccagcacagccagctgctgtggccccccgtcctgacctgagcggttaccaccagccccaggcctgcggaggccgctagtccaccagagccccttcccgggcccttcccagtccggattcctcgccccctcccaactcccacgccccacctgtaaactaggcggctgcagcaggcagaccttcgcttacacaggagacaccaaaaccg

SEQ ID NO: 353756 - DNA, 1123 bp, Homo Sapiens
  misc_feature (580)..(641): n is a, c, g, or t
  misc_feature (645)..(646): n is a, c, g, or t
  misc_feature (649)..(651): n is a, c, g, or t
  misc_feature (654)..(655): n is a, c, g, or t
  misc_feature (657)..(835): n is a, c, g, or t
  misc_feature (841)..(882): n is a, c, g, or t
  misc_feature (884)..(884): n is a, c, g, or t
  misc_feature (888)..(888): n is a, c, g, or t
  misc_feature (890)..(890): n is a, c, g, or t
  misc_feature (914)..(914): n is a, c, g, or t
  misc_feature (931)..(942): n is a, c, g, or t
  misc_feature (967)..(967): n is a, c, g, or t
  misc_feature (994)..(994): n is a, c, g, or t
  misc_feature (1018)..(1018): n is a, c, g, or t
  misc_feature (1024)..(1024): n is a, c, g, or t
  misc_feature (1031)..(1031): n is a, c, g, or t
  misc_feature (1043)..(1043): n is a, c, g, or t
aagcgaggcctgggtggcgaattcggcacgagggcgcctctctgtcgtggcgcggcttcccgcggtcttctctgcaaatgggctccgtggcctagcgcccccgtccccgccacccgtgatcgtgcgccgaggcccgcgaggggtcgccgcccagatcccaccagccagcaagctaaagcatggcggccatcccctccagcggctcgctcgtggccacccacgactactaccggcgccgcctgggttccacttccagcaacagctcctgcagcagtaccgagtgccccggggaagccattccccaccccccaggtctccccaaggctgacccgggtcattggtgggccagcttctttttcgggaagtccaccctcccgttcatggccacggtgttggagtccgcagagcactcggaacctccccaggcctccagcagcatgaccgcctgtggcctggctcgggacgccccgaggaagcagcccggcggtcagtccagcacagccagcgctgggcccccgtcctgacctgagcggttaccaccagccccaggcctgcggaggcctagtccaaccagagcccnnnnnnnnnnnnnnnnnnnnnnnnnnnnnnnnnnnnnnnnnnnnnnnnnnnnnnnnnnnnnntttnnctnnnccnncnnnnnnnnnnnnnnnnnnnnnnnnnnnnnnnnnnnnnnnnnnnnnnnnnnnnnnnnnnnnnnnnnnnnnnnnnnnnnnnnnnnnnnnnnnnnnnnnnnnnnnnnnnnnnnnnnnnnnnnnnnnnnnnnnnnnnnnnnnnnnnnnnnnnnnnnnnnnnnnnnnnnnnnnnnnnnnnnnnnctcttnnnnnnnnnnnnnnnnnnnnnnnnnnnnnnnnnnnnnnnnnntncctncncctccttttcttttgccccctgcncccttcccctcttcctnnnnnnnnnnnntttttcttgccctcccttttgtttncccccttcctcgttttcccctcttttnttcgctctccccttctttctcccntttctnccccctntttctctcttcnttttttttgcctcccctcttgtgttgtgttcgccggggggcttgctccccgcgcgcccctctgtgggcgcggctcttttt

SEQ ID NO: 353757 - DNA, 1099 bp, Homo Sapiens
  misc_feature (592)..(593): n is a, c, g, or t
  misc_feature (699)..(699): n is a, c, g, or t
  misc_feature (786)..(786): n is a, c, g, or t
  misc_feature (797)..(797): n is a, c, g, or t
  misc_feature (801)..(801): n is a, c, g, or t
  misc_feature (828)..(828): n is a, c, g, or t
  misc_feature (843)..(843): n is a, c, g, or t
  misc_feature (846)..(846): n is a, c, g, or t
gcgtttaacatttttatttttaactccgctttggtagtacaaaagtcataaaagtacaaaccagacagttaaaaatacacttgacactcgaaatggtgaaaattttccttacaaatttttacatcaaggtagtagccaactcattgatgacaccaaaaagttgtccatcattagtgttttctagagaaagtctgttgtggattccctcatccttagaaaggaggaggagaaacacaagacctgtaaacatcagttgctttgggaacacaggaattctcatcagatagttcagtataaaccagtaaaaagcgtatgtgttgaaaatactgaacgcttaattttggcaaatttggaagcctgccagacaaaaaccgctcaagtatttattagaaaatatttaaaacatactcttggtatcaatacagttttaaatatttttgagtattctcttgcctgttgtattgctatttaaaaaaaagtgctctgacttgaataagatggaaaaataattaaagcgtaaagaatatcttacattttatcccccaccattttgagggcgatatttttaaagccaaaaagtatgcttatttgnntttacattaaaatgattagcctagactgcacatatattatttacactaatacatacccctaaaagtcctatattgctactttctggatctcagtgaaatttatatncatactgactttctccagtccacagtgtatatgaatatgtacacatacagtgtttattagttgtcagtaaaaattctcatgaaactnaattcccaatntatntaaaaggttagaaatgtttagattgangctgggaaataaaancantgaagtctatgtacagtaaatactttgaagtatatttttatggaaatcatctttgggagacaaatgaaagatgtgcattttcctatatgaaataaaagaagtgctcaaggcaccccccaacactgacatggaggcgggtcttggagaccttgtaactggcctcccccacagctcaccccagagctaccataaatcatgtaatactatttatgcctctgggtcctttcaggtgttttgtaaaatgtacagttat

SEQ ID NO: 353758 - DNA, 576 bp, Homo Sapiens
  misc_feature (501)..(501): n is a, c, g, or t
gcggccgccgccggcccacccgggccgctagtcatgttcacgtacagggagcgggtgagcgggctccgcagcgtccacatcctccgcgccagccacacggacgccaggctcaggcaagaagaacccactgagaggttacagtttcattcctcaggtctattaatcaggttttccagagaaacagaaccaattggtgtgtatataaaagaagattaggaggaatgggcttacaagatgatggtgtttgcgaagtcccacgatctgccatttgcaaactgagacccaagaaagctggtggtgtaactcaggctgaaggcctgagaaccagggggccaatggggctaagtcccagtccaagggcaaaaaaagatgagatgagatcacccagctcaacagtgaggcagaaaaacaaaaggaggcgaactcctgtctctctgttttgttccattcgggccctcaatggatagcatttaaaagacagaaacccctaaattatgaatntcagagattatataggaactacatcatagctgcccccatcccttctagagacttggagagaaaccctaaacctta

SEQ ID NO: 353759 - DNA, 1830 bp, Homo Sapiens
agcgggaggctgcgcgccggctgctcctccccacccccagcctttgccctgaagggggctggatgggcaaggcggccgcgatggctcgagctcgggcggtggcggcggtggccggaggcggcggtgcctcctcctcctcgccccggcgccggcggtgatccgagcgagcggccgcggcccccgatgagactgctggcgggctggctgtgcctgagcctggcgtccgtgtggctggcgcggaggatgtggacgctgcggagcccgctcacccgctccctgtacgtgaacatgactagcggcccgggtgggccggcggcggccgcgggcggcaggaaggagaaccaccagtggtatgtgtgcaacagagagaaattatgcgaatcactccaggctgtctttgttcagagttaccttgatcaaggaacacagatcttcttaaacaacagcattgagaaatcgggctggctatttatccaattatatcattcttttgtgtcatctgtttttagcctgtttatgtctagaacatctatcaatgggttgctaggaagaggctcaatgtttgtgttttcaccagatcagtttcagagactgcttaaaattaatccagactggaaaacccacagacttcttgatttaggtgctggagatggagaagtcacaaaaatcatgagccctcattttgaagaaatctatgccactgagctttctgaaactatgatatggcagcttcagaaaaagaaatacagagtccttggtataaatgaatggcagaatacggggttccagtatgatgtcatcagctgcctgaacttgctggaccgctgtgatcagcccctgactttgttaaaagatatcagaagtgtcttggagccaactagaggcagggtcatccttgcccttgtcctcccctttcatccctatgtggaaaacggtggcaagtgggagaaaccatcagaaattttggaaatcaaaggacagaactgggaagaacaagtgaatagtctgcctgaagttttcagaaaagctggttttgttatcgaagctttcaccagactaccatacctgtgtgaaggcgacatgtataatgactactacgttctggatgacgctgtctttgttctcaaaccagtataaacacgtggaggtcgaagtcttcagagtccgcaccctccgggatgtgcccttggaagagggtctgtgttcacaattacgtgaagggaggacccttggggaccgccattctaaatatcatgtaggaatttaaaaagccaaaatactaattatttctttgtagtgtgtaaaggaatgtttttaaaagacaaaaacccaactctttgtggatttttatcaactctttactcagagccactctccaatgcaggtcacactccaattatgatggaagatattttttatacttaattgcagtagggactcattcccagacaaagcaatagtcacgacttcatggaaccaatcaatggattgttttttgaagactggcaataaagctgtccattcaattccaaatactggttttaaggtatagccactgatattctttcatgtttagaaattctttctgttattattcaagaaaatgtttttaatcatgctaataaacttttttggagatgactttggcatcatgtttgaattcatataaagctcccctagcattttttattggtttggcttcaggagtacccaaatagtagcattatgagaatgacgcagacaatttgaataggggggaaggaaggcttcagacttgggggaaggggagattattgcaaattgcagtgaacactgagtcagtaaaaaaaa

SEQ ID NO: 353760 - DNA, 631 bp, Homo Sapiens
gccctgaagggggctggatgggcaaggcggccgcgatggctcgagctcgggcggtggcggcggtggccggaggcggcggtgcctcctcctcctcgccccggcgccggcggtgatccgagcgagcggccgcggcccccgatgagactgctggcgggctggctgtgcctgagcctggcgtccgtgtggctggcgcggaggatgtggacgctgcggagcccgctcacccgctccctgtacgtgaacatgactagcggcccgggtgggccggcggcggccgcgggcggcaggaaggagaaccaccaggttgctaggaagaggctcaatgtttgtgttttcaccagatcagtttcagagactgcttaaaattaatccagactggaaaacccacagacttcttgatttaggtgctggagatggagaagtcacaaaaatcatgagccctcattttgaagaaatctatgccactgagctttctgaaactatgatatggcagcttcagaaaaagaaatacagagtccttggtataaatgaatggcagaatacggggttccagtatgatgtcatcagctggctgaacttgcttgaccgctgtgatcagcccctgactttgttaaaagatatcagaagtgtc

SEQ ID NO: 353761 - DNA, 1533 bp, Homo Sapiens
  misc_feature (1075)..(1084): n is a, c, g, or t
  misc_feature (1240)..(1343): n is a, c, g, or t
  misc_feature (1370)..(1476): n is a, c, g, or t
gggaggcctatttccggtaggaatcagtggacttggcggcagaggcagtgcggatccggcgttctccactgatcttttccaaggctgtacagacatggcggcggcttttcggaaggcggctaagtcccggcagcgggaacacagagagcgaagccagcctggctttcgaaaacatctgggcctgctggagaaaaagaaagattacaaacttcgtgcagatgactaccgtaaaaaacaagaatacctcaaagctcttcggaagaaggctcttgaaaaaaatccagatgaattctactacaaaatgactcgggttaaactccaggatggagtacatattattaaggagactaaggaagaagtaaccccagaacaactaaagctgatgagaactcaggacgtcaaatatatagaaatgaagagggttgcagaagctaagaaaatcgaaagactaaaatcagagctccatctgctggatttccaggggaagcaacagaacaagcatgtgttcttttttgacaccaaaaaggaagttgaacagtttgatgtcgcaactcacctgcaaacagccccggagctagtcgacagagtctttaataggcccaggatagagaccttgcagaaagaaaaagtgaaaggagttaccaatcagactggacttaagcgaatagctaaagaaaggcaaaagcagtataactgcctgacacagcggattgaacgagagaagaaattgttcgttattgctcagaaaattcaaacacgcaaagatcttatggataaaactcagaaagtgaaggtgaagaaagaaacggtgaactccccagctatttataaatttcagagtcgtcgaaaacgttgacgtgttatagataagccttgtcattctgtatcaaaaatctgttgtcgttttctagtaacttcaaattccattactccaaatggcatggttttccggtttgtaaccataactaaattgtcagtctgacatttaatgtctttctatggacaacattaaatctccctcccttctgtaattgtttttggattgtgaaattagtcttatttttatatacttaannnnnnnnnnctttgagatagggtctttgttgccaggctggaagtgcagtgtgtgattatggctcactgcaactttgaactcctgggctcaagtgatcttcctgcatcagcctcttgagtagctgggaccacagacatgtgccaccatgtctgagtaatgtttaannnnnnnnnnnnnnnnnnnnnnnnnnnnnnnnnnnnnnnnnnnnnnnnnnnnnnnnnnnnnnnnnnnnnnnnnnnnnnnnnnnnnnnnnnnnnnnnnnnnnnnnggatgagccactatgcccggctaattnnnnnnnnnnnnnnnnnnnnnnnnnnnnnnnnnnnnnnnnnnnnnnnnnnnnnnnnnnnnnnnnnnnnnnnnnnnnnnnnnnnnnnnnnnnnnnnnnnnnnnnnnnngattaacaggcgtgaggccaccgcgccccggccgaatgtcctacttttttatttaaa

SEQ ID NO: 353762 - DNA, 968 bp, Homo Sapiens
  misc_feature (744)..(744): n is a, c, g, or t
gcgcacaagcgccggaccgggtaccgctgtgcccggcctggccgcggcctagtcccggcagacgggactgacgaggtcaccaagcccaggccgagacggcgcgggtgtcagggacttgggaatccccctcccccagtcccgatcccgctttcctttggggtttcacctcagaggacccgacagcactcttgcagaacagccgtctgcctgtcttcctggctcgctccctgcaggaatggtctggggcaaccccagcaacacgcccacctgtggccaggatgaataggaatccagttcaggcttggcttccatggcaagtcaaggcccaccaggccccagcaaccttccctaccccccattccatttatgcatgcccccctccacagccaggcatgttccctgccacaccatgctgttcccctcacctgggctgacacatcccaacgtcctctctgccatctggagatgcatctgccattcaagacttggcatcaggctccaggtcctcccatgggccttctagagcccctggttcgtcactcctctgaacacttccagcctggctaatagcccactgcatcctggcctggggtacaggtggccagcaacaggatgtggcggccagattccaacacaagcacgggtaggtcccatctgcagaacatgggctgcaagaagcccggaccttgcccactgaaggggccctgcgcagggctgggcacgaagcaggtgggtgtccacccnttctagtatccaaaaccctgcttggttcacccccacctctgttgaaggaaagcaacactgtgatggagaggagcagctgtggattcaaatcctggcttggccactttctagttgtgtgacttggtgcatctgccctcatctcctcagagacaaaaatggcaacacctcccttcttgggttactatgaggattaaataacaaaacctccaagaagcagaaaaaaa

SEQ ID NO: 353763 - DNA, 734 bp, Homo Sapiens
  misc_feature (22)..(22): n is a, c, g, or t
ggctgtcccggcccgggattanggatccgaggagcgccaagaagatgtcacttgtttacacacgaactgccacatccccaagctccgggcttgcccctcgtgtcctaggccctaacccagcctcccagacctcactttccccatcagcaatacctggtgttctcccaccttgaaaggactcttggctcctgccgggttcctgctcaggctggaattgggaaaatatgcaggtgacatttgttcattctctaatcccatcctctcacccatccatttcctcactcagtggagatttgccaaatgaataaacgacacctttgaggccccaggtgaagcggggccctactccggcctctgccttgggcctcgcctctgtcctcaggtcctctcagaggcagatacctaggggagctgctgctgcctgctcattctagcttccgattccattcccagcccctgcgttaaggtccctggagaggtggcgtcagtgggggtgaggaagggcatcttcctgactcctctgcccagtgctggaaggagcatgcctgggttagtgggccaggggcaaggcagctgggggcctttggggaccagaaggggagatgtgctcccagagcctctctgctgtaagaccccagcttttcctgggaagatgggactctggggtgtgtggtgctcaccagagttcaggccacccactgggcttcggcaggagattagggaagccccattca

SEQ ID NO: 353764 - DNA, 867 bp, Homo Sapiens
tgctcccagagcctctctgctgtaagaccccagcttttcctggaagatgggactctggggtgtgtggtgctcaccagagtcaggccacccactgggctcggcaggagatagggagccccatcacctgaccacagccccccaccaacattcccccaaaatgcagcctaggaggccgcagtgctcttcttcctgcccagaccaaaatgttccttttagtcctcaatgttttatattctttttgttttgaaaatctcaattttaatcaggggttttaaaagaaaattgaaagcctgaacctccatttttcttcttggctccagttttgctggtcctctggagaactcttcgtgagcactggtgccgtgacccacttgggatctctgctgtgcccttctcgggcttccagaccaggtgtagcaaatgaaaaagtgcagttaattcaagaacaggaatccctgtgtccttgctgggatttccttttgggaacctgactttccgactccagatcctgctgtctggatcagtgttctggctggaggtgctggattctctgattttgcctcctcactctgtgtctggctttgctcctgggtcttggccctgggccatatgaggggccaggaaatgaacgacaaggaggataagagtgttctttcttgaaaaccgggacttcccctcaagaacctgggccctgggggccgggaactcctgcatgaactggggaggcaagtcactttaaaacctccctgtgccctcgaattttcccccctttctaccaaaggtgggggccccaaatggattcctttggtggtggtcaagccacctggttacactaacccgaaggtggcctggaagataaaagggccc

SEQ ID NO: 353765 - DNA, 556 bp, Homo Sapiens
acttatccttttttataaaagctcaaatcacaacattctcttttcatcaggccctacagccctgtgttggacaagcacagatgtcaaaaatacacttaaatatacgttgaatttttatccactagaataaataagcagaatgatatgcattcttggcgatagtcttcactggaaaataccactgtcagcccaaacttacacaactgacttcaaaatcagactaagatgtggcataagaagagctatttcctaccttcacctatatattccaggatttgcccaactcccaaggccttgaaaaacatgtgaatgtttgagactaagaaaaattgggaatggtaagctagtggccaccttaagagtacatgccccatttcaaaaagatggattcagaatgcaacgttttaaaacactgtgctggtcacacaaaacagaactgcagacagaattcagtgtaagccttgaatgtgcaacccctataagagcacaataattggactttttaaaaccaaggttcacgatacttgggtctttgcagattaaatacctcagtgcc

SEQ ID NO: 353766 - DNA, 1228 bp, Homo Sapiens
aggcacaagtttgacagtgagaggatcccggagctgtctggccctgcattcctgcaggacatccacaacgtgtcctccctctgcaagctctacttccgagagcttccgaaccctctgctcacctaccagctctatgggaagttcagtgaggccatgtcaatgcctggggaagaagaacgtctggtgcgggtgcacgatgtcatccagcagctgcccccaccacattacaagaccctggagtacctgctgaggcacctggcccgcatggcgagacacagtgccaacaccagcatgcatgcccgcaacctggccattgtctgggcacccaacctgctacggtccatggagctggagtcagtgggaatgggtggcgcggcggcgttccgggaagttcgggtgcagtcggtggtggtggagtttctgctcacccatgtggacgtcctgttcagcgacaccttcacctccgccggcctcgaccctgcaggccgctgcctgctccccaggcccaagtcccttgcgggcagctgcccctccacccgcctgctgacgctggaggaagcccaggcacgcacccagggccggctggggacgcccacggagcccacaactcccaaggccccggcctcacctgcggaaaggaggaaaggggagagaggggagaagcagtggtagccagggggcagcagctggaagacgttctttgcactgggccggggccccagtgtccctcgaaagaagcccctgccctggctggggggcacccgtgccccaccggagtctttaggcagcagacccgacaccggcacactgagatctggcaagagcgaggagtctctgtcaatcgcaggccagcggggctggccttcagaggctgcacaggctgcggggaccccactccagcaaggacgcttttcctgtgggcccagcacccgccggcttctgtgagagcctgtgctcggcctcctcctccgggacctcctcctcggggtgctctaaacccccctctgagtcctcacaccttggcctggggggactatctgggtctttcctcacaccggtaccctaacccgggtaggagaaggtgatgagctggacttcagccaccccgctgctggagggaactcgggggcaggactttgatcctttacctctcgtgatgatgccaccccagggatttctttctctccccactcatcatcactccctctctcttgttttcatacaccgg

SEQ ID NO: 353767 - DNA, 900 bp, Homo Sapiens
ggggcacccacctgcttccaatcccccttcaccgctcgctgtctctggaggtgggcggggagcccctggggacctagggagtgggccacctcccaactccctagcacacccgggtgcctgggtcccgggacccccaccctacttaccaaggcaacaaagtgatgggagcctgctgaggagccagcggcccatggggacctcaaggaggggactccgaggccctgcccaggtcagtgcccagctcagggcaggtggcgggggcagggatgcgccagaggcagcagcccagtccccatgttctgtcccctcacaggttcctacccccggcttcttctccccagcccccagggagtgcctgccacccttcctcggggtccccaagccaggcttgtaccccctgggccccccatccttccagcccagttccccagccccagtctggaggagctctctgggcccccctgcaccactcgacaggggagagaacctgtactatgagatcggggcaagtgaggggtccccctattctggccccacccgctcctggagtccctttcgctccatgccccccgacaggctcaatgcctcctacggcatgcttggccaatcacccccactccacaggtcccccgacttcctgctcagctacccgccagccccctcctgctttccccctgaccaccttggctactcagccccccagcaccctgctcggcgccctacaaccgccttgagcccctctacgtcaaccttagctctagggcccagggggtcccttaactgcctcttccttcctcctttcccctttctggccaacccctggaggccgtagatatccccggatccccaaagccccccagctttccccagaaacaaacgggcgacccttggggacacccg

SEQ ID NO: 353768 - DNA, 926 bp, Homo Sapiens
  misc_feature (267)..(344): n is a, c, g, or t
  misc_feature (522)..(523): n is a, c, g, or t
gcggcggcccccgccgcccggagcgccccgggggccaccctgggcgagcaaggcagaggcaggggcggtgggtgctgttctgccggcaggcgcgctattccctgctgtggtgctgctgcaccgcaaggtcaagggatcaaattttatttccctggattccctaacaatcagtttttgtgtgcctgcagcccagctcatgaccattatttattcatcctcatgtccggtgcgagggacacccacagagtgcccccagtccagctgctnnnnnnnnnnnnnnnnnnnnnnnnnnnnnnnnnnnnnnnnnnnnnnnnnnnnnnnnnnnnnnnnnnnnnnnnnnnnnnccagcaggtgctgggcccacagggaaagcgtcgctgctggagtggggtcgccgcagcctgtgcagcctctggaggccagccccgctggcttgcgatgacagagactcctcgctcttggcagatctcagtgtgacggtgtcgggtctgctgcctgaaggctgcggtggggcacgggtgnnccccagccagggcaggggcttctttcgaggaatctggggcccggcccagtgcaaggacgtcttccagctgctgccccctggcttccgctgcttctccctctctcccctttcttctttccgaagtgaaggccggagcccttgggagtttggggctcccggggcgtccccatgccgccctgggtgcgtgccctggctttcttcagcgttagcagcccgtggaagggcaatttcccccaagggacttggccctggggagcagccacaggtctttagggttccagccccgcggaggtaaaggttttccttaccaagaccgccccaggggggaccagaaattcacccaccaccgattggacccgcaatcttccggaacccccccgggcccaccattttcccctgctcc

SEQ ID NO: 353769 - DNA, 1373 bp, Homo Sapiens
  misc_feature (319)..(371): n is a, c, g, or t
  misc_feature (924)..(924): n is a, c, g, or t
  misc_feature (946)..(946): n is a, c, g, or t
  misc_feature (957)..(957): n is a, c, g, or t
  misc_feature (1059)..(1059): n is a, c, g, or t
  misc_feature (1062)..(1063): n is a, c, g, or t
  misc_feature (1102)..(1102): n is a, c, g, or t
  misc_feature (1134)..(1134): n is a, c, g, or t
  misc_feature (1137)..(1137): n is a, c, g, or t
  misc_feature (1171)..(1173): n is a, c, g, or t
  misc_feature (1283)..(1283): n is a, c, g, or t
  misc_feature (1319)..(1319): n is a, c, g, or t
  misc_feature (1322)..(1322): n is a, c, g, or t
  misc_feature (1325)..(1325): n is a, c, g, or t
  misc_feature (1342)..(1343): n is a, c, g, or t
  misc_feature (1347)..(1347): n is a, c, g, or t
  misc_feature (1360)..(1360): n is a, c, g, or t
  misc_feature (1367)..(1367): n is a, c, g, or t
  misc_feature (1369)..(1370): n is a, c, g, or t
agtagtaaaggttagatagcgtaaactcagtgttagtcagtggtcagacagctgcaaaacgttcctttcccctggcccgggacccccagtgtcccttaataaaagcccctaccctgtttgttggtcaaccgttcccctccacagccttcagtcagcagttcgtacaccgtcacattaagatctgccaagacccagtagtctctgtcatcgcaggccagcggggctggcctccagagtctgcacagtctacgtcgaccccactccagcagcgacgctttccctgtgggcccagcacctgctggctcctgcgagagcctgnnnnnnnnnnnnnnnnnnnnnnnnnnnnnnnnnnnnnnnnnnnnnnnnnnnnntgagtcctcagcagctgggctgggggcactctcatgggtctccctcacaccgtacactcagcctggctagatgatggtgatgagctggacttcagcccaccccgctgcctggagggactccgggggctggactttgatcccttaaccttccgctgcagcagccccaccccaggggatcccgcacctcccgccagcccagcaccccccgcccctgcctctgccttcccacccagggtgaccccccaggccatctcgccccggggcccaccagccccgcctcgcctgctgccctagacatctcagagcccctggctgtatcagtgccacccgctgtcctagaactgctgggggctgggggagcacctgcctcagccaccccaacaccagctctcagccccggccggagcctgcgcccccatctcatacccctgctgctgcgaggagccgaggccccgctgactgacgcctgccagcaggagatgtgcagcaagctccggggagcccaggcccactcggtcctgatatggagtcaccactgccaccccctcccctntctctcctgcgccctgggggtnccccacccccnccccctaagaacccagcacgcctcatggccctggccctggctgagcgggctcagcaggtggccgagcaacagagccagcaggagtgtgggggcaccccaccngcnncccaatcccccttccaccgctcgctgtctctggaggtgngcggggagcccctggggacctcagggagtggnccncctcccaactccctagcacacccgggtgcctggnnnccgggacccccaccctacttaccaaggcaacaaagtgatgggagcctgctgaggagccagcggcccatggggacctcaaggaggggactccgaggccctgcccaggagcncccagcatgtcctgacctgtgcacggggatgggggnacnacncctacccttctttcccnncatnccccactaaaccnacagacnanntta

SEQ ID NO: 353770 - DNA, 577 bp, Homo Sapiens
  misc_feature (106)..(106): n is a, c, g, or t
tagggaggaatagcgagctaactaaaggagaagtgaagagttagatatgctaaatgaatgtgtgcacactggaggcatgaagagagaggagaggaaggagttgcgncattacccctatatatccatccagaggttcctccactttgagggccagaaccgaagaataatgttaagcacaaggtgggaggggccgtccttccttccattgcccctcattggatttgggcccaaccaaataccttgttttgtaatttcgtgaaacccgaccaactaaccccaggtttctaactttgtaacttgcttctgatgtgggtccctaaccatataatctcagcttccctaccctggactgaagggtctgcccatcccccccaccaccctccatcctgggggccctcgcacaaatctggggtgggaggggctaggctgaccccatcctcctctccctccaggagcccccagcatgtcctgacctgtgcacggggatggggggacaactcctacccttctttccccacatgccccactaaaccatctgacaacattaatgaataaaatggtgaaaatgtgaaaaaaa

SEQ ID NO: 353771 - DNA, 955 bp, Homo Sapiens
ggcggttgtcgctgagttggcgaccgcgggagacgctgctgaggcggcttcggttgcgggtcggaacggcgctgctctgcggggccggtccaggctggcagctgccggcgcttggcggtgagggcgggctcccgagtggccccccaccgaaggcggtgggaccagcggctgaggccaggatgccgtccaggcggcgcggcggctcctcactcatcccagatgttggttatctttctgaagtagactgtccatggcctgaacattttccgaaaatcattttgagcaaaatatctgtttaataacaagataaccacatcaagatggttggaaagctgaagcagaacttactattggcatgtctggtgattagttctgtgactgtgttttacctgggccagcatgccatggaatgccatcaccggatagaggaacgtagccagccagtcaaattggagagcacaaggaccactgtgagaactggcctggacctcaaagccaacaaaacctttgcctatcacaaagatatgcctttaatatttattggaggtgtgcctcggagtggaaccacactcatgagggccatgctggacgcacatcctgacattcgctgtggagaggaaaccagggtcattccccgaatcctggccctgaagcagatgtggtcacggtcaagtaaagagaagatccgcctggatgaggctggtgttactgatgaagtgctggattctgccatgcaagccttcttactagaaattatcgttaagcatggggagccagccccttatttatgtaataaagatccttttgccctgaaatctttaacttacctttctaggttattccccaatgccaaatttctccttgatggtcccgagatggccgggcaatcagtacattcaatgattttctcgaaaagttactatagctggatttgatcttgaacagctatagggac

SEQ ID NO: 353772 - DNA, 2131 bp, Homo Sapiens
  misc_feature (51)..(87): n is a, c, g, or t
  misc_feature (1158)..(1189): n is a, c, g, or t
  misc_feature (1374)..(1430): n is a, c, g, or t
  misc_feature (1656)..(1656): n is a, c, g, or t
  misc_feature (1933)..(1946): n is a, c, g, or t
  misc_feature (1970)..(1970): n is a, c, g, or t
  misc_feature (1985)..(1985): n is a, c, g, or t
  misc_feature (2064)..(2064): n is a, c, g, or t
ggatgtatagactactatgggcgaattggagctctacgcggtggcggccgnnnnnnnnnnnnnnnnnnnnnnnnnnnnnnnnnnnnnatcaggccaaatcggccgagctcgaattcgtcgagagcggagacgctgctgaggcggcttcggttgcgggtcggaacggcgctgctctgcggggccggtccaggctggcagctgccggcgcttggcggtgagggcgggctcccgagtggccccccaccgaaggcggtgggaccagcggctgaggccaggatgccgtccaggcggcgcggcggctcctcactcatcccagagtggagagatctacagaccaagtaatcaagccagtcaatgtaggagctctatcaaaatgggttgggaagataccgccagatgttttacaagacatggcagtgattgctcctatgcatgccaagcttggatatgacccatatgccaacccacctaactacggaaaacctgatcccaaaattattgaaaacactcgaagggtctataagggagaattccaactacctgactttcttaaagaaaaacaacagactgagcaagtggagtagcagaaccaggagcctcttccatacatgaggaaagattgctgccttttcagcagaagggaaattcctaggattggctgtcccctgccaagcttggtggagcgtctgcaccttggctgcgccgcctgtgcatttgccagtttcctcccactgagaggatggaggtgtccgcacagctttgggcctcgtgagggatctgcctcctgagcaaagagctcttgatcccgatttcatgcacagccctgcagtaaggagcccagaaggaacatgtgtttcctgttaaaactcctcttgttctcttttcttacattatgacgtttgttttcaaggagagggtttaaaaatgggatcctgtaagcagacttgggcagtctccttttgaaataggttgtctgtacatgttctaatgttttgtagaacacgtgtgcctgtttaagtgtattgatgtgaataatattaaatatcctaattatttaattcattgtattgtttctgagaagttgggaaattaccattatacatttacaacctaatgacttttgtattttatttttcaaaataaaagctttcaatgtgnnnnnnnnnnnnnnnnnnnnnnnnnnnnnnnngtcatcaaagatcagaaagatccacaacggcaccatacccaacgacggcgaagcacctggaaggagaggggcagaggcagattcgaagcgaccgcgcccaactcaaccccgaggaaaagcaggtattcagagaggtggcgccgcgccctccctctccgacattagaataatttagcaaaaccaannnnnnnnnnnnnnnnnnnnnnnnnnnnnnnnnnnnnnnnnnnnnnnnnnnnnnnnncgaacatgctcgcgctgccagaaaagaagacgccgtggtctaagaccacgaagaggacgctgatattctttcccgcgcccgacacaagaagcaggccgcgcgcggtggagggagcacgaccgggccgctgctagcgtatagcaacactacactcgccgcatcgccgggtgctctctcggcaggcagagagagaagcacaaaagaaggagacgatcccgctgctgcnctcgagagatgctagtgtcctcacgagcggagagtgcgtggcggatgtttagccgcctcaagggtgtggggtctctccctactgcttagctgggcacactagtacggatatgaccagcgactaaggggcgttgggtactatgctctctaacatacataaaaacagttactcgtcgccccacagagcgagtgtaacaagtgcgccgcacctacgtgcaggggctggtagatggaataggactgagcacgcgcatgcagccgtgccgagcaccatgtannnnnnnnnnnnnntggaaccgatccgcacgagtagantcaatgttacagagncctctgccgtgggccgcaacgcacaggcgagcgcgcggaacagaccgacttccctctcgtcgccattgggcgcccgtcncccgttcctaaggacgtagcgcgggtgggggggagagataaccactcccagatgtagcatatagatc

SEQ ID NO: 353773 - DNA, 725 bp, Homo Sapiens
ctactgggaaaaacgcgccaagttcccctcggtggcggagtgctaaagaccctagcggttcaggcgttcggcgagcggggccgctgcttgttgcgctcctggctctcccggggcgggcgcagatgggcgccgctcccgggatgtagttggtgttggtgcaaggcgggagcgagcggcggtcggggttcccgctcttgggagcggatggtcactcccccgcggggagggcgagccgaccagattttcctggggccggggacccggcgggctcggggcagggactcacctgtcgcacccacactcattcgggctggacttgccggcgtcaccgccgcggacttcgctttgggccatgaccagatataattggtgattacaactttcctctataaattaactcttgacactccttgggatttgaagaaaaaaatgcctggtgtcatacctagtgaaagtaatggactttcaagaggtagcccttcaaagaaaaacagactttccttaaagttttttcagaaaaaggaaactaagagagctttggatttcacagattctcaagaaaatgaagaaaaagcttctgaatatagagcatctgaaattgatcaagttgttcctgcagcacagtcttcacctataaactgtgagaagggagaaaacttgttaccatttgtgggactgaataatctcggcaatacttgctatcttaatagtatacttcaggtatt

SEQ ID NO: 353774 - DNA, 887 bp, Homo Sapiens
  misc_feature (312)..(353): n is a, c, g, or t
  misc_feature (641)..(733): n is a, c, g, or t
atgacaaagccatgaaactggagcaggaatttggagagtactttacagccattgtacagggtgactcactgggaagagatttataacaaaatcaaacaaatcattgaggaccagtctgggcactacatttgggtcccatcccctgaaaaactctgaagaatcccctccaaccattctcttgtgaacagaagaaatcaagtccctcttccctcctccctcttcattcctgtccccatggggagaacaaatgctactgttcttgtccccttttttagatatgtcaaaaaaaattaagttttctagtcctgttcnnnnnnnnnnnnnnnnnnnnnnnnnnnnnnnnnnnnnnnnnngggatgatgccatctcattcatcatgtgactgtgcccattcctgcatggacctttcccaagcgctagcacaggtgcaaaatccatcagagccattgttttcataaaaaccaagcagaagtgaagagaaaagaggaggactgatggaaagacagactctggacagctgcacggcttgtgaagtgagctaaatgcaccacatgatgagatgctcctgggcatttctccctatctgtactgctgtcttgcagctctgaacggtgcaacgtaatggcgacagaaagtatctnnnnnnnnnnnnnnnnnnnnnnnnnnnnnnnnnnnnnnnnnnnnnnnnnnnnnnnnnnnnnnnnnnnnnnnnnnnnnnnnnnnnnnnnnnnnntcacacacatttgggttagaaaatctatggagacttcatcaatggtactatgttattagagaaatgctttaattttcatattccaatcagatggcatcttctatcccacctggttggggaaaggattggaagatggtagcaagtgctgcactaa

SEQ ID NO: 353775 - DNA, 2885 bp, Homo Sapiens
  misc_feature (565)..(605): n is a, c, g, or t
  misc_feature (888)..(986): n is a, c, g, or t
  misc_feature (1738)..(1750): n is a, c, g, or t
  misc_feature (1988)..(1988): n is a, c, g, or t
ggaccaacaagttcatcggaggcgggccaattttaaatgataaccctctatgggaccagcatccagtcagtgcgggcagttgcagagaggggcaagcactgcatcttagatgtttccggcaatgctatcaagagactgcagcaagcacaactttaccccattgccattttcatcaagcccaagtccattgaagcccttatggaaatgaaccgaaggcagacatatgaacaagcaaataagatctatgacaaagccatgaaactggagcaggaatttggagagtactttacagccattgtacagggtgactcactggaagagatttataacaaaatcaaacaaatcattgagggaccagtctgggggcactacatttgggtcccatcccctgaaaaactctgaagggaatcccctccaaccattctcttgtgaacagaagaaatcaagtccctcttccctcctccctcttcattcctggccccatggggagaacaaatgctactgttcttgtccccttttttagatatgtcatgtcaaaaaaaattaagttttctagtcctgttcnnnnnnnnnnnnnnnnnnnnnnnnnnnnnnnnnnnnnnnnngggatgatgccatctcattcatcatgtgactgtgcccattcctgcatggacctttcccaagcgctagcacaggtgcaaaatccatcagagccattgttttcataaaaaccaagcagaagtgaagagaaaagaggaggactgatggaaagacagactctggacagctgcacggcttgtgaagtgagctaaatgcaccacatgatgagatgctcctgggcatttctccctatctgtactgctgtcttgcagctctgaacggtgcaacgtaatggcgacagaaagnnnnnnnnnnnnnnnnnnnnnnnnnnnnnnnnnnnnnnnnnnnnnnnnnnnnnnnnnnnnnnnnnnnnnnnnnnnnnnnnnnnnnnnnnnnnnnnnnnntcacacacattggggttagaaaatctatggagacttcatcaatggtactatgttattagagaaatgctttaattttcatattccaatcagatggcatcttctatcccagctggttgggaagggattgaagatggtagcaagtgctgcactaagggcactcgcatttggtcattctcttgagagctaggaggggtcagcctgaggccggagaggaagggcttttgcctggggtgagagggtgagagacttgacctgaaagcagctgctgcccctgaggtgcagccagagtcctgtgtgcggacagagagaatggctaatgatgctccgcgtggaattgcctattgttttatgccacctgatgtgtctgcatgagaggtttcctttttgttcctttttaagctgctgttaaaccaaaaccatgttgtgctactgtgtcagccttttcattattgcaaattttacttttactatttaagtgaatgcatagaatccaatttgccaaggttctaaaggcttatgaggtcctgaaggagccaggccttgtgatggagtaggtgacacaggcctggttgtcctgtcagcagaagggaaagcaggggctgggctgagaggaggacacggagggctctgctgaggttccttcctgggttccaccaacagggacagggagtcacttgccttccagttctgtgctgggatggcgggacagcacttggcttgcttggccagctgcgtcatgagtttgatttggnnnnnnnnnnnnngcagctgcttcatatgctctgctccagcccctccccaacagctggtagcttatggtttcttcaagaggaaagtagactttatgctgtacatttgagctgtagagctaagattcgcttactggtgagctgtgaaaccttgttgctttttcccagagtctgatggcagtgactgtgatcaagggaatcttcaccgccacaagtgcaggcagcaggtgtggttcaggtcccccccaccccnactgtgctcctttgaagccaacgtgcctccctcgcctccatactggagggacgacgcaggggagaacagagaagtgcttggccctaggattgaggcacttgtttcctagcccgctgggttagggctggtgcaagcgaggcaatgttgaggatgctttaagcactaccagccgaatccgggaactctgttaacagttgtccaaccagcagaatgaggctaactgtataaagcatgggacccaggatgaggataaggaaaggacagcggctttccctgggcagtacaatggcttgaaggcaaaaagggataaagtgacagccgactgtgactctggtgaggaggggtgagcagggaggttgattctctgatgttaactaagtggcaaagtctcaaccgtgctcagccctccccctcccagggaagagaaacaaagattcaaagtaagcatgatactagtgggtttaccagtgtttcttccaaggagacatatattttttaataaacgatagttgcaatgaactgtggctcagagaccttcttaaagtagttgagaagggagggcgtgggcaaagcagtgggaagaacatcccaaacttttgggggccagagggctctctccttagtgatgatcagctagccgagctgggccgtcctggggatcggtacagctccctggggtggtgacaggccctttgtgaaagttgtgtgcttggtcttccaacccagccccagacactgcgttcaaatagcaccaaccagatgggagtccacatctgtggtggcaaaatgctgacattttccccaagaggtacacaaggtgggagaggcctgctgtaacagaggtgtgtgttagagaaagcaggtgcctgatttagtagcaagagaactgggtgagaa

SEQ ID NO: 353776 - DNA, 154 bp, Homo Sapiens
caatggcagccgaatccgggaactctgttaacagttgtccaaccagcagaatgaggctaactgtataaagcatgggacccaggatgaggataaggaaaggacagctgccatgccggcgccattgggccggctgccattgggcgggtgccgagct

SEQ ID NO: 353777 - DNA, 861 bp, Homo Sapiens
  misc_feature (42)..(74): n is a, c, g, or t
atactatagggcgaactcgcggtcatcgcggggcggcgcatnnnnnnnnnnnnnnnnnnnnnnnnnnnnnnnnnatcaggccaaatcggccgagctcgaattcgtcgagagcggctgtccatagttagacaaagaaaaccaatttccactgcactagtaccaaaatactactttatacattagtttttcataaaagctgctggaatgtcatgattcagtattacctaaatagatttctgctaaaatcctctccctcctgtcttttttaagttatggaaaaacacaactaaattcatttgatcatcagcacttgttagcaggatttccttttttacctttgccttgtttctttagcccacaaatagtactcagcatactttcattaaaaatttggcacaatatgataattgttaatattctgttcttcgtctgtgttttatttaacttttactagtgtttagaagtgcaagaatattaaatagccccttccttaactgtacatattatcttgaatgtagataaaatgaaaatactgtaaattagagtgtaggaaaactggcatagagttaatatattttaatgggtttacattatactttaaaagtaatttatataattaaaactatttggttttaactctatgggctattctttggttggctgaagagggaatgggtctagtaaggtttggaaagttaagctttgaacatggtctatgtgtttttttcctaacaaggaaaggtttagttcagctgtgctattttagtacacatcagttctcttgatttatggaagattcagtttatcaattaagaattcctgcagaagcacagaatcataccatgtaagagttggaaagga

SEQ ID NO: 353778 - DNA, 379 bp, Homo Sapiens
ttttctttaagaattttttcaaacctgtcttgtagctcagctgcagctgctttgtctgagcgctggtaaattagctcttcaggctgaacactggaaaggccaggatatggaaggcttcttgaaaagaaagatttccatagcttgggcctggtgacatcaaaatttatccttagtggagattcatatcgttgaatattaaaccaaatattgtcaggacctattaaacagcccacatttttcaagggacagaatgtatcaaattgtccataaaaatgtccactgcagggattccatattaaataacgaccttgctcccaagttagcacataggcagttggaccctcaggaatagcattgcccatcaacagccaggccttct

SEQ ID NO: 353779 - DNA, 790 bp, Homo Sapiens
  misc_feature (661)..(675): n is a, c, g, or t
tgaggcgtaccaataggcgaagacggtggctcatgaaccccaggaatcaggagggctgaagttattgacgggaaacattttcaggcctcatggttacccatgggcaatcacaggctcatctttcctcccccttagaacagtggttcctgatattttgcggagcagggagcgcttggagaatttaaggtatggcctctcttttcaggaatccaaggaaaggcacaaattcagcatttggcatttatctgcagggagtcagagacggcctaacccttgccttgaaagcctgcctaaggccaacgcccttgagtcccatgcccgccacagaactgtgataccaagagactgttgcccaagaggtggagattctttctcgtggagcagaggagggagggtcagagatccagccatgaggagtggggagcgggggactgcaggggcaatgagctgccctgtctcgctgtcatctgcaccggtgaggatttcgagccatctgacagacccgtgactgcttgggaggttcagacccaggtgcttgcgtatctgcctccctggaggtctttaaattaagatccatcatttgtccaaaacagccaggccagggccttacccagtggccagggtctaccaggcccctcctctccaccctcaccatcaacannnnnnnnnnnnnnnccttcgttagcacccttctatcgctaccctttcctgctcgtgctttccacgctctttctttattccagctctgccttactcgagcaaatggcatcaccaaattccagatactaca

SEQ ID NO: 353780 - DNA, 931 bp, Homo Sapiens
  misc_feature (51)..(87): n is a, c, g, or t
  misc_feature (732)..(732): n is a, c, g, or t
  misc_feature (803)..(860): n is a, c, g, or t
gggatgtatagatcactatagggcgacctggagttgacgcggtggcggcgnnnnnnnnnnnnnnnnnnnnnnnnnnnnnnnnnnnnnatcaggccaaatcggccgagctcgaattcgtcgagagcgggcttgtctgcgtgctgcgaagtccgcggctgcccccggggccctagtcgttgggttccagggtccttcacgttccattcccaggctggtctgagctcaggggccgtggtcccgctgcctcctccggtcgtcatgcggaagctgcgacgcaggcagaccatggcagagttctcccagaaacgggggaagcggcgtagcgacgaagggctgggcagcatggtggacttcctcctggccaatgcccgcctggtgctgggcgtgggcggggctgctgtgctgggcattgccaccctggccgtgaagcggttcattgacagggccactagcccgcgggatgaggatgacaccaaggcagacagctggaaggaactgagcctgctcaaggccacagcacgacctgcagccccgggctccacctgctgcccttagccagccagtgttgcccttggccccctcgtcgtctgccccagaagggcctgcagaaactgatcctgaggtgacaccacagctcagctccccagcaccgctgtgtctgacactgcaggagaggctgctggccttcgagcgggaccgtgtgaccatcccagcagcccaggtggctttggncaaacagctggctggcgacatcgcctggagctgcaggctactttcggagcaagttcccggaactgcctttnnnnnnnnnnnnnnnnnnnnnnnnnnnnnnnnnnnnnnnnnnnnnnnnnnnnnnnnnnaccatgtgcgtctcctggtgccactggtgctggagccggacctgtggagcctggtgccggggtggccctgt

SEQ ID NO: 353781 - DNA, 643 bp, Homo Sapiens
  misc_feature (568)..(568): n is a, c, g, or t
  misc_feature (587)..(587): n is a, c, g, or t
ctcggctctatcttgtctctctatgcatccatagctccagaagatagactcttaggataaagagttgacaccatctccaagcatcccaaacagcatgtgtacttatatacatgattagccacgttggaatgtctttagtgttaaggcaagaaatgtccttagagtcccagagagggaaaaaatgtgggttatgttatgtccaaatccataaccaccacttcagggagttgtgcagtgaattgctttattgaataagtgtgagaaaggaaagatattagttgtccaagaatgctattgccaaactttgtggaaacagagtattttctgtggaaacagcatacattttattctgtgccatggaatttcccctcatttgacccaaggggtaaagaaaaactcttatgcaaccatcccattttaaaagttattcttttatatgtaggctggttaataaccaacaacagacaattttatctaagatgactaagatcttgcatttcgcttttagtgagagctgatttacatatctaattcatgttctattagcagagttatgggaatataaggnaatgcaagaaaacccaggncttggacagattttaaagtcctacagttatatacagttgtgaggatgtccttcaaa

SEQ ID NO: 353782 - DNA, 665 bp, Homo Sapiens
  misc_feature (274)..(338): n is a, c, g, or t
cttagaacacctaaatatttatttggataaaataaaataacaagaatctggagaaaagaaactaagagccccaaagttaaagctggtaaaatagttcaagaacttgcagcaagtacctagaaaatattaaatggttaggacaaaacattcacagttcaaggtcccaagaaaatgatctggtgagcaaatacatatacacacttaaaactaatctggatgaattagtgaagcaatgaataaataggtcaattactaaacccacataacttattcnnnnnnnnnnnnnnnnnnnnnnnnnnnnnnnnnnnnnnnnnnnnnnnnnnnnnnnnnnnnnnnnntattaggcaaactagaacaggagggccgttattaaattgttcacaataacttactatttgagacaaaactgaatagaaaatctgaattgtgagaataaacaagttgtttctcaactacaattatttgacagctactcaaaaagtgcatatactgcaggtcttaatactactaactactggtaaaaatgactaaaccagaactgccagcaccaaattaatttcaagggttataattttatgcatttagtattaactaaaatgctaattatcattggttagcttttcaaaatcatactgcctacagaatttccacaaaagactaatttc

SEQ ID NO: 353783 - DNA, 686 bp, Homo Sapiens
cttccagtagccggcggcggtgtctcaggcggcaatggaaggatccgagcctgtggccgcccatcagggggaagaggcgtcctgttcttcctgggggactggcagcacaaataaaaatttgcccattatgtcaacagcatctgtggaaatcgatgatgcattgtacagtcgacagaggtacgttcttggagacacagcaatgcagaagattggccaagtcccatgttttcttaagtgggatgggtggtcttggtttggaaattgcaaagaatcttgttcttgcagggattaaggcagttacaattcatgatacagaaaaatgccaagcatgggatctaggaaccaacttctttctcagtgaagatgatgctgttaataagagaaacagggctgaagctgtacttaaacatattgcagaactaaatccatacgttcatgtcacatcatcttctgttcctttcaatgagaccacagatctctcctttttagataaataccagtgtgtagtattgactgagatgaaacttccattgcagaagaagatcaatgacttttgccgtttctcagttgccctccaattaagtttatcagtgcagatgtacatggaatttggtcaaggttatctgtgatttcggtgattgaattcgaagtttacagatacaacaggagacgaaccaaaaagaact

SEQ ID NO: 353784 - DNA, 1416 bp, Homo Sapiens
  misc_feature (1152)..(1274): n is a, c, g, or t
  misc_feature (1276)..(1282): n is a, c, g, or t
  misc_feature (1290)..(1304): n is a, c, g, or t
  misc_feature (1329)..(1338): n is a, c, g, or t
taaggccttctaaatcataatagctctttcatgtctaaaaccattttatgatattgccaaaatgtgataggaaacctactcattaaattgttaaactttttaatgactatgtgaagatatgaattgtttcctgaagataatactcttaattgagttgtattgtacttcttaggcaaagcagtgtaaaactgtatcaattaaggcttgtgagtagtgatttccactggggcatcagagtcttggctgggctgaatctgctgcttgttggttcagtgtttcttatgaacaagagccacagtacagagcttcaagttatttaaaatactaagtcatcttacgtttccattttattaacgggatgttgcaatcgtttgtaaactaataaacttataaagtgattggcacaaagactccttgagcaaaagctgtgcagttaagtacaaaaagatacttaatttggagactcttacagtaatttttgccatgtcaaaacaatggcttttacattgaaagattaatagaaactctacatatgttaatttttttatagaacctgactcaaatcaagggactctccattttattgccttacctgaatcagtcctttttggttggtaatagatttttttatacacccacgtttgatttaaaagtaaattctagttcttaagcacttttaacaagaaatccagaagcacatttttctgcacaaacaagttacaaagttcaaaagtgtttcttgtgcattagctttgagattcagtttttaactttgtaaaccacatctgagagacttgtcatttctacattgtgtgtgtttaatttcttttgattccattttggttaagagagcagtaaatagattttctggtattcttgttcacttgattacatttgtataaagttctgattgccagttgctcagataacaagtgacaaggcagaattctttaaatcagtaaagttccttaagcctaaggctaaatcttgaatacattgttgaattctttaatatcctgatggcaagcagactgatagctgcacatttggcatgctttgtttaatggattttatttttaattgcagatttatttggcaatgtacagtaaattttgtaaacttgcatcaagtttatgaataaagaaccatttnnnnnnnnnnnnnnnnnnnnnnnnnnnnnnnnnnnnnnnnnnnnnnnnnnnnnnnnnnnnnnnnnnnnnnnnnnnnnnnnnnnnnnnnnnnnnnnnnnnnnnnnnnnnnnnnnnnnnnnnnnnannnnnnngggggggnnnnnnnnnnnnnnnaaaaaactttttaaacccttttttnnnnnnnnnncccccaagggagaaggaacccgggcttaatttttccccaaaaaaaccggggccagaacaagggggttgggtccccccc

SEQ ID NO: 353785 - DNA, 468 bp, Homo Sapiens
atgaaaacatttgtaaggctgcaacataatattaaaatgtgaataaataaatgttctgataaaatagaaaagaaagtaaattacagtgatttccatcatattatcactcttgaattttatcatctataaaatgagagataaaaatatctcactgaattgttacttatatcaatttaaaatttgctagtggtttgaaaataataatgtactgactacatgtatgctgttattgtcagtgtttccttctataaactgttctttggaaaaattaagttatacataaaattcatattaaactttttacagaaagcatacatgataaacagtttatggtacttctcagaatcatttcataataagcaatttatttagcttaagttccaacttactgttcttattataaattgcaaagcaacctgtcttacattcttacattatcttaaaataaatatttctgccttgatcaag

SEQ ID NO: 353786 - DNA, 1936 bp, Homo Sapiens
  misc_feature (1922)..(1922): n is a, c, g, or t
ctggcgacacactaacaggaaggcgtgctgtgttaccgggaaggcgcctctggctgtggggtgcgttctgaccaccccgctcagatgccagcattttccatttgcccttaaggaaacttgctatgtgtgttaacccagttatgattagtcaaaactgggaaaacactggatcaaacctaaaaatgtaaaaacctgtcctaacttttaaaaaatactttcccacagttgtaccttaagttcaattaactacagtatagagaaaaataattattctcttctttgcacccggagttgcaaacaaattaagtttacaaatctcatttaaacatatatctttgtaatgtaatctccgcggttctttctttgttctaccctcctgcacctgttgtcgatgtaatcattttgggaacagaaacgttgtgtctcaaaaagattcgttgtcagttcagccaagatgttctttacctgagattctggaaagatgtttatctatatcggaacacttctacattattaaatgtccttaagctttttcttttttacaagtgtcttttcagactttggtgttgtgatgacacagtagaaagagcgtggctagaatccgtggtttgccacatctgcagcttaccaaacggatgacttgtccaggacatctgatccctgtaagcctcagcatccctcctggtaaatggagggtttttttacgacaaagcccaaaggggggttttggatgattaggctgtgtgtgcgtgtgagaatgatcacatgtggcgtcatgctttgtacagagcctcagaccactgggccttgtccagtgagagtcctctctggcgacatcacacgcggagcagccaggggccaccttaaatctcagatctctcagagcaatacttttctgaactgccactgtgcctgggtggttggggtttggtgtcatgcttctgactagagtagatcgcgcatgtccaccagtgatacgttgagtccttacagttccccccatggagtcccataagcagctccatcgagatctgtcagcaagttgcaggaccccacaatgttctgacatgttaagacccccttacatgacgagtagagaggcagctgaggccacaaccgtgtcttcctcttgaatggagctaactcggaaccccccgttttctcttcctttctgcccaccactgaacaatgccttttagataactcagtgtttcttctagatgtcatagcaatagactttcactttcatgaagtttgggtacgatttggattctcgcttaagtacatatatttatcaatatttttataaggcaaagttcacttaaaaaatctttccaagtagcagtgtgcctaagatggcaaaatactaaaaactggtgtttcctgctcctgttgtgtgtcacttttcaagccgattgaaatatttctggcttttagggcattactttttaactatctcctttaaaaacgatgttctgtaggtttagtgtctttgttcatttccaaaagagtccagacaactgtgtctgcccctgcagaggctgtttgtccaaaggcagcatgccgcttccaccggaacgcagacagcagggggagcggaattctaaagcagcgacttaaaatgaggaatccccaattgcactaaatggtttcaggattgactaatcattgtcttaacattaactcagattttcgatgtgtaaagagctgtgtgacttggcgtctgagagatccctctgctttgctttgcttcagagtcctcgcacccgcatcctcagaactgtggggcatggtgggctctaacgagcactccccttctgttttccttcattacttttgacctccttaagacttcagagagaatggccgtcaagttcttttctccatcaagttctttaagttccttgaaaggaaggggattnttgcaaaacacaaa

SEQ ID NO: 353787 - DNA, 839 bp, Homo Sapiens
gttgaaaggctagcacaatgaatactcagatacatactctccacttggattgaatagttgttaacattttgccagatttactattctctccaccccatgcatgtgtacatagaatgacatttcgacccctgagtattaccacatagatttcctgagcacaaagacaccgttctacatgattacattaagatgatcatgcctaaaaatataaacagtaacttctttatagcctctaatacagagcccttaatcagtattcaacaattgtctccagaatgtttgtctttaaaaacaacgacaacaaccaggtcccatcaaggttcatacattcttttggtttcaactctagtcactttcagtctacaacaaccccgacatattttcccatgatactttttgaagcatccaggccagctgtcttagcaaatgtcctctattctggaagtgtctgattgcttccttaggcctatgtctacactccactcgtggctcatatccctgcagagttgtaatctcctctgggccagggactcctgaatatctccaggccgagtgttctccccgggcctggagaaaaccttcatgcccaatcccttgctgcatgtctccacccctccttgcacatcctgcctctatgagtggacgaggcaaaatctactcaacccccgcatcccaccccctcacctgataactaacattttactggggcactaaacaaatgtattcagggcaccataactacaacactttaaacaatggcatttggctttttcacattaacccaagccttccatggggtaaaaccatttggccgccttggggcttttttaccgagccct

SEQ ID NO: 353788 - DNA, 603 bp, Homo Sapiens
ctttggcaagcgtgccttgtcggctgggttaagccgcagtgcgtgcacaccgagcggcggggcgctgtggaacgcgggagcgacctagcggaggaggatgcggaccaagccccagcgacccagggcaactcggagctacctcgggcagccctgcgggtctccgaggagaaccgaggagacgggagaaacatgggagagggtggccttttccctgttcacacacacatgcacgcagccactggccgggacagttgacacccatcttccttccctgctccttccagtcattctacacccgcttggtgctgccagtgcgggcagggccttggagcccaaagcggatccccacacttgtccctacggtcggaaggaaagtagaggagagaaagtcaggcgcggcagggctaagagcaatagtggcccaaatgttcctggcccgcctgctgcgccacagagtctgaaaagcgggtctccgtctaccagaaggtgacctccacacagcccctctccccgaccaactgcagcacccaaggactggcaacgtggttggagcttttggggggaattatgaagaaatctgaataaatttctcaaccttcaaaa

SEQ ID NO: 353789 - DNA, 578 bp, Homo Sapiens
catgtgctgcttaagaaaccttgtgcttttcaagatcttaagacacatctgctaagttgcagaaatcttaaaaggttgaaagttttaataaaatgctaccagactacaaaaagaaaaagcataagactatagatttagtcacttaaccggcacagtaacttgatcaaaaaaacttatgttgccaaattctcacaggcacactaccttccgagccatcactatataaccagagacaattacgttctcagtactattctatattgttgcaaactaaatgaacaaaccccacccaccttcatcagtccatcttttcccttaggtctttgaaaagtgcagacactttgctgtaattccatgttttagacacttcccgaacagtgaaacacgaagctaaagtaactgcaataaagcagtgagtgacttcactattcccatctagttttaggtaattctggagatagaagttttcaatagaaacatatgtgcctaaatggcagaccccccaggtatgcaaacacagcagcctacactttttctcattccatttataatagaccagttactaagagtattactcg

SEQ ID NO: 353790 - DNA, 730 bp, Homo Sapiens
  misc_feature (186)..(233): n is a, c, g, or t
  misc_feature (310)..(321): n is a, c, g, or t
  misc_feature (494)..(516): n is a, c, g, or t
agatgttaggccaatggaatataatggaatttaacatgtaattagaaaagttacctgtgcctatgaaacaggatttactggtgtgaacatagttactgagcatatctaccatccagcaccctaattaattgacgtaataagcttcctcatattacagatttccgcaaaagaaagaaggaaaaaggnnnnnnnnnnnnnnnnnnnnnnnnnnnnnnnnnnnnnnnnnnnnnnnnaccttctgtggctcaaaacacagtatcacggccctatctgcaggcaacttgcaattgccaaatacaatttagtgatnnnnnnnnnnnncctttcagtgatgaaaaaatacttgttaagtcccactgaagtactgctttagtttaactatacataagaaattacttaaccttctgctattccaaatatatttaatgctcatgttttaagatgagccttccacccccaaaagtaactgcattttatatttgaaattaagcggnnnnnnnnnnnnnnnnnnnnnnnccagtgctggtgacaaatgtacagcgaattcacttcttcattctttgcaaagactgaaatcaatgttcaggaccatgaagagctagaaattcacctattttcagagacttgtttgtagactatgcagcaactttgttgtctttctttcagaaagcagtacgatcaatccagaccttttagggtccaaaagctgtggttttcctatattcaaaat

SEQ ID NO: 353791 - DNA, 1442 bp, Homo Sapiens
  misc_feature (560)..(605): n is a, c, g, or t
  misc_feature (921)..(969): n is a, c, g, or t
  misc_feature (1046)..(1057): n is a, c, g, or t
  misc_feature (1194)..(1194): n is a, c, g, or t
  misc_feature (1231)..(1253): n is a, c, g, or t
ttaaggaaaaaccaatccaaaattatttagataaaaaatatttaaatctttggatcctttttatcccatggccttcataaaaacacaaaagtggccagatttttcccactagagcttaaaatatcaaaaagattcactagtaatttataattagcaatgaactctatactgagtcatctgtgggtcataggcccaaggaccagtgttgccgtgtgttacaggctaccaaaataatttctagcactctgaatcctcttgaaatatgatggaatgagtcaaggtatcatgactaaattccaggcataataggaaaaacaggttcattgatgcctagttttaaagtcctacaaaaggggggaagattacttatttgaaaatacagctaagtacattctcatctgtgattatttacatttgtatactgaaaatatcgattatctggacagatcctgtgatatgccatttgctacaaaatgaagttcttacaatgagcatgaataattaatcctttttagataatgaaataatgtatcaaatcttcatttatgttccaaacattnnnnnnnnnnnnnnnnnnnnnnnnnnnnnnnnnnnnnnnnnnnnnngacccacccataaggctgctgctcagcacatcaacttctgcaaggacacagtatgtttgcctgactttaaaatgtttattcctttaaaaaattagttgctttttatacagctatacaaagttccttaatgtttctttggcaatggaatataatggaattttacaactatataaaaaagttacctttgcctaagaaacagtatttactgtgtgtacatagttgactgacaaaattctctaccatccagcaccctaattaattgacgaaataagctacctcatattacaggattccccaaaagaaaggaggaaaaagnnnnnnnnnnnnnnnnnnnnnnnnnnnnnnnnnnnnnnnnnnnnnnnnnaccttctgtggctcaaaacacagtatcacggccctatctgcaggcaacttgcaactgccaaatacaatttagtgatnnnnnnnnnnnncctttcagtgatgaaaaaatacttgttaagtcccactgaagtactgctttagtttaactatacataagaaattacttaaccttctgctattccaaatatatttaatgctcatgttttaagatgagccttccaccccncaaaagtaactgcattttatctttgaaattaagcggnnnnnnnnnnnnnnnnnnnnnnnccagtgctggtgacaaatgtacagcgaattcacttcttcattctttgcaaagactgaaatcaatgttcaggaccatgaagagctagaaattcacctattttcagagacttgtttgtagactatgcagcaactttgttgtctttcctatattcaaaatccgcaaactcccggcccccacgacctcctctg

SEQ ID NO: 353792 - DNA, 1307 bp, Homo Sapiens
ttttttttattgaacagttttattctgttttagaataaaaactttgctttaatattgtaaggggtactgcaggtatgccatgctgccagttattgctggggcacaaaacgccccagtcagtgattcggagggctgggaaaacgcataaactcataatttcagagcaagtagaactagtatttacagttttctttcttgaaattggcccgggacatctccaacagtctacacatgtattgccatggtacttgctctgatgctctgaatgcctcggaactgtgttcaatatcatgatttgtgggtcctctaaaaggttttgttgttaacatgcaagcaaacagcactgaacaatattgtctaaactatggctgccaagtactggatcttcataatgaaaccaaattacaaaacactgccttgtagagctatacaaaagatataaaatgaaaataaaaaatgtcaaccagccttaaatattccaattctcctacagtgcagtttctatatctttatcactactgaatgttttaaggagaaagttaagaaaacaatcaaaatattagataaaaatatttaaatctttggatccttttattccatggccttcataaaaacacaaaagtggccagatttttcccactagagcttaaaatatcaaaaagattcactagtaatttataattagcaatgaactctatactgagtcatctgtgggtcatcataggcccaaggaccagtgttgccgtgtgttacaggctaccaaaataatttctagcactctgaatcctcttgaaatatgatggaatgagtcaaggtatcatgactaaattccaggcataataggaaaaacaggttcattgatgcctagttttaaagtcctacaaaaggggggaagatcacttatttgaaaatacagctaagtacattctcatctgtgattatttacatttgtatactgaaaatatcgattatctggacagatcctgtgatatgccatttgctacaaaatgaagttcttacaatgagcatgaataattaatcctttttagataatgaaataatgtatcaaatcttcatttatgttccaaacattaaaaaacaaaatcaaaaatgttaagccctggaaaactaagaaaaaaagacccacccataaggctgctgctcagcacatcaacttctgcaaggacacagtatgtttgctgactttaaaatgtttattctttaaaaaattagttgctttttatacagctatacaaagttcttaatgtttctttggcaatggaatataatggaattttacaactata

SEQ ID NO: 353793 - DNA, 418 bp, Homo Sapiens
  misc_feature (350)..(350): n is a, c, g, or t
tttaaaaccattatcttagaggttaggatttcaacatctgcgttttaggggaacacaaatattcaaaccatagtaccagatgttttattaaatgaggaaagtaactccctgcttcacagtcatattttctattacatacttaccacagcatccctaactgccttcttataacatagatcgtgggtgtccttgtaatcacttttagttttttttcaattccaaacaaaatatcataattcctaatcaaggtaacacaattatttcaacatgtgtacaataaatcctgtccataatttacaaaggcacaatatattattgtgctctgaatatataatgagcaaataagagtntcagcagtattgtataacagctaatattatatgagacactgggcaggagagcacagcatgtgtgttgt

SEQ ID NO: 353794 - DNA, 1247 bp, Homo Sapiens
  misc_feature (40)..(40): n is a, c, g, or t
  misc_feature (78)..(78): n is a, c, g, or t
  misc_feature (796)..(796): n is a, c, g, or t
tccaaatggaacaacagtttcagcaaaagacagctgtgtnggggggacaggaagtgaagcaaggaatagatccgaaanagataacagaggaatccatgtcagtgaacgcctcacatggaaaaggattttcccgacctgctagaccagcaaatcgtcgtctcccctccagatgggcatccagatctccatctgcaccccctgccttgcggagaactacccacaactataccatttctctgcgatccgaagcattgatggtttaagtctttggcctggattgctatattacagaagttctagtcccacttgtcaaacagagcattctgagtgtttacaggcggacctgtttctcttccgacaagcaatttgaatcttaactttccatcagtcttcagtgtttttaatctaaggaataattatcttcctgcattttgatttcttagatcagaattttttaatgccatcctcattagttttccaatacaatataagttgaaacaatgtacaatattgtatattctgtgtggcaagtggcagaaagtaaggttatgtgcatggccatgtgtttgtaggcgcatgtgttgaaataggaagtaccctagtatgtattcagatatgaaaaacttatgtgctagtgttgactctgaaattataacatgtatacctatatattctttgtgtttatttaaaagttttgaaaatatgcagtactgtttatattttgtataccttttaataggtatccacttaaggcatttgcagtacaaatattaattgaccactcccttggccccangctacaatgaaaaagaagaattatgcacacatctaacattggtagatggctaaagacaactcataaataatgtcttaacccatataaaggataaaataataccattgatattcttgtttattctttttaaataaaaatgtcacaagtttaatagatcagccttgtaaagcaagcataaaatgttcataaatgttttatatattatttggtagtctagtatggctttaactgaatatttgatcctcagagacagtatcatgagactgcattataaatgacatgattaaatgatgaatttattttgtcagcctcagcaacaaacatttcctaaatgggatgcaaaaagaaactgaatgatgttgaattttagtttttctttaagttgtggtaagcttttagtttagctgctttaacatggagtcatacatacttagaggtaagccatttatta

SEQ ID NO: 353795 - DNA, 1123 bp, Homo Sapiens
gggcttccacccctacgaccagtagcccagcacctgcagtatccacttcaacatcatcatccaccccttcctctaccacttctaccacaacaactgctacttcagttgcgcagacagtatcaagctaggtctatgctagaccaacaattcattcctgggcccctgaagatacttgtttggccctgctgtctatttagccaagcacccacaacacaagatcagaccccaagttctgctgtttcagttgccacgcctacagttagtgtttcaactcctgctcctacagccacacctgtgcaaaccgttccccagccgcaccctcagacgttacctcctgctgttcctcattcagtacctcagccaacaacagcaatacctgcttttccaccagtaatggtacctccgtttcgtgttccccttcctggcatgccaattccacttccaggtgtattgccaggaatggcccctcctatcgtacccatgatacatccccaggttgctattgcagcttcacctgctaccttagctggagcaacagcagtttctgaatggactgaatataaaacagcagatgggaagacatattattataataatagaacattagaatcaacctgggaaaaaccccaagaactaaaggaaaaagaaaagttagaagagcagattaaagagccaattaaagaaccctctgaagagcctctgccaatggagacggaggaggaggatcctaaagaagagcctataaaggagataaaggaggagccaaagaagaggagatgactgaagaagaaaaggctgcccagaaggcaaagccagttgctactgctcctattcctggtactccatggtgtgtcgtttggactggtgatgagcgggtcttcttttataatcccaccactcgtctttctatgtgggaccgacctgatgatctgattggcagggcagatgttgacaaaattattcaggagccccctcataaaaaaggaatggaggaattgaagaaactaaggcacccaactccgacaatgctgtcgatccaaaagtggcaattctctatgagtgcaattaaagaggaacaagaattaatggaagaaattaatgaagatgagcctgttaaagcaaa

SEQ ID NO: 353796 - DNA, 494 bp, Homo Sapiens
gcggccgaaagccaactgtttgtactgaatggcaagaatgttctagtaaatgtgtaccaaaatgtgaattactttgtacgattacagtctccacgtcgacctaacccaatattattggtattaatgtgctttttttgtataaagtgcaaacatttcgtcccaaagtctaagtactttagtgcagtaaaatgttgtttcatgtcctgtcaagaattcgtatagtacgagcctggatctgcgtgtcaaactgttccatttgtttatgtaaagtgatattaaaaaagatataaactataactgtccgttacttttggcaaaagatacaaccacataatgtatataattcctagtttccatatttatccgcatgtaaagggccggtttatccatgttacagctcttcaatatttatggctagaagaactcgtatgtacactttagtttccagaactgtttggtaacctttcgtaccttattaaagattcttaaatctc

SEQ ID NO: 353797 - DNA, 549 bp, Homo Sapiens
  misc_feature (127)..(136): n is a, c, g, or t
gggttggatttattttccttgttttagagactacaaatttttaaatatcccattttgactgagaatattgacatataagggaagaagttttctaaattgtgaaagtctggttcttaattaaagaacnnnnnnnnnnaatatcacggttaaaagctgctgccagttagccaagacattatccaccaaattgctttgtgatttatacagggattaatcaaatctggctactataacatggggcattgtaactttaaagtagtgttttaattacagtgatgtattttagactcacattttgtgattcaaatatgttataaaggcattcttgcaccatggtaaagaatgtgtgtggtaaatctccgtttatatgtagttggaaaaaattcactgaataatgttttaatgatagggtattatgatacaatgtaaaaaacaattggttcttcagcagtacagaaagtaaactatatatgtgctatcaggaaaccccttcatactgtgtataaaattgcaatctagtgaaataaactgtatgcaatggaaaaaaaa

SEQ ID NO: 353798 - DNA, 494 bp, Homo Sapiens
  misc_feature (35)..(35): n is a, c, g, or t
ccaattttaaaaggagagattacctttgcagggcngcaactattgtttccagaatgtattatattgaaaatttttgcccacaaagttacctactagactacagtactttaaaacacagttgttcaagtcatgggcaaggaaaacaaaatcaacaggacagattattgtcagaagccattcctgtggagcattcctgctatgcacatagaattgaaactaaaaacaaagaaacaacctaattgcacctagggggagacaccttgtacttcaagtgctcatgactaggggagtacaggaaacagacaggaataataaccttaagtatcctcacagaaaaaatgaacagagacaaaacagtgttggcattttaaatcagatacaaaatccattgttcctagacacaaaataagttaataatgttccacatttatttttttacctctgtacagctcctttaatagtctttgatttcaaaactaaaatcctcagtgttt

SEQ ID NO: 353799 - DNA, 648 bp, Homo Sapiens
  misc_feature (21)..(21): n is a, c, g, or t
  misc_feature (56)..(56): n is a, c, g, or t
cccccatgattccattcaggnccaaatcctggccccccccggtggccccagtcccngccttatcaacctccccaaggaaaacccactgggttcttagctctgtgggtaggaaggggccctagaaagggcctagttactatcctgtcagttctaacagtagtggaacaggagaatctgggccctaggagccctgtaactcccaggagagaccactgaaaatactggagcaacaatgcccctgcttccatttctccccacctcactctcaccaagtcaccagagggtggttctgtaggacctcttttgttgcttaagatgcagatggctcttaagaatcaggcagtcgcccacttctctccagatgaagggaagacattcataggtcccaaatctgcccattcagatgtcacataatatggtgggatatcaatttacttcttccacacatgtggttgtgcacatgtgagcttgtgtgcttttggagagaatgttgattggcaaaagcagcacagtattaatatttagagtaggatgcagcctcttatgcaccacagttaaatctagaacgaacaaaatttcagagctcaagacatgggacatttaaatcctcaaggagtttggaacaaaataaacagatctaaaaatttg

SEQ ID NO: 353800 - DNA, 980 bp, Homo Sapiens
  misc_feature (521)..(539): n is a, c, g, or t
  misc_feature (896)..(909): n is a, c, g, or t
ccagcaaaacgtcattctttccaagagccatcatgcatttctgacaataaacaatgaatagggtaagccttcgattctagcttctgaggcacacaggataggaattactctttacctgaagatgagccaaaataggatttggggcttctggcggtatgaccttgtacaaaaacactaccttttgtctccagtgaacagcaataagcaatctattccccaacacaacctctatcccaaggaaattgtgatgcccagaattttaggtgaaagccaaagcaattattatataggattattaactttggctattgaagtttttcctcttcagaagtgttactaaaggggaaacagagcagttttctttgacttaaaattttaggactcatagactttgttccttcactaacagcagtgtccttcactaacagggagctggaatgaactgataaagcaaagcaagaaacaaaaagcaaggagccagagatgggccccaagggaaatgtaaggaaatggtagggacnnnnnnnnnnnnnnnnnnncaaattcacaagaaacaatcatctatctgtaatttagattctgaacaaccctcctcaccctctcaaaattcttaagtttcaacactgtaaaaatctcaaagagcatactagttaccatgaacctaacattcttccctaaaaaggcttccaaaaaagcactaggctattgtagtgattttgttagtgctgaggaccagctttctttaaaagccactggagagctatgatttcagaggctggctgtgcttcttcaaccctatgtcttgccttcaaagtacctgttatggaagggatcccatgtcaaaataatctaatctctctctcccagccccacaaaatatagcaacaaagactccnnnnnnnnnnnnnntcagacttcctgttaataaataaggaatctcaggttccacaacaaaaaaacacacatgttcaaagtgcacc

SEQ ID NO: 353801 - DNA, 455 bp, Homo Sapiens
taaaacacaggtttggattaattttatttgcttcctttttccgcttttcttcccgcagagcctgatgggagaatgtccagggcagggaaaccacattttttgtaggtgataactcaatgaaaattggtgcttattttttacacttctctcttgtggctctcttgtggtgctatctatctgttttaaggtctccttgaaggcgcactggggaccctggccatgcctcgttctccctgctttctttatcctgttattgcctccacagtctgttgccaaggactctaagatcaatgcacgtcactttcctttccactgggcaggatagccaagcacactccctcctgcgctctcccgccccggtgcgtccactcccgagggctgttatgaggactgggttgtgcctacttgatttgaaaacacacacaagcaataaaaagcctcttcctgcattgtca

SEQ ID NO: 353802 - DNA, 1409 bp, Homo Sapiens
  misc_feature (846)..(878): n is a, c, g, or t
tatgacatacaattaatgatcacctgggatagatttgcaccctggagagtctgtctagacatcaccctatatcctgtacgtatatgtagcatggttctggaggcattaaatgtattacaagacccatggaagtaagcaatggcatcagaatctccaacggaaagttaaatatctgtaggtcgtccacctggcccatatacaagcataatgattcttcaaactgctgagccacttcttggataaggaatcaatttcagagaatcctactttggatttaccatgttctatagggagaactgagggaactgcacattcatccaatacctcagatgtggatttcacgggtgcttccagtgcaaaagaaactacctcgtctagcatttccaggcattatggattatctgactccagaaaaagaacgcgtacaggaagatcttggcctgctgcaataccacatttgcggagaagaagaggtcgtcttccaagaagagcactccagactcagaactcagaaattgtaaaagatgatgaaggcaaagaagattatcagtttgatgaactcaacacagagattctgaataacttagcagatcaggagttacaactcaatcatctaaagaactccattaccagttattttggtgctgcaggtagaatagcatgtggcgaaaaataccgagttttggcacgtcgggtgacacttgatggaaaggtgcagtatcttgtggaatgggaaggagcaactgcatcctgactgtaggactgaacattatgttcactgcactctgattttctgtaggtacagttcaaagccctaaaggagtctggcttttactatctttcttnnnnnnnnnnnnnnnnnnnnnnnnnnnnnnnnnggggatgatactagccttaacatgtacctgtcaatgttatggatattgtcataaaaaggtatcttttaaaaatcagaacagagacttaattttttaaatcttaagatttgtagaatgtttctaggataggatattaaaaatgattgaaacccatgcatggtgttagacaatttttctaattattccattgagtcagttttttgtgattagtgattatcagagcaaacatcatgtagatagcacaagtatttggagaaacgttgtttgttttgttaccaaaatgttggaaaaatttatttcaataccttttagatttcataaagtgcagtgtatataatgcctactgaaagactgtaaaatattgaaattttctttcaagcaaagtgtaaaaaaatatatttgagcctgtaaaatgctctgtgactagacttcattgtccgtcctaataaattccttggatgtggcatatatatccacacaaggtggataaaaaatgtggggggaattatgtggacctatggcaaaacaaat

SEQ ID NO: 353803 - DNA, 234 bp, Homo Sapiens
cagttgttgcttcttaattcagttctgtatgtgttcaacatttttgaatacattaaaagaagtaaccaactgaacgacaaagcatggtatttgaattttaaattaaagcaaagtaaataaaagtacaaagcatattttagttagtactaaattcttagtaaaatgctgatcagtaaaccaatcccttgagttatataacaagatttttaaataaatgttattgtcctcacctcc

SEQ ID NO: 353804 - DNA, 488 bp, Homo Sapiens
ggtcagtgtaataagacttcttcaatacatcttccaataaggggtgcttctttgtgacagtatttttatttctgacattcattttatttgggtacatagtgtggttgttgataccttgcaatagtattgcttctgaaagtaataaaaaattttaggagaatttgagaagtttacagaattacttattcattgttttcttagtaagtcagtttaatgtttatttttctcattatttcatcactgcaataaagaataagggtgtttgagctcacctccatgcaaagacttcagttttaaaacattatttgcctaaaattagcattgtgatgctttctgaaagaaatattttataaatcctgtttaacagcagaatttctgaatgtgtagagactactacaaaattggaaaaagattggcaattctttgtaaagaatttgtgaattgtgtataaatttattctaacatttaataaaaatgtattttaacac

SEQ ID NO: 353805 - DNA, 1210 bp, Homo Sapiens
  misc_feature (1036)..(1052): n is a, c, g, or t
  misc_feature (1054)..(1061): n is a, c, g, or t
ttagatttaaaattcagccaggcgatgctcgtctatttataaatggccttcgtgttgatatggatgtttatgacgctttcagtattttggatatgctgaaattagaaggaaaaatgatgaatggccttcgcaatcttgggatcaatggggaagatatgagcaaatttttaaaattaaattcacacatttgggaatatacttatgtattagatattcgacattcttctataatgaaaccaagctcacggaaaatgtacttatctgggtatggtgtggagctagcaattaagagtacagaatacaaagcactggatgatacccaagttaaaactgtgactaatactactgtagaggatgagactgaaacaaatgaagttcaaggatttctctttgggaaactaaaagaaatatattcagatcttagagataatctgacagcattccaaaaatacctgattgagagtaacaaacaaatgatgcctttgaaagtctgggaactacaagatcttagttttcaagcagcttctcaaataatgtccgctccagtttatgatgccattaaattaatgaaagacatttcacagaacttccccataaaagccagattaagaatgaatatattgatatgcctctttcagtcaactttaaatgtcaagaatttgagaagtcgtcatttatataataaaacatgaaatatatatgggtgtgtataaatgtcatatctgtttagccataatattttaattaatggccgttataaaaattattagatcaaatacaaataaagtaaaataactttagtcttgatcagacagttgattagctctattgatgctaagtcagtataactgttcagaggttctgatgcaaaactctgctgttaatctgtaattaagaaaaaattataaaatatgctaacattgcttaatggctaaattgtaggcttgagcatatctctaaaaccacttggtagacaatctgtaaatgtttgttgaaatgaaatatttgctaaataaatgaaaaatttgccaaaaannnnnnnnnnnnnnnnnannnnnnnncttgtcgggcccgcctcggcccctcgaggaagcttttctaaaacccattcggtttgggccgcgcgggggccccaggtagggtaaagtggaaccatgggtccataaagctggtttttccctagggaagaatccctgggggcccattggac

SEQ ID NO: 353806 - DNA, 128 bp, Homo Sapiens
gtttacttattcatttattttcaccaccaacattattagccatgcctttctgctaatcgattttagcaagtcgaggtaaaacacatgcaacattttctggcaaaagcttaatgtcaaacaatatgtga

SEQ ID NO: 353807 - DNA, 1789 bp, Homo Sapiens
gacagggggcaacttccggtgtgggtgacgagtggtggccgaagcagggggacagcaagggacgctcaggcggggaccatggcggacggcggctcggagcgggctgacgggcgcatcgtcaagatggaggtggactacagcgccacggtggatcagcgcctacccgagtgtgcgaagctagccaaggaaggaagacttcaagaagtcattgaaacccttctctctctggaaaagcagactcgtactgcttccgatatggtatcgacatcccgtatcttagttgcagtagtgaagatgtgctatgaggctaaagaatgggatttacttaatgaaaatattatgcttttgtccaaaaggcggagtcagttaaaacaagctgttgccaaaatggttcaacagtgctgtacttatgttgaggaaatcacagaccttcctatcaaacttcgattaattgatactctacgaatggttaccgaaggcaagatttatgttgaaattgagcgtgcgcgactgactaaaacattagcaactataaaagaacaaaatggtgatgtgaaagaggcagcctccattttacaggagttacaggtggaaacctacgggtcaatggaaaagaaagagcgagtggaatttattttggagcaaatgaggctctgcctagctgtgaaggattacattcgaacacaaatcatcagcaagaaaattaacaccaaatttttccaggaagaaaatacagagaaattaaagttgaagtactataatttaatgattcagctggatcaacatgagggatcctatttgtctatttgtaagcactacagagcaatatatgatactccctgtatacaggcagaaagtgaaaaatggcagcaggctctgaagagtgttgtactctatgttatcctggctccttttgacaatgaacagtcagatttggttcaccgaataagtggtgacaagaagttagaagaaattcccaaatacaaggatcttttaaagctttttaccacaatggagttgatgcgttggtccacacttgttgaggactatggaactggaattaagaaaaggttcccttgagagtcctgcaacggatgtttttggttctacagaggaaggtgaaaaaaggtggaaagacttgaagaacagagttgttgaacataatattagaataatggccaagtattatactcggataacaatgaaaaggatggcacagcttctggatctatctgttgatgagtccgaagcctttctctcaaatctagtagttaacaagaccatctttgctaaagtagacagattagcaggaattatcaacttccagagacccaaggatccaaataatttattaaatgactggtctcagaaactgaactcattaatgtctctggttaacaaaactacgcatctcatagccaaagaggagatgatacataatctacaataagggtcttagtgctttagaaaaaagttaaaattggaagtcattaaaaaaagactgttataatggtgtatatgttggggttttttttctaagcttctttgtcttaaattttaaaatagtgaatatgtttgagactccctttgacctttcagttccccaagttcattgttaactttgcatttgcaattggtgcaaaaatacagatttctgtcgtctgaatacacaaaaagttgtgtcataacttacccagatatgtttttctatcatttgaaacctttttagctactgtttgttttcattcaactaacaaacatattccaataataaaagcagtatatacat

SEQ ID NO: 353808 - DNA, 622 bp, Homo Sapiens
  misc_feature (474)..(474): n is a, c, g, or t
  misc_feature (517)..(517): n is a, c, g, or t
cttaacacaaagggtgctgcgtagaatatgaattgattttggaatcagaacacaagcaccatactgaaggactagcagccaaataactgcctaggatactgatggttgtgaagactgtttcaaatgattggatctttgaaagcttcagcgtgccttagtttctaggatcagaattagttttcctctcacttggccttgcagctaaatgggagaaatgtttcaatttctttgaatacttgcacatttcaataattcctttcccgagtataaccactcaagggggagcaaatttggatggatttacgacttcacaggcattgtgaggaaagagcattttccaaggctgttttgataaccctggggtgataagcagtgagccctcacacacttactttgacaatttcacatgcacttgtacttcattatttccctcttcaagagtcgtttctattctagtttctgccccatcccggngaatcctaaaggagaattaattcatctaagtaatctcaactgntaccttgaggtggtttggacagtcacggaagttttaggctgtgcatagtgatcatctggtaaatttaagtctttatcattaaagaaacatttctcagtgaacatt

SEQ ID NO: 353809 - DNA, 2839 bp, Homo Sapiens
ctgtccagaccttgcgagtttatttgtaaacactggacagatggagttaaaaagagcttttgttgagatttggcatgaaggatatggtgctctatttgtaatagaaacttccaaggctcttccagctcccctttctcgccattctttagctgtagtcatgaatagtctccatgattttcaaaattgattccctttaaagtgcaaaatggtcaccttctaaaagatatattcatagttattaatgaccctattcccaccacaaattttaaagtgctcctaagcccataacttgcctgtttgaactatggtaatgggtggaagaggagttcaccagtttcaaagatcagactctgtatcaaaagtacctttgcccttaggaagagtgagtattggagtcatcttatctattactccaaacctccctttttatttcttgagcctggcttggaccttggcattccgtttgaattccttctaactggaacatttgtgttgtatctgtaacactggcactgaaataaagaccacacggttaaagaaatctttccatattgtactttatggtgtcggagtgaagccttgtagcttccatacccctatgtcagaggaggtcttacggacaccatagggtaggaatagcctttcctcagtctgagaaattggtctcttttaaaagacgaatctcatgaatattcacatcaaagacttgagctttttaaactagtgagagtgccaagtgctttttagaaaggacccatatgttatcaaactttgaaattgagttgctggaatgaagtagaggtgactctctctgtggtacacattgaatgtactatgtatgttcaagtattcaggcgccatgtcttatatactgaagaaagaaaaagtgaggcccaccttgctcttaaaatgtttgcaattgttactgtattgaatacagtataatgactactatggcttcaatcttaaacctggaaacaaatatccctttttttccccttcatttcaccaagcctttacttaaaatcttcagtgtcttgtcaaatctagctctgtatcagatgctggaatattcctaacatttgacaaactggagttgaactaaaggctccacgggaaagtttctggtcttactagtgtgtatgagcaagatctgctaaaacttactccactgggtaaatggttgactgagtcaagaacaggataatatctcctgcatagttttcagtaatgtaagtgtggactagtgcatatttcagacaactgctctgcctgtgcaatgaaaaatagcctttaagggtttctttgcagactgatttcattggatggatacttaatgctgtgaaacatgataggattaacataatgttggtggatttcttgaataaaatttgtcttaacattcctctttgtgtagaggctttattttctctcttatatttgtagctaaccagctcaggtttttttatttgaactgggttgaatctctgaagaaatctgttcaagaccatgctataagacactgtcagctaatggagctgggaagggtctactctgctgacagagcatttccttgggtgatcatagtttcgaggtagagtttatgatcattcatagctttgtctagaaggagtaaaatatcatggccttaacacaaagggtgctgcgtagaatatgaattgattttggaatcagaacacaagcaccatactgaaggactagcagccaaataactgcctaggatactgatggttgtgaagactgtttcaaatgattggatctttgaaagcttcagcgtgccttagtttctaggatcagaattagttttcctctcacttggccttgcagctaaatggagaaatgtttcaatttctttgaatacttgcacatttcaataattcctttcccgagtataaccactcaagggggagcaaatttggatggatttacgacttcacaggcattgtgaggaaagagcattttccaaggctgttttgataaccctggggtgataagcagtgagccctcacacacttactttgacaatttcacatgcacttgtacttcattatttccctcttcaagagtcgtttctattctagtttctgccccatcccggggaatcctaaaggagaattaattcatctaagtaatctcaaaaaactgtaggaagggtgctctccctgagaagcttctcccacagtgctttggtgctgttaccttgaggtggtttgggacagtcacggaagttttaggctgtgcatagtgatcatctgttaattttaaggtctttatcatttaaagaaacattcctcagtgtaacatttgggaggggattctttcctcttgctagtttaaaggtgtgatttgtactccttgtttgtcccattcatatatgaaaatagacttttaaaactgtccaacactaatggtttatataacatgcttcccattttttttatgtcgtagaaattggaagttagggagtactgctttcaaggttcaacttcattatcttctgcattggaaaatatttgggccatgagaactaggggaaaggagtttgaatgtgtctatttttttctagtgaatgtattttaaccacagtgtcctaaactgagaaaactagagaggaaaaagtgggtgttcatgaactttgtagttgggagagtgggtttacatgtctgtgtattcatgactttgggagtgggtaggatcatttggagagagaaatgcacagaaaagtcctgaaattttaaaacacttttggaccagcttttggctccgggagagtgggggctgctttgtagaaactggaaagtgaaataaacttttttca

SEQ ID NO: 353810 - DNA, 699 bp, Homo Sapiens
  misc_feature (393)..(393): n is a, c, g, or t
  misc_feature (575)..(575): n is a, c, g, or t
  misc_feature (578)..(578): n is a, c, g, or t
cccacgcgtgcgcaggccggctcagcgggcgaggcgggacctcgggagcgcgcgcctgcagaccggacgtccggccagcaggcggggccgggagaggaaccccccatgtggtggggcgcggagccctgctctcgcaactcaagatggcggacgagagtgagacagcagtgaagccgccggcacctccgctgccgcagatgatggaagggaacgggaacggccatgagcactgcagcgattgcgagaatgaggaggacaacagctacaaccggggtggtttgagtccagccaatgacactggagccaaaaagaagaaaaagaaacataaaaagaagatagagaaaggcagtgagacagattcagcccaggatcagcctgtgaagatgaactctntgccagcagagaggatccaggagatacagaagggcattgagctgttctcagtgggtcagggacctgccaaaccatggaggaggcgtagcagcgaagctaccagtgtctggatacgcagcccgtgcccaagctgggcgaagtggtgaacaccatggccccgtggagcctgaccaggacatatncgncaggagccctacaccctgccccaggggctcacctgggatggcttggactgggcgaccgtggtgtgctaaaagactgagcacctcctgatgagaactatgtggagatgatgagcacatgtcc

SEQ ID NO: 353811 - DNA, 1310 bp, Homo Sapiens
  misc_feature (174)..(213): n is a, c, g, or t
  misc_feature (1057)..(1058): n is a, c, g, or t
tcgcaactcaagatggcggacgagagtgagacagcagtgaagccgccggcacctccgctgccgcagatgatggaagggaacgggaacggccatgagcactgcagcgattgcgagaatgaggaggacaacagctacaaccggggtggtttgagtccagccaatgacactggagcnnnnnnnnnnnnnnnnnnnnnnnnnnnnnnnnnnnnnnnnggcagtgagacagattcagcccaggatcagcctgtgaagatgaactctttgccagcagagaggatccaggaaatacagaaggccattgagctgttctcagtgggtcagggacctgccaaaaccatggaggaggctagcaagcgaagctaccagttctgggatacgcagcccgtccccaagctgggcgaagtggtgaacacccatggccccgtggagcctgacaaggacaatatccgccaggagccctacaccctgccccagggcttcacctgggatgctttggacctgggcgatcgtggtgtgctaaaagaactgtacaccctcctgaatgagaactatgtggaagatgatgacaacatgttccgatttgattattccccggagtttcttttgtgggctctccggccacccggctggctcccccagtggcactgtggggttcgagtggtctcaagtcggaaattggttgggttcattagcgccatcccagcaaacatccatatctatgacacagagaagaagatggtagagatcaacttcctgtgtgtccacaagaagctgcgttccaagagggttgctccagttctgatccgagagatcaccaggcgggttcacctggagggcatcttccaagcagtttacactgccggggtggtactaccaaagcccgttggcacctgcaggtattggcatcggtccctaaacccacggaagctgattgaagtgaagttctcccacctgagcagaaatatgaccatgcagcgcaccatgaagctctaccgactgccagaggccagtgctgccccgggtggtgggcagggggcagagagagggcaaggagagnnctgctgtcagcaggagagaagggctctgggtggagagggagctttctcctactggaaaagcgaaccagcccatagtcttcagatttcctggactttctatttctgttatctgaagcaggattttattttagtttaactttctcagttcctctgagtctgtgcctggactagcttctctgccatctgttgaaaggctcagagaacacctattctctgtaattttagcctaagtaaagcataaatagaatgatg

SEQ ID NO: 353812 - DNA, 1001 bp, Homo Sapiens
  misc_feature (424)..(424): n is a, c, g, or t
  misc_feature (768)..(807): n is a, c, g, or t
gtgggagatgtaattcatacaactgcgtggtgtataggacccaagtccaaaaccttaagttccaaaggcacttggaagtgctaatactctgcaggttaaactgccctgggagaatgcccctccaggtgaaccccgtcttggttgatctcgtcggattcagaactgggagcactccttcttggaacgcagcttccggttggacacacaggaaggttgatcgcctaccagtctttcttcttctgtgatcatagatatggatgtttgccgggatggcgctaatgaacccaacccaattttccgacttgagaccactcgaaccccccttcagtgccactgggggagccagccgggtggccggagagcccacaataagataactccggggaaataatcaaaatcggaacatgttgtcatcatcttccancatagttctcattcaggagggtgtacagttcttttagcacaccacgatcggcccaggtccaaagcatcccaggtgaagcccctggggcatgggtgtagggctcctggcggatattgtccttgtcaggctccacggggccatgggtgttcaccacttcgcccagcttggggacgggctgcgtatcccagaactggtagcttcgcttgctagcctcctccatggttttggcaggtccctgacccactgagaacagctcaatggccttctgtatttcctggatcctctctgctggcaaagagttcatcttcacaggctgatcctgggctgaatctgtctcactgccnnnnnnnnnnnnnnnnnnnnnnnnnnnnnnnnnnnnnnnnggctccagtgtcattggctggactcaaaccaccccggttgtagctgttgtcctcctcattctcgcaatcgctgcagtgctcatggccgttcccgttcccttccatcatctgcggcacccggaggtgccggcggcttcactgctgtctcactctcgtccgccatcttgagttgcgagagcagggctccgcgcccc

SEQ ID NO: 353813 - DNA, 780 bp, Homo Sapiens
ggcaaacattccggagcctcggcccgagccgctaacgcaggagcttgggggtacagggacttcagaggcggccaaaaaaaggggtggtggaccactccccagctggtcgccaccatgccagtctctccggcaggcagtcacaagcagcagaacttcgggttgaacaatgccacacaaccaaagaagtctattagcctttgtgctacaatgaaagcaacttcagtgaaaggatatactggtgcaaatcaaagcagaatggctgtgtccaaaaccgtgcttattccacctgaactgaaaactgtagaaaaaccaaatcccaatataaagacaacacaggtatttgacataaatggaactgatgttactccccgacctctttaccatccagatccacttactggtacagcaaaaccaagtaaactcttgacatcacaagaaggatcacttggatcagaatttatatcttcctatagcctttatcagaatacaataaatcctagtacgttagggcagtttacaaggtcagttttaggaagcagtacagtttctaagtcaagtgtatcagcaagtgaatcaatagcagaagacctggaagaaccatcctataaacgggaaagcattgactagtttcacagatttggcagttataagggcagcacactgacaaacctggtacacaaaagaagacctggagaagaatatagaggatatactcacagagacagaaacactgagatggcaggactggccacagccatggtctctgagaatctgaagaag

SEQ ID NO: 353814 - DNA, 457 bp, Homo Sapiens
  misc_feature (224)..(244): n is a, c, g, or t
agaaaactagattgctgggttattttgttatcagatatgtgaatctcttctccctttgaataaactatacatttattgttacggtatgaagtcttctgtatagtttgtttttaaactaatatttgtttcagtattttgtctgaaaagaaaacaccactaattgtgtacatatgtattatataaacttaaccttttaatactgtttatttttagcccattgtttnnnnnnnnnnnnnnnnnnnnntttaactgcttaaaagtaaagttttgccattgcttggagaaacttttttttccttctctgcgctgccagctgtaacacttcttctggattgcttgcattcaactctgtctggccgatggctttgattgcaatttgtcttttatctgtttctcctcttttatgatgaagataagtcaagtattccaaaatggtaacatcccatatgtagtcgta

SEQ ID NO: 353815 - DNA, 1012 bp, Homo Sapiens
  misc_feature (630)..(654): n is a, c, g, or t
  misc_feature (684)..(684): n is a, c, g, or t
  misc_feature (729)..(729): n is a, c, g, or t
  misc_feature (868)..(877): n is a, c, g, or t
gggggaagtaacccacgtgcttccgctggagcctctcgggaggcgggtaacgttatagtatttgtcagaagttggggtctccgtgggcattgtgatccgtcccaggcagtggattaggaggccagaaggagatcccttccacggtgctaggctgagatggatcctctcagggcccaacagctggctgcggagctggaggtggagatgatggccgatatgtacaacagaatgaccagtgcctgccaccggaagtgtgtgcctcctcactacaaggaagcagagctctccaagggcgagtctgtgtgcctggaccgatgtgtctctaagtacctggacatccatgagcggatgggcaaaaagttgacagagttgtctatgcaggatgaagagctgatgaagagggtgcagcagagctctgggcctgcatgaggtccctgtcagtatacaccctggggtgtaccccaccccttcccactttaataaacgtgctccctgttgggtgtcatctgtgaagactgccaggcctaggctctctgtagagagtcttcaagatcccggagtggtagcgctgtctcctggtgaaggagtatttgtcacactggaatgtgactgtgtgtgtatgtatgtggnnnnnnnnnnnnnnnnnnnnnnnnnaaccaggttgttgacacctaccaaacccanagaggaatccccacacgaaaggacgcgagcacgcccccccaaaancaaaattcccagggttcctatgttgggggggccgaaaaacgagggaaagggaaaggggccccttgggtcattaacctggtttccccggaccccagctttttccttggagacaaaaggggggaaagaatttgtggccggnnnnnnnnnnaaaaagggggaggccggtatttaatattctcgaataagccacaggggtacacccccgggaatttaaaagggaagtcggggtgggccacccacccgcgggaaattttaaacccccgccctaaagggaagggggccc

SEQ ID NO: 353816 - DNA, 1652 bp, Homo Sapiens
  misc_feature (337)..(641): n is a, c, g, or t
cttacaaaccacaatttaacagaaactgtagatggttgaactactagtgacttttttccccttttcccagttacaattatactttcagctaacatatgccagtttcacagaactattaagtccccttattgtactttttatggcatgcccatgaaaaagcactttcttaagcctacagtatcagatcaatgggaaaacaacagaaaactaagaggagaattttcccgttaattttcttgcagaaaagtataagtctaattgcccattgccataaattttgtcttgtactcagagaagcaacatgcactggctcattttatgtgcaaagaaaagattnnnnnnnnnnnnnnnnnnnnnnnnnnnnnnnnnnnnnnnnnnnnnnnnnnnnnnnnnnnnnnnnnnnnnnnnnnnnnnnnnnnnnnnnnnnnnnnnnnnnnnnnnnnnnnnnnnnnnnnnnnnnnnnnnnnnnnnnnnnnnnnnnnnnnnnnnnnnnnnnnnnnnnnnnnnnnnnnnnnnnnnnnnnnnnnnnnnnnnnnnnnnnnnnnnnnnnnnnnnnnnnnnnnnnnnnnnnnnnnnnnnnnnnnnnnnnnnnnnnnnnnnnnnnnnnnnnnnnnnnnnnnnnnnnnnnnnnnnnnnnnnnnacacacacacatcaatttattttagttgtataatgcttttctattagtaaagcatcagctaagcttcagtggcctgctccatcccctaatgactcccatgggctatcctaaaggaacttccagaacctttgttggtgtgttgacattgaccatgcagaccaatttgggcacaactggacattgattccttttacacaagagctgcctcccaaagatagataaattttcccagccctaaatatgaatcatggggcaagatattggtcgtattgatggtgaacctttcctactggattctttgcatgccacatagcaggattcattgcctttctctcatcatggatggcatgcagcagcacccaagtattcttcattctttgcagggaaaaaattgtgcatgggggctgaaatgtagtatgtgtagctcaattagtctctcctctgtgatgcaaaatggaatattcaatggcagaatctgcccttctgagatgctgaccatccaaaacaccttgtttatggtgcaccatgattagctcacacacaatgccaaggctgtgcttctattatctgatacatagtttgacaatgggtaattctactcagaccctccctactgattggctaggatgcctgtcaggaactcattatgctactggttgtttggggatccccatagtggactactttcaggaatggcatgaattgtaaccaactgagtgctgcccccactgttacggaagtttataaaaccttagttccagaagacccaaaggagagtactggtttgtgtttggtgcttggcctagatccagccaccactctgaaactcatcacatcttcattgacagggagggagcccaggacatatgtgtggctcattgaccagaaggctttcttagtcccaacagccatgaaccatgcacttatggatacccagccttttagggctacgtgaaatgcatccttgtaacatcattgtattctttcaataaatagccttctgagttgaaa

SEQ ID NO: 353817 - DNA, 667 bp, Homo Sapiens
ccgggtcgacatcatcatcatcatcatgctcatgctattcaattcactataggggctctcgggcgggaccgcggacgcctggaggcaggcactgaggacggggagaacttcgggtgaaatgcatccctcctgtgactggattggagacacaagaacagaaacatcctgatctctctactctactgtgcaggcttatgtactcataaaatggcagttatggacctatcctccccatgggctttaactaaacaggactctgcctgtttccatctgagaaatgctgaagaggaaaggatgattgctgtatttctgacaacctggttacaggaaccaatgactttcaaagatgtagctgtggagttcactcaggaggagtggatgatgctggattctgctcaaagaagtctgtacagagatgtgatgctggaaaactatagaaatctcacctccgtggaatatcagttgtacaggcttactgtgatctccccattggatcaagaagagataaggaatatgaaaaagagaactccccaagccatctgtccagaccagaagattcaacctaaaaccaaagaatcaactgtgcagaaaattttgtgggaggaaccatccaatgcagtgaaaatgataaaactcacaatgcataattggtcctccacattaagag

SEQ ID NO: 353818 - DNA, 474 bp, Homo Sapiens
aaaattaaacatttgtttagctcatgaatctgtgggttgggtgaacatttctattggtcttggctgggctcacctgtacccagtcagctgcagggtctagctcttcttatcttggctgggatctcacacatgtctaggatcagctgctttactagtctaggattgtcttggctgagacaggtggactactcagttctcctccactgccttatccttcagctggccagcccagaaatgttgccatgtttacagcataagagcaagcaagaaagaataatatgcaaccacttttccaagcctaaggtgaaagggcgggcagaacctgtggtgttaggaggcaactcataccagcccatgggtctactgtttaattttcagaaatttggcaagctgattgttaacacagctgttgtttaatttatgtacttgtaattaaataatttacattaaaacaaagataataggtaaaaaaaa

SEQ ID NO: 353819 - DNA, 796 bp, Homo Sapiens
tttcccctcctttgccccagacttctctttgaacacaaatgcattagccttgtggctagaaaaccctcttcctacctctgtctcccctcacttgtcatatgctctgacatgctaacatttcttttgttcatccctgttgcccccacagaaacatcccagaaaaaccggtcagtgttccttcctccctgatccttaggtttctgaaatagggttctgttacatcctcttcgatagcctgtttaaaatgtttagaaggtctggagctcaaaaatgcgttcttccacattgataatttagtaaactgagaacattgacatcactacagggcagcataagaggttgcttacatgtggtagcagctctggtttgattcaagttgctaccatgtacattgacagcacatataccataaccagcgtgttgggttgaattgcactttctacctttgtatgagatttacagactttccttctgggtttgtatcatgaccagaggggtactatagggttggtttatactgcaatatagaggatcagaagccatttgatttggtaggtgtgtcagaagggagaatgatggcagacgaactgctggaagaggtcagaagatagccatgctaaaatgcaattatatcctcatgtttatcccaaactaatcttggacttttccactcattagctttgttttgcccttgtttcccttgaaggtttaagttcaaccatattctgtcaactgttcagtttcagtggaatcttgtatttctggttcattataacaaactgttcgcttaaatcca

SEQ ID NO: 353820 - DNA, 760 bp, Homo Sapiens
tatttccacaggagggatcagtattcttctgaagcctaaggggtctagaaagacttttttctagaagggaggaaggggtggctattgggatggcctttccggtaatagggtaggtagatcgtttcccactcagggaagatactctccctatccttgggggccaggaggctgggaattatagaacagtcgaggccagcggctctcatccacgggctctttaaacattttcctttcttccggccatcagtatggacacgatttgaagtacagaatttcagccagcagcccatcaggctgacaccacacatattgcttctggtactttagccacaccagtgagaattggtggggcaagttgtcctgagaaaggctgtgtggcttttcttcagcacagacatttgggcaagcaactcagcataaggccagtgggtaccatcttctaaaccaggaccatcagcccttgacctcaagttctcctccttgatcaccgtggccagagcatctcgtgtggaccatctaggctccttgggcttcaagcaggacctgagccacatgctccctgtacgagctgtgctatacctgtcccacatgagcacggagagcctcatgttggtgggtttccagagtgatgtgaaagcctctcaccccaatcctcggagactgagttccacaacttttttagtagctcatagtgttatttttctactctcttcatgaaactaactttattttataataaatatatattttctgttgaaaa

SEQ ID NO: 353821 - DNA, 1058 bp, Homo Sapiens
ggggagccgctgtggcagcgtatgctgccacggggactgaagatggcgccgcgaggtgagattccggaggtaaacggttgtcctccaccccgctggaaatcctgttctttctgaacgggtggtataatgctacctatttcctgctggaacttttcatatttctgtataaaggtgtcctgctaccatatccaacagctaacctagtactggatgtggtgatgctcctcctttatcttggaattgaagtaattcgcctgttttttggtacaaagggaaacctctgccagcgaaagatgccactcagtattagcgtggccttgaccttcccatctgccatgatggcctcctattacctgctgctgcagacctacgtactccgcctggaagccatcatgaatggcatcttgctcttcttctgtggctcagagcttttacttgaggtgctcaccttggctgctttctccagtatggacacgatttgaagtacagaatttcagccagcagcccatcaggctgacaccacacatattgcttctggtactttagccacaccagtgagaattggtggggcaagttgtcctgagaaaggctgtgtggcttttcttcagcacagacatttgggcaagcaactcagcataaggccagtgggtaccatcttctaaaccaggaccatcagcccaagagactcttctacactccagtatagggaggggcaaggttattcccatcctgccccttctcagaaccagtcccctgctgacctcaagttctcctccttgatcaccgtggccagagcatctcgtgtggaccatctaggctccttgggcttcaagcaggacctgagccacatgctccctgtacgagctgtgctatacctgtcccacatgagcacggagagcctcatgttggtgggtttccagagtgatgtgaaagcctctcaccccaatcctcggagactgagttccacaacttttttagtagctcatagtgttatttttctactctcttcatgaaactaactttattttataataaatatatattttctgtaaaaaaaa

SEQ ID NO: 353822 - DNA, 359 bp, Homo Sapiens
aaattcaatctggaatcagaaagcggtggattttggcaaatggtccttgtgccctccccactcatccctggtctggtcccctgttgcccatagccctttaccctgagcaccaccccaacagactggggaccagccccctcgcctgcctgtgtctctccccaaacccctttagatggggagggaagaggaggagaggggaggggacctgccccctcctcaggcatctgggagggccctgcccccatgggctttacccttccctgcgggctctctccccgacacatttgttaaaatcaaacctgaataaaactacaagtttaatacccggcccgggccagattaagtaacttaacgcatgt

SEQ ID NO: 353823 - DNA, 3214 bp, Homo Sapiens
  misc_feature (21)..(21): n is a, c, g, or t
  misc_feature (36)..(36): n is a, c, g, or t
  misc_feature (2307)..(2308): n is a, c, g, or t
  misc_feature (2310)..(2337): n is a, c, g, or t
  misc_feature (2343)..(2343): n is a, c, g, or t
  misc_feature (2550)..(2550): n is a, c, g, or t
  misc_feature (2699)..(2699): n is a, c, g, or t
  misc_feature (2772)..(2772): n is a, c, g, or t
  misc_feature (2795)..(2795): n is a, c, g, or t
  misc_feature (2836)..(2836): n is a, c, g, or t
  misc_feature (2991)..(2991): n is a, c, g, or t
  misc_feature (3005)..(3005): n is a, c, g, or t
  misc_feature (3031)..(3031): n is a, c, g, or t
  misc_feature (3151)..(3151): n is a, c, g, or t
  misc_feature (3167)..(3167): n is a, c, g, or t
cgcccccttaacggcagtggnactcaaccggctcgngcggcccggcgcccacgcgcgcgcgtcgttctcccgcccgctcgctccccggcgctcacacctgagctcactcgcgcacggccgccggccgagaaccgcgccgccgctcggccccgcggaagccccgccgcgccatgtcttcgcctcccgaagggaaactagagactaaagctggacacccgcccgccgtgaaagctggtggaatgcgaattgtgcagaaacacccacatacaggagacaccaaagaagagaaagacaaggatgaccaggaatgggaaagccccagtccacctaaacccactgtgttcatctctggggtcatcgcccggggtgacaaagatttccccccggcggctgcgcaggtggctcaccagaagccgcatgcctccatggacaagcatccttccccaagaacccagcacatccagcagccacgcaagtgagcctggagtccaccagcctgccccatggccccggctctgctgcacttggtatttccctgacagagagaaccagcagtttcgcccaaatcctactctgctgggaaatctaaggcaaaaccaagtgctctgtcctttgccttacatttccatatttaaaactagaaacagctccagcccaaaccttgtttatggggagtctggttggatgtcatttgaggatcattgtgccccctagaggtgccattagcagaatttgccaagatccgagaaaaattttagctttagttctatttcagcagtcacctgacgtccttgtctatggtcttaaaaacaagaaggcacacatttgagaagatgagattaaggttaggagaaaacctcagtcattgcatgctttttagtatgggccaataaaatctcaacacctgtgggagagtaagaactaagggaatgagtttgggcggcccctcataaaggaccttagaggcagggaacagcaatgccaaatttccctctctcgtgagatgggggatcctgtgcaggctgatgaggcacccatgagaaaagccgaaaaagcatgcatcttagaaatagcccctcaattccaggagtcaacatgccaaagaatgaggctggagacaggtagctccgagggaggacttctggcatgagatctcggcacggcaagcccagcatcgcctcagcccagacaggctccaccaggagatcaagcaagggctgcctttcaggagtcacctcctgagccacttcagagttctggaagtgaccacggaccagggtggaggaatagacttctagttcattctgggacacttgagccagagagttgaaagcttggaaagaccagataagaaacctgccctttgtctccctagggacatgagacaccacattccatttgtgctagaaaaacctatccactgatgagtctaactgttccaaacgcctcccacctggtgtgcacagctgcctgggtccattgtcacttgggtgcatcaggttgtcctccgatttttagatgagtttcctgtctagagatgtcctagtctgctcactggctggtggcagtagggtaccctgcgtcctcgaaaagccagagggttcacctagtcagacgaaactccagaacagtgcttgtggagggcctgactgtcctgctcacccacagccgatctgctgcaggtcagcaactgtgtcgtgagcagctgccaaccaccagcctttctggtgctgttctccagttcacgtctgccagctggtgagggcagaggcagacctggtcagacccagcgcccctcctccctgagggagcatggcacagcctcacacttgaaagacggtgtttggtttcccatctaatcaacttaagggaagccggcatgtacccttcaaggccctgtcaccacctatttcctgatcagttggtataaactgagggtggcttttagagacccagacttggttggcagcgctgccatggaacaccccagcaagcacctcccagcctgcctttcggagcagcacccaggaggggatgccgcgctccagcaacaccaggtcaggcctgtgcagacccctgccctgccgctgcagaaatccagaagcatccttaatgcttctcagtcttcagccagagggagggctgttatttccagaggtgcgctttttatgtacttttagctagatgtggcatgcatctgtgagctttagatcattaaatccaaaatgtttgcctaaatgagtttatcagttgttaacttcaagaatattaaatgatttataataaagctcctgcatttctctccgnnannnnnnnnnnnnnnnnnnnnnnnnnnnntgtgtnggacgactgtcgggcctggacaacttggcccaaaccaattcttttgcgagccccgtttctgatgagggcaaggggaccatgaaccctaatctggtttgcggaccaagagcccctgtacccaagaaaatgaccgtgggggcaatgccttcacccacctatgaaaaaaccccccgcggggaaaaaccgaagccgggttggggcaacccnaatcccagaattggaaatcccccggcgcggaacgtggaacggggtttcttattcaaaccagggggtcctcaaaggccaagcggggagggcctcaaagttaagcgtccccccaactccaaggaaaacctcccctgggcccttgggctggnttgaattcttaacatttaagggggcgtttcctgccgcgataaaggcgaatatccccgttcccagaaatggggnaaattcaattaagaacgtttggnactgggggcgggaaaggcctatcaacacaccccccgggggngggccttagtggcccctataatgttccctcccgccccggaagagaaaaaaataagcgcgcggcccggggaacgagaaaattggtggacacaatattatggagaccacccggtctccaaaaaaatttggccgccccgggcggggtgaaaaaaggtnccacctctcggggnggagtagagcgcctctcccccacganagaaaaaatatcgcggtgtgtgtgggcaccacaaaaaacacccgccccttctttctggggcgaaaataaacagccgccctcaaagagagggaataataatagctgggaatcagaacgccntcccccttgcccgctngaagagcagaagaagaaaaacagggccgtgggagaaaacacaatgcc

SEQ ID NO: 353824 - DNA, 547 bp, Homo Sapiens
  misc_feature (481)..(481): n is a, c, g, or t
  misc_feature (523)..(523): n is a, c, g, or t
  misc_feature (529)..(529): n is a, c, g, or t
cagtcacctgacgtccttgtctatggtcttaaaaacaagaaggcacacatttgagaagatgagattaaggttaggagaaaacctcagtcattgcatgctttttagtatgggccaataaaatctcaacacctgtgggagagtaagaactaagggaatgagtttgggcggcccctcataaaggaccttagaggcagggaacagcaatgccaaatttccctctctcgtgagatgggggatcctgtgcaggctgatgaggcacccatgagaaaagccgaaaaagcatgcatcttagaaatagcccctcaattccagggagtcaacatgccaaagaatgaggctgggagacaggtagctccgagggaggacttctgggcattgagatcttcggcacggcaagcccagcattcgccttcagcccagacaggcttccacccgggagattccaagccaagggcttgccttttcagggattcacctcctntagccattttcagatttttggagttgaccacggaccagggtnggaggnttagattttagttctttt

SEQ ID NO: 353825 - DNA, 1056 bp, Homo Sapiens
  misc_feature (96)..(219): n is a, c, g, or t
aaactcctgggctcaagcaatcttcccacctcaacctcctgagtagctgggactacaggtgtgtgccaccatccccagctacttttataataaaannnnnnnnnnnnnnnnnnnnnnnnnnnnnnnnnnnnnnnnnnnnnnnnnnnnnnnnnnnnnnnnnnnnnnnnnnnnnnnnnnnnnnnnnnnnnnnnnnnnnnnnnnnnnnnnnnnnnnnnnnnnccttaaatgaagattttgtaaggaattgagcattcaactaaactcgtttttgtgagatggtcattttgttttaacctaacatggtttagagattattttatgaactctaagcattctggttcctcagttttctcaaagaaagagaactttagcaagtagcaggacaagctacgccacaccaatgccaccaggcgacaatactatgaataagtcaggaggcctcctagaatgcagccaaataggaaactgttccaaacagaatcagtcttgcatacttctgctcagaaggctcctctcgctttggaaactggaatgaggatcaccaacaggatcctcattttacacaggagttatgagaggtacatcctctagcagagatgcttggtcattacctgtggtacatgagattaccgagctaaaagggaaaaaaaacgatcttaatgttctcccatgaactcaacttaagctttttatggaggcactgaggccatgcagctccttttccaaaagacacagataaaagccaaataaggtagaggactttggaaattttctctgaaaagttaaattccacataatagtaagactgtttgctgagagaaaactgacaagtaaaaactggtttaagagacagacattcaagacaaactgtattggaaatacaataatgaattttggcctgatagccctcatgctgtcttatagcaaaacactaaaattcatgcaacagagaaattggtgacatgaggactttttctccagacttcctggggaaaaactgtgagaatatacttttttcttctgtttgctttcgaaatgcattctttcttttgctga

SEQ ID NO: 353826 - DNA, 957 bp, Homo Sapiens
  misc_feature (80)..(188): n is a, c, g, or t
  misc_feature (352)..(369): n is a, c, g, or t
gaccatctcacaaaaacgagtttagttgaaagctcaattccctacaaaatcgtcaattaaggctgagtgtggtggctcannnnnnnnnnnnnnnnnnnnnnnnnnnnnnnnnnnnnnnnnnnnnnnnnnnnnnnnnnnnnnnnnnnnnnnnnnnnnnnnnnnnnnnnnnnnnnnnnnnnnnnnnnnnnttaataataaagtagctggggatggtggcacacacctgtagtcccagctaactcaggaggttgaggtgggaagattgcttgagccccggagtttgaggttgcacgtgagctgatcaagcccctgcaactctagcctaggctacagagcaggaccccatttcccnnnnnnnnnnnnnnnnnngtcatttaaaaactgaagaatgttctcttcttgctcagttccctaaattagctggggggattgggatactttacaattttacatttttaaatttgaagaatttgttttaaacttacttggtaatggcacttctacttactgaccaacttttcagctctttttgaccaggatggttgcaaattagggaaaatatctttatactatacatccaattcaagaggactttaattacttaaaagcatttaggtcataattaaaattattttcactgtttccataaaataagcattatgattgcacactccttctactgtctgaatttatgtaagaggtatagcttgcttaaaatacatatatatgtaaagttatattttcttagaaacatggatgtttacagccattgctttcaaagagattattactgtgtattctccctgttttacaatatgttttcatgaagactatgttacaccagaggcttctgattatcaaagtgataaccagttttaactgccggtatgtaccagatttgtgaactaatttaaaaaaccacaaactatgaataaaatggggtttgcaaactaaaaa

SEQ ID NO: 353827 - DNA, 347 bp, Homo Sapiens
  misc_feature (130)..(245): n is a, c, g, or t
actgaggaaccagaatgccttagagttcataaaataatctctaaaccatgttaggttaaaacaaaatgaccatctcacaaaaacgagtttagttgaatgctcaattccttacaaaatcttcatttaaggnnnnnnnnnnnnnnnnnnnnnnnnnnnnnnnnnnnnnnnnnnnnnnnnnnnnnnnnnnnnnnnnnnnnnnnnnnnnnnnnnnnnnnnnnnnnnnnnnnnnnnnnnnnnnnnnnnnnatagaaattttattataaaagtagctggggatggtggcacacacctgtagtcccagctactcaggaggttgaggtgggaagattgcttgagcccaggagttt

SEQ ID NO: 353828 - DNA, 1238 bp, Homo Sapiens
  misc_feature (1004)..(1012): n is a, c, g, or t
acaggccttcctcctggtccacctccaggagctcctccattcctgagaccacctggaatgccaggactccgagggcccttaccccgacttttacctccaggaccaccaccaggccgaccccctggccctcccccaggtccacctccaggtctgcctcctggtccccctcctcgtggacccccaccaaggctacctccccctgcacctccaggtattcctccacctcgtcctggcatgatgcgcccacctttggtgcctccccttggacctgccccccctgggctgttcccaccagctcccttgccaaaccctggggttttaagtgccccacccaacttgattcagcgacccaaggcggatgatacaagtgcagccaccattgagaagaaagccacagcaaccatcagtgccaagccacagatcactaatcccaaggcagagattactcgatttgtgcccactgcactgagagtacgtcgggagaataaaggggctactgctgctccccaaagaaagtcagaggatgattctgctgtgcctcttgccaaagcagcacccaaatctggtccttctgttcctgtctcagtacaaactaaggatgatgtctatgaggctttcatgaaagagatggaagggctactgtgacagcttttgatgccagaaaaggcttctgttcacaacagtggcccatggagaaagaggctcttattaaacttagatgaaagagctgcttccattgtcagggtattttctaatttcagttcaaggaatatcctaaaatttagccttgttcagaatttactgcacataaaaaagggtatttcatccagaatagatcagttattgaagcagtgctgctaacatccattccctttcataccaccattttcaccctgtttcttcccctcctccagttctttggaaatttgtgatcgggggatcttagttgcttatttgttttgactcttgtgtgctgtgggcactggagtagagatttctggagnnnnnnnnncagtttatttcatcttgccttttgtgtttgagttatttttaatattttcctgtaaatattttgtaatattttacttgtaatgaaatggatcacaatgtcatttcctaatacaaggcaggatatgtgggaagaatatgtacaattatttgattaaaattatttcccactgacctaaactttcagtgatttgtgggaaaaataaataaatgttctacaccaagaaaaa

SEQ ID NO: 353829 - DNA, 447 bp, Homo Sapiens
cttgtgtacattgacttccgagatgaagacggactgctcagacagtcaagagaagcagccgccatgggcttcactggtaaacaggtgatccaccctaaccaaatcgcagtggtacaggaacagtttactccaaccccaggaaaaaattaagtgggctgaagaactgattgctgccttcaaagaacaccaacaactaggaaagggagcctttactttccaaggaagtatgatcgacatgccattactgaagcaggcccagaacactgttacgcttgccacatccatcaaggaaaaatgatctgttaaatgaagctgtcatcaggctaaagggtattgaagctgcagagggatcaacttgtgcttgccagaggacgccaatgaagtttgaaacaccaacaatcagagattttgtttctgttcctcattaaatcatgagcttttgtgccg

SEQ ID NO: 353830 - DNA, 859 bp, Homo Sapiens
ctgctgcggagggcggcgcgcggagctgcggcggcggcgctgctgaggctgaaagcgtctctagcagctgatatccccagacttggatatagttcctcatcccatcacaagtacatcccccggagggcagtgctttatgtacctggaaatgatgaaaagaaaataaagaagattccatccctgaatgtagattgtgcagtgctcgactgtgaggatggagtggctgcaaacaaaaagaatgaagctcgactgagaattgtaaaaactcttgaagacattgatctgggccctactgaaaaatgtgtgagagtcaactcagtttccagtggtctggcggaagaagacctagagacccttttgcaatcccgggtccttccttccagcctgatgctaccaaaggtggaaagtcctgaagaaatccagtggtttgcagacaaattttcattccacttaaaaggccgaaaacttgaacaaccaatgaatttaatcccttttgtggaaactgcaatgggtttgctcaattttaaggcagtgtgtgaagaaaccctgaaagtccggccctcaagtaggtctctttctagatgcagtcgtttttggaggagagagactttcgagccagcataggtgtcaaagacatctctctctctctttttctgtgtgcaacaagtagtaaagaaaccctggatattctctacgcccggcaaaagattgttgtcatagcgaaagcctttggtctccaagccgtagatctggtgtacattgacttttcgaagatggagcctggggctgcttagacagtcacgagaaggagccgccatgggtttcactggtaaggccaggtgattcacccctaaccaag

SEQ ID NO: 353831 - DNA, 571 bp, Homo Sapiens
ttattgaggccgggtggcatactgtacatcatatctgcaggcttagttatcttacataatggaaacttctgactctttgacctccatcttctcatcccctctccttccagtaaccaccttcctactttctgtttctatctatgatgcatcttttccttgaaaacttgttttaaagtttgcaactacaagaacagttatttagacttgaccatagcatttgacatttggtttttagcatctgtacttttttttcagagatctttgcccgaattcattgatggtgtgtcttaatcatcttgagtaatttttttccctcagaattgctagtgatatgccctctgattccctgcatttttgaaaatgattttctttggcccataccaaggaaggataatttgactgtgaattgaattctctatatagaattatagcttaattttgttttcaaaatttaatcttcattctattatttacttattattatggatgaacagctgtaagtctgtctttcctttgtggataatttgttatttatctacccctatccatatacaggctcacacttattcac

SEQ ID NO: 353832 - DNA, 460 bp, Homo Sapiens
gggaagcagaacatctaagaaagagggacaagctgtggggggtctgtgtctccatccctggctctcttgccctcgagtccctcaggttgatgctgcagaagcctgcgggtgaacagagttgggcctgaggagctgcctgttgtgggccagctgcttcgactgctgcttcagcatgcacccctcaggactcatatgttgaccaatgcgatcttggtgcagcagatcatcaagaatatcacgacattgaagagtggaagtgttcaggaacagtggctcacagacttacattactgcttcaacgtgtatatcactgggcatccccaagggcccagtgcactggctacagtgtattgaagaggccatagtacctcctgtttgaagttgtttattcacatctatcttatttgaagaaaaagactgatgtaatagatctttgtcattaaagctgaacttttaaaga

SEQ ID NO: 353833 - DNA, 459 bp, Homo Sapiens
ccctccccgtacgcccaattaatagtcccctgttccctggaagacttcctatggtaattcacagatggggatacagttgccaaagctctgggaaattgtgtttgggtgtgaaaaatactgtcaggtagcatagtgatttgggtgcagttctcagattactcttgtttttctctccagacattgaagagtggaagtgctcaggaacagtggctcacagacttacattactgcttcaacgtgtatatcactgggcatccccaagggcccagtgcactggctacagtgtattgaagaggccatagtacctcctgtttgaaattggttaatccacatctatcttatttgaagaaaaagactgatgtaatagatctttgtcattaaagctgaacttttaaagaagtttacgaaccttcctttctttgcactgatatatgaaaatatgtttggcctagcggggac

SEQ ID NO: 353834 - DNA, 470 bp, Homo Sapiens
  misc_feature (172)..(191): n is a, c, g, or t
gagctttcaaaagttaagttatggaccaaatcccatagcgagcccttagtgactttctgtaggggtccccataggtgcatgggggtctctatagataatatatgtgctgtgtgtaattttaaatttctccaaccgtgctgtacaaatgtgtggatttgtaatcaggctattnnnnnnnnnnnnnnnnnnnncagagccattaatataatatttaaagttgagttcactggataagtttttcatcttgcccaaccatttctaactgccaaattgaattcaagaaaccgatgtgggttttgtttcctgtacaattatgagatataattctttttcccattgtaggtcttttacaaaacaagaaaataatttatttttttgttggtggataaagaagtcaagtatctgatactttttatttacaaagtgtgatggttttgtatagtaggttccaccctgagtattcctaaaag

SEQ ID NO: 353835 - DNA, 703 bp, Homo Sapiens
cacccaggcgcacttctggagtgaggctgagtattttaagatagagtgagatctgtgtagtgattgaaaggtggtatttaaaaacttggatttcattccagtgtcaggtttggtgttttaagttcctttggtccagggaagggtccaagcagccacagttgccctaaatctccatcattaagtcttccagcaaggttaagtgcagtatggaaggagaagggggaagaggacggtaacggccccacactccaggctgagaaagagtaattaggaggcctgaggaggggccgaggaaaggctgttggggtgtgctggggttggtacccgagcgccttcccctcacctcaaccagagaagagcatccggttgctttttaaagcttttagcctgccctagtatctatggagaggtataagacttttgtctctacctcatttcatttacaaggacttcccactaaaaagtgaaccagagatgctctagacaaagttaattgccagagacctctcagtatatgtatgactaaacccaaacaaataacctgaagaaaggattgggaagaagcttcagtctgagctccaacttcaccacccctgaagaagttcccacgggaacaaagtctcacagatgtgatgaatgtggtaaatgcttcacgagaagttcaagccttatccgccataaaataatccacactggagaaaag

SEQ ID NO: 353836 - DNA, 772 bp, Homo Sapiens
  misc_feature (401)..(422): n is a, c, g, or t
  misc_feature (546)..(573): n is a, c, g, or t
gggcgtggtgcggagggcggtgttggggtctgctctaagctgcagcaagagaaactgtgtgtgaggggaagaggcctgtttcgctgtcgggtctctagttcttgcacgctctttaagagtctgcactggaggaactcctgccattaccagctcccttcttgcagaagggagggggaaacatacatttattcatgccagtctgttgcatgcaggctttttggcttcctaccttgcaacaaaataattgcaccaactccttagtgccgattccgcccacagagagtcctggagccacagtcttttttgctttgcattgtaggagagggactaagtgctagagactatgtcgctttcctgagctaccgagagcgctcgtgaactggaatcaactgcttcagggnnnnnnnnnnnnnnnnnnnnnngacttgcctgggaggccgcgagaaacttgcattggaagcttcagcaaccagcattcgagaaactcctctctactttagcacggtctccagactcagccgagagacagcaaactgcagcgcggtnnnnnnnnnnnnnnnnnnnnnnnnnnnnctctccagcctgggaactataactcctctgcgagaggcggagaactccttccccaaatcttttggggacttttctctctttacccacctccgcccctgcgaggagttgaggggccagttcggccgccgcgcgcgtcttcccgttcggcgtgtgcttggcccggggaaccgggagggcccggcgatcgcgcggcggccgc

SEQ ID NO: 353837 - DNA, 261 bp, Homo Sapiens
aaagacttgcctgggagcccgccagaaacctgccattgaaagcttcagcaaccagcattcgagaaactcctctctactttagcacggcctccgcagcgctcgcggccccgggcaagcacctggcggagaagaaggtgaagcgcgtctacctgttcggcggcctgggcacgtcgtcgtcgcccgtgggcggcgtgggcgcgggagccgaccccagcgaccccctgggcctgtacgaggaggaggagcgcgggctgctcgccc

SEQ ID NO: 353838 - DNA, 1478 bp, Homo Sapiens
  misc_feature (86)..(100): n is a, c, g, or t
ggggattaagatatcagctttaatatattgttcagtgaaaaaagcaaaattcagaacagcatgtatagtatgccaccatttgtgtnnnnnnnnnnnnnnncctgatacacacatacccacacacaatatgcttgtaaatacatggaatatctctggaatgatacatcagtaactggtaacagttgttactttttgaaaatgggaccagggaactgaggccaggggtgagaaggaggaagagagacttactttttaatagtatacccttttatactgtttgacttttaccataggcatgtgttatttttctaaaaaacaatttatatattaaaactgtaaaaaagaatcaaaatagataccagctttatagctgatagagctggattggagaacatggcttggacctgaggctgaaatgaacttctatcataagtctaacgacttttgggattcccccaccccaaggagagatagttgggtctagaaagcagatgtttacccagccatagtgaaggactgcagtctttcccacatcttgctgtgtggaacgaactcaagatccaagagtggcctaagctgcctatccattataaccattttctcaatctcatcaagttattcctcctcccaagcataagattgaatgagtgtaagagaagatgggtagaactttcttccaacatttttgagagatgcaagtcttttccttttcttgagtcaggagcatggagagaggaagaggatagatcccatcatacccttgtacattttcattctcttaagccacaatggttaatgctcaagactctggtcaacaaacagggctgtggctgtccccttccagggagaccaacagtatcttagaaaagttctgctcccatcaatgtaagattggtgagcagttgtttttgcccccaagaggctctgaaataagtcaaaatagaacagtaattaaattaactctaaggctacattacaccctagactgaaaatttgatcacaattgcagccctaatttacaattatgtccagccatatttcctgacatagctgacaacaattatacaatgactcccaaagatagcattaaaatactccaaataatacaatatcaacaacataataaaaatgccttagtttgaactatatgacctcacccccacccccatcaactattaaactcccaagggaaaaaggactgccccaaaattaaatttcctaattcaaagtccaaaataattaaagtccaaaattctgcctttcccaatttctcgtttttctcatttcagccatatagatctcacaaagatgtctgcccagatatggggttccttcagcagctgcagccttggctgtcttcctcttgactgggtgaagttccttcaggacctcaggagttgaattaatctaaccccacaattgcatgtcatacatattaaagagtccaaagggtcaagaagacataagattatcacaat

SEQ ID NO: 353839 - DNA, 398 bp, Homo Sapiens
gggcagtggtatcaacgcagagtgtccattacggccgggcactgcgataggaatcatgtctggtcgcggcaaaggcggaaaaggcttggggaagggtggtgctaagcgccatcgtaaggtgctccgggataacatccagggcattacaaaaccggctattcgccgtttggctcggcgcggtggcgtcaagcgcatttccggtcttatctatgaggagactcgaggtgtgcttaaggttttcttagagaacgttattcgagacgccgtcacctatacggagcacgccaagcgcaaaactgtcacagccatggatgtagtatatgccctaaaacgtcaggggcgcactctgtatggcttcggcggctgaatctaagaatacgcggtctcctgagaacttc

SEQ ID NO: 353840 - DNA, 810 bp, Homo Sapiens
gcgcttcctttcttctctggaaactaagacattggactgaaggaactggcctgaggggggctgaccgggggcccgtgctgctgggagctctacgcacaagaggccgccggggtcacggacaggaacctcagcccagggtgctggcctttctccttcgcaggagtcccccaaaatccacacagcgactcgagcagccttccactcagccagaggagggtcgggctcccccgcctgctctcggtggtggcgtctggcccttcctgccgtttccaaggcctccggaagcaccaacccagttctcagttacctcctctggccggaaggcctcacgttgtcctccagagctgctctgggcccagggctggctccgtgaccacctgatggacgtgctgggcagcatgggctcccaaggcagcatccccagctgctctcccaccccaccccagctgcccggcggctgggcccacgagggctctggggacacttccataggaaaggggcctggcactttgtgattgccacgtgtttcctgttaagccgcctgcccccagtgcaaatctctgtgttttgctctctcctgaacaaaaatgtaaaccgacgccggaaagcaaatggtatcgaatacctttcttgcccataagggtttttacaaagaacgtgtctcactaggaactaggacactcatcggcccgagaccaactcctggataaaaggaataaggagaatcgtgtttgtaacgagttacaggattgtttctttcctggattttaaacttttgttaaattgtgaaattatggaggagttttatag

SEQ ID NO: 353841 - DNA, 348 bp, Homo Sapiens
ataaaaaaatttgatcatctccgctgacctgtcaccaggataaatactatgaattacttttgtaggcataaaggctgtgcagggatcattgaagtaagttcacttctgaatgatcttttgtcaaagaaaagagaacatgcaaaaccataaaagggtaataaagccaggattatacgttataaagctatccactgcccttcagagatttaagctctctttcctagagaaaatacttgctttattattgtcataaagtaagcctagaccatctacgtgtaaattggattccattttctgcagtatcatttggcacctttctaaggattctcgtgaatatttcactataag

SEQ ID NO: 353842 - DNA, 822 bp, Homo Sapiens
cgggagagatccaggctcctgatcccccaaacaccctgtgtttaccatcaaacaccattcccctctcccaaccatggcccaggcaaaccccacagaaataggaactacaaatttagatgactctcttttgggttttatcaattttcatctgctgttacattagtattatgtgcactgaattaaggtattgaaattcaatcacttcattgatacctcaaagaacagcctaaaggcaaatgtttcaaaaataatgagctgacacataagaagactgctcacaattagtgtaaatcatggacaatgggcagaggcactaaactgtcaccagttcttgtcatataattctggtcaaacataacagaatataataactctagtgattagattagaagtagttatatacaaagacaaacaaacaagttaaagcagcccttaaaatagctgaacaagaaaacaacctaactattgcacaatgcccctcttaaagttactgcctatgaattgatgtggtaaaatcctacaatgcctcccataatttaataggtgcattcctggttacttgatttccttatataggcagctcatagtgttaaaattataagaaatacagattattaaaacattttagattaaagtacacattttgatttaaatgagctaaacacagttaaataactgagtgacaaaatggttgtttagggcagtcttatctgagtgaacatatcttctgtatgttgctgttgctgtgtggtaatactctgacaacactgaaatcctagccctgtaagtacacacacggtgattcatgtttacagatacaga

SEQ ID NO: 353843 - DNA, 1562 bp, Homo Sapiens
  misc_feature (21)..(21): n is a, c, g, or t
gacggcagtactccagcgtantataggtagcgaggcctgggtggcgaattcggcacgaggcgccggaagtggtcgcgggtcgttctgcttcctgcccgaggggcgtgcgcgggtcaggtgcggccgcggaggcggaagcatccatggcggagggcggcagcccagacgggcgggcagggccgggctccgcaggtcgtaatctgaaggagtggctgagggagcaattttgtgatcatccgctggagcactgtgaggacacgaggctccatgatgcagcttacgtcggggacctccagaccctcaggagcctattgcaagaggagagctaccggagccgcatcaacgagaagtctgtctggtgctgtggctggctcccctgcacaccgttgcgaatcgcggccactgcaggccatgggagctgtgtggacttcctcatccggaagggggccgaggtggatctggtggacgtaaaaggacagacggccctgtatgtggctgtggtgaacgggcacctagagagtacccagatccttctcgaagctggcgcggaccccaacggaagccggcaccatcgcagcacccctgtctaccacgcctctcgcgtgggccgggcagacatcctgaaggccctcatcaggtacggggctgatgttgacgtcaaccaccacctgactcctgatgtccagcctcgattctcccggcggctcacctccttggtggtctgccccttgtacatcagcgcagcctaccacaacctccagtgcttccggctgctcctcctggctggcgcgaaccctgacttcaactgcaatggtcctgtcaacacacagggattctacaggggctcccctgggtgcgtcatggatgctgttctgcgccacggctgtgaggcagccttcgtgagcctgctggtagaatttggagccaacctgaatctagtgaagtgggaatcgctgggcccagagtcgagaggaagaagaaaagtggaccctgaggccttgcaggtctttaaagaggccagaagtgttcccagaaccttgctgtgtctgtgccgtgtggctgtgagaagagctcttggcaaacaccggcttcatctgattccttcgctgcctctgccagaccccataaagaagtttctactccatgagtagactccaagtgctgcggttgattccagtgagggagaaagtgatctgcagggaggtggacaccgagccctgagtgctgtgctgctgctggtctcctgatggctgttgctgcagaagatgtcctcgtagactgtcattgctcctcaggtgcctgggccgctgaacagtccttgggtcattgtcagctgagaggcttatactaaagttattattgtttttcccaagttctctgttctggattttcagttgcatattaatgtaacgggccatggggtatgtacatgtaggggctgaggttggaggcttactaatttccctgtagggaagactcccagcacttctggaactgtgcttctctttatttttctacttctcaatttgatggttcgattaaagccttctagtatctcaatg

SEQ ID NO: 353844 - DNA, 595 bp, Homo Sapiens
caaagctgttgttttgaaaactcttgctttcttttggtgtccattttgtgttctattttaaagaatctttcatttatattggtgttattgtagtgaagagaatgtgataggctgatctgtaatggtttctgtcaggagcttagcaaatgcctctgcccctcttcccctacccctgtccttcctcagttcccagctgggattgctatgcactgggcagacccgtcactgtctcccctgaacccccacacagtggcttcccttagaaccagtctttgtactctccctaaacagcagcaggcttaggatttttgtcaggctggttcttgcgtgctctgtgcccccaccagtttgctcacctcttggggcattttgtaatgtgttttctctgtcttgtaaaaccttttgattgtaccgaaatggtatctgcagtcgcctttggaaataaatggtcattaatttgtgtacttagcattctgaattttagtctcaggtgtttctgttgttgaagatccttgaatgaaaaggaaccctcaccatggggcttactgttataatgtttcttcatttactgttattaaaagatttatgagaaaaa

SEQ ID NO: 353845 - DNA, 900 bp, Homo Sapiens
gggcccgagccggaagctccgactgcggcggcatccgggacggcgggcgggctggccaccacgggacaggaaggcacagagcatggagaatgatgaacttccgtcagcggatgggatggattggagtgggattgtatctgttagccagtgcagcagcattttactatgtttttgaaatcagtgagacttacaacaggctggccttggaacacattcaacagcaccctgaggagccccttgaaggaaccacatggacacactccttgaaagctcaattactctccttgcctttttgggtgtggacagttatttttctggtaccttacttacagatgtttttgttcctatactcttgtacaagagctgatcccaaaacagtgggctactgtatcatccctatatgcttggcagttatttgcaatcgccaccaggcatttgtcaaggcttctaatcagatcagcagactacaactgattgacacgtaaaatcagtcaccgttttttccctacgattacaaaactgccagtcctatatggagtctgatcacaagactgcagtttcttcacagatctcaggaagttgtcgtggggcagaggctttttaaaaacatgtgattagggagctatctttatctgaataataacgaatttttaggtaaaacctgagatagagtactacaaaatcatgttgatgacttcagattttggaagttaaatcatgtctgttatttgcattctttagaaacttgactaagtacctgaattcatatttctattctactgtgcaacatagtgatgattcagaaatttttcctttggggaaaaaaatgaatatgaacatttccattgtgttaagtgtaaaaaggtccagacatgatcataaaatttaaattttatacaa

SEQ ID NO: 353846 - DNA, 756 bp, Homo Sapiens
  misc_feature (572)..(581): n is a, c, g, or t
ggcacccatgttgcatgcattccacatattaaaatttgttttatataatttctaaatgtttaacatttgtttaataaaatgaaggcaaaactattttagtttagtttttatagctaccagacttagatccgataaattgtttgtataatttttaagcttaatttttattactttattggtgttaaggataacaaatgtgtattgttagtatatctattctaatcattttatcttaaatgctgctcttgggagtgaatattcaagtgtgcatcaattttttgaatacttaccctggaagatataaactgggcaagtattttgtgctctgtgtatttttttactgcattagacattgaatagtaatttgcgttaagatacgcttaaaggctctttgtgaccatgtttccctttgtagcaataaaatgttttttacgaaaactttctccctggattagcagtttaaatgaaacagagttcatcaatgaaatgagtatttaaaataaaaatttgccttaatgtatcagttcagctcacaagtattttaagatgattgagaagacttgaattaaagnnnnnnnnnnttctcaatcatatttttaaaatataagactaaaattgtttttaaaacacatttcaaatagaagtgagtttgaactgaccttatttatactctttttaagtttgttccttttccctgtgcctgtgtcaaatcttcaagtcttgctgaaaatacatttgatacaaagttaaaaaaaa

SEQ ID NO: 353847 - DNA, 859 bp, Homo Sapiens
tgttgataaggatggaagcagaactactttgagacacaagcaacaattggaagagtttttttatatgaactgaaatagatctaagagagcctggttaacagtttcctttaataccagttcagattaaatggttactttaggaacctgtgttactgtgtgagcacccacagaaacaagcaaacttatttcctacaaaaaatgaggggataataaccgatcagagtcacagtcgtttcaatataaacccttccgaaagcaaaagcagggaccacatgagcacacaagaagccaaagtttgtcagtgatcttaataaattaagactgagtaacatcctgcctttagaaaaaaataaccccgaggtggagaccagggcaggggaggtggcggagaagcatcgggccagatcaaccgttaataacatgcttctgagctatgtggatgtataaatgaaaacacccccaactaggtattgtagaggctggaaaaagatgtgatgggattatacaggtgatgcatatttttgttttgagactcaacaatgtgctacaaatgtgatacttaaccctgaactgcatgtattggggattgttttttaaaaagaaaaaagacaactttgaatcaataaatgaacagtgtttcacttgctggctcttcttgctagtagatggtgactaagaggttgggacagaaatcttgacaactagtggaaaacttggataatcttcaaggaccatggagccttctgtttccttctgtttgcagaaaagcaacactgcctgggttgtgatcctttacaagtgactacttcagacacaattggccacctctttgtatcactggatgactgaatgtatcgtt

SEQ ID NO: 353848 - DNA, 907 bp, Homo Sapiens; identical to SEQ ID NO: 178429
  misc_feature (354)..(388): n is a, c, g, or t
  misc_feature (730)..(730): n is a, c, g, or t

SEQ ID NO: 353849 - DNA, 1306 bp, Homo Sapiens
  misc_feature (125)..(142): n is a, c, g, or t
  misc_feature (166)..(273): n is a, c, g, or t
  misc_feature (710)..(720): n is a, c, g, or t
  misc_feature (723)..(868): n is a, c, g, or t
caatatgtatacattttattagtgatgacttaaattacatggggccaggcatggtggctcacacttgtaatcccaacacattgggaggccaacctgggcagcatagtgagaccttgtctttattnnnnnnnnnnnnnnnnnntagccaggtgtggtagtatgcacnnnnnnnnnnnnnnnnnnnnnnnnnnnnnnnnnnnnnnnnnnnnnnnnnnnnnnnnnnnnnnnnnnnnnnnnnnnnnnnnnnnnnnnnnnnnnnnnnnnnnnnnnnnngaggatgacactgcactccaggcgtaaccaacagagggcaattcctgtcgctaagtaaataaagtataaggggggaatgcgtgttggttataagcaaatactacaccattatatgtaagggatggagcatccacagattctggtatggtgtgggggcggtatcctagaaccaatccccccgcaagatagcaaggatgactgaactatggaagaatcaaagcagtgttacacagtatgcaattcctgtcttcaaaaaagttacctcatcaggtagatgagacttataatgaataaaatgaatcaatacagatttggagacggtggttgttgtcatagataatcttaattgcgttttcttctaaaacagatatgttgtcaccgaaggtcattacaagaagatgaagaaggattctcaaggtaaatattagtctggtgannnnnnnnnnnctnnnnnnnnnnnnnnnnnnnnnnnnnnnnnnnnnnnnnnnnnnnnnnnnnnnnnnnnnnnnnnnnnnnnnnnnnnnnnnnnnnnnnnnnnnnnnnnnnnnnnnnnnnnnnnnnnnnnnnnnnnnnnnnnnnnnnnnnnnnnnnnnnngtctcgcgacgttttaattagaattttagaattagaggagggcttagaactctgccctcatttttcagtgaggaaactgcccaagacaggacaaatacttaccctaatgcttagcctggctccagtgaaattagctccccagccaaagctgagctggatggaactaacaaggacacacctgctgtccccagccctttcgggaggtggggagggataggaaggagaaaggttttggtgcctattgctgctgatggtgggcatcaggccaggccaggggccttcttggaggctctgggaaaggggaagggaaggccaccgggtgtgagagagagggcacttgtctccttcaaggctgatggaaggtaggatatgtgagtccttcctcttaagtggcaggaaacagtattttctcctcgtgccgaattcgccacccaggcc

SEQ ID NO: 353850 - DNA, 389 bp, Homo Sapiens
ctggttaacaaaatggagataaagcaagtgttaagaaattgccttaaaggccacactggcatactcccctgacccttccccccagggacagaagcaggagtaagtttctcatcccatgggcgaccagggccatctcctcccaccagtggcccccactcacagggaggctggcaatgccctacctgcctgttctccagatggagaaacaggctctgagatttcacaggtcttgcccaaagtcattgattttgatgattaaaaagaataaacacagtgtttcctgagtagcagtgattgttatgccttgctattttaataaagattctattttcgtataacattgtcaagtggaaacatgctgaaatctattaaaccatctttgtttgtgg

SEQ ID NO: 353851 - DNA, 1020 bp, Homo Sapiens
  misc_feature (921)..(921): n is a, c, g, or t
  misc_feature (928)..(928): n is a, c, g, or t
  misc_feature (936)..(936): n is a, c, g, or t
  misc_feature (963)..(963): n is a, c, g, or t
  misc_feature (999)..(999): n is a, c, g, or t
  misc_feature (1004)..(1004): n is a, c, g, or t
tggcgaaacatgaactgaaaggactgcatgaccatccggtgaagatcgccacccgggggggtccacaccggaaagaccctcgtgaggaacggaaggggccgccccgactgctccgggccactgttcccgctacagcgaacccagagaacatgcatagacacacaccacccgctaacgtaagagaagatcgcatgttagtagggaccaaggcctgctgtattgctcaaagcgccaaaatcatggaatgctgccactcggtcttttcgtttaatgttctcattccttttcgcgcatggcctaggatggtctcgacaagagatgagatggagacttagcgggtctccaagacaagaactacgtaatcacactagtcggtatgaagacaattcgatgtccatagggaagcggggagctgcattccccttctgggctgctctacctgctaaatctcaggatgaacagagccaggcggaaagcttggtggccaagcagtctgtgtgcttccccgctgatggagaacgttgcgttgttcacaatagggcctcatgggtgtagccgcatggcagacccatggctggcgcagctgcctgttgccgtctgtcttcagtaactgctgctctgttaactgttctattctgatactacgcgtgttgttttttacaacaggtatgtttttgtttcagaaatatgtattgcttttctcatattttttgcaaattgtattgtcaacatgggtcatttaaagtcctgtatgaaccataacctgctgtggtacctttgtacatgtttgattctgtattctttattccagtgtggcatatgtgcccctctgtatcttttgagaagtgcggaataggttgcttctaccacctgttcttaatgtaacagtaaaagttttcacatttttctcagaactgttantggaacncctttttnctaagggtatttaatacaaatctgatnatttgtatgaagtgatacttggaatggaagccaganaaccncccttggactgtagtt

SEQ ID NO: 353852 - DNA, 354 bp, Homo Sapiens
gaaaatcttcattgggactttttttctctaagtatagacatgccccactgaaacccaactcccaatgctgatcacactaggaatattaaattatcaaaattaaaaataatttcctcacctagcacaagatactatacaatattacaaacacagacacatgaaaaaaatcaggcagtaggaaatgtacaacagctttggtgttatacaaaataacttccacaaacaactaacagtgaagcataaagttcatgttttcttaccacagacactccactgctgatttctacttgtttcctttaacgttcttggtaaggtctgaatagccaagaaagaaagaatgtacagttcccttag

SEQ ID NO: 353853 - DNA, 1377 bp, Homo Sapiens
  misc_feature (1044)..(1044): n is a, c, g, or t
  misc_feature (1313)..(1313): n is a, c, g, or t
ggcatcagttaaagagagaccacgggagaaaaaaatatcctcctgttggcagtataatttgtttgtttgtttatctagggatcctcagatgcttagtgctaggttaatccaggttaatccgtctggactaccttttgtgcatctttctttgaagccttaatgggaacctgatgggtttgctgtagcagcttccttgtgaattctgtcagagctgcaacagccgctgcactgccactcagttttctaaggaactcctcctactaccatcttggctcagtctccctcacttaagccctgggtttgaaaaattaattgcaacttcccaggaaacattgttcagtttgcagattaagcctggcactcacctatcagaaaccagagctccgcctgcttagttgtttcaaagttttctgaaagaaaactaggggagcacttgtgaacacaggagcagctggtgatctgctttcttaccctaactcttgacaaatgagtcgtctactattttaaagagtctggaggtctctgactctgccataacaataacctgctgttaatttataacacagatttttgtttggaagagccttatttgaaatacactttgatttattttcttaaatatttatattcttttcttgcttacttcagggttggtagcttagttggaagtgccagcacctggcacctattcatatagaacaggctgtactcaagacaacttctagcatttactttaagacttatataatttatttctattttgtgtgtactatagtcttgtgcatatgtagttgaacacacagtgaaatatatgtctctctttgtggatgtgcggcctaaaaatttgaatgtctggtgagagagagccatgtgtataggtcagagaaaagaacagctcccgactccctattagcgcctgtgatttgtttccttttgtgtttatctggcctagtgtgctgtttctttaaaccaggaagaagttttgtcttttggaggctcttctcacctgtccagcctggcatgtcagagaacacatagcctgtngacaatgccgtttttaaaggtttacttaatttgcagtaaatccagctgccctcaagaactcctacaccaagatggacatttcctttccagaaatgggatcaagtatctggctcactttggtattggatggactaataatgtagctccaaaaatgcaaggatggaagaatatgtgtaatccaaaccaaggaaggaaatgaaaagtgaacgtactgtttttaccacccctttctggttgcttattggtggttgcttcacggtgcataaagntgttttcaatgccacgctttgttaataaatattgtgaactattttgtaaaggaaatgtattatg

SEQ ID NO: 353854 - DNA, 393 bp, Homo Sapiens
gcagggcatgagttagggagactgaagaatattgtagactgtacatgtgccttcttaatgtgtttctcgacacattttttttcagtaacttgaaaattcaaaagggacatttggttaggttactgtacatcaatctatgcataaatggcagcttgttttcttgagccactgtctaaattttgtttttatagaaattttttatactgattggttcatagatggtcagttttgtacacagactgaacaatacagcactttgccaaaaatgagtgtagcattgtttaaacattgtgtgttaacacctgttctttgtaattgggttgtggtgcattttgcactacctggagttacagttttcaatctgtcagtaaataaagtgtcctttaacttcaa

SEQ ID NO: 353855 - DNA, 443 bp, Homo Sapiens
ccaaaggaagaaggggaggcagatttcccctttagatgagtgaagggataggaggctggtgaacccaacggctgaaatgtgaagggtgagagggtagggtgagtccccccagccctgagggatgaagggtctgaagatggcactgcacggtgacagctgcagtgactcaggagctccgtttacaaaggaacatgagtgaggaacataacttaattttttttatatctgacctgaatttctgttttcctcccccattccccacatggtagaagtgtaatctcacatcaatttggggaccctttctttccccagggatgtgtagaacttttggggatggcacatttgaagaccttagggagctttgcattttaaaggctgaatcccacactctatcatacatattaatatttacctgcattccacattaaagggttcagtttaaa

SEQ ID NO: 353856 - DNA, 1448 bp, Homo Sapiens
  misc_feature (129)..(191): n is a, c, g, or t
agcggctgacctgtcagggcgcgggcggcggcggctccagcaccatgtccctgcagtacggggcggaggagacgcccctcgccggcagttacggcgcggccgattcgtttccaaaggacttcggctacnnnnnnnnnnnnnnnnnnnnnnnnnnnnnnnnnnnnnnnnnnnnnnnnnnnnnnnnnnnnnnnggtggctgtggtccggggggcgctgacagctccaagccgaggattctgctcatgggactccggcgcagcggcaagtcctccatccagaaggtggtgtttcataagatgtcacccaacgagaccctctttttggaaagtaccaacaagatttataaggatgacatttccaatagctcctttgtgaatttccagatatgggattttcctgggcaaatggacttttttgacccaacctttgactatgagatgatcttcaggggaacaggagcattgatatacgtcattgacgcacaggatgactacatggaggctttaacaagacttcacattactgtttctaaagcctacaaagttaacccagacatgaatttgaggtttttattcacaaagttgatggtctgtctgatgatcacaaaatagaaacacagagggacattcatcaaagggccaatgatgaccttgcagatgctgggctagaaaaactccatcttagcttttatctgactagtatctatgaccattcaatatttgaagcctttagtaaggtggtgcagaaactcattccacaactgccgaccttggaaaacctattaaatatctttatatcaaattcaggtattgaaaaagcttttctctttgatgttgtcagcaaaatctacattgcaacagacagttcccctgtggatatgcaatcttatgaactttgctgtgacatgatcgatgttgtaattgatgtgtcttgtatatatgggttaaaggaagatggaagtggaagtgcttatgacaaagaatctatggcaattatcaagctgaataatacaactgtcctttatttaaaggaggtgactaaatttttggcactggtctgcattctaagggaagaaagctttgaaagaaaaggtttaatagactacaacttccactgtttccgaaaagctattcatgaggtttttgaggtgggtgtgacttctcacaggagctgtggtcaccagactagtgcctccagtctgaaagcgctgacacacaatggcacgccacgaaacgccatctagtctgaatcccagcgtcggggctctgtgccagcttactcttcactccagggtcggatgccacgtgctacaggacatgggagctgctgcttgtgggaatctggtgcctgttccactagagacaaggggtagagtttctcatttggatgaaaaccccttcaactggtggtgtacaactgaagctactatatcttttttgaaaatggca

SEQ ID NO: 353857 - DNA, 498 bp, Homo Sapiens
tttgcggagtttgtggtgcccgtagtcacaccacacacacatttatgggatgtcagacacacggccagggccgcacaccctggaagcagcagtctttgtgcccacctccatcccaatggtccttgctgctcagagcataaatgtctgcccggcccagcatcccagagtcgaacaccctgacgagcaagtctatgccagggctacacacaggaagcccagggcctcccggatcccagggagcgcacgtgtatctgtgtgagagagacagccagccagcctccaggagcacacggcctggcacctgtgtgttacgtctgtgcgtggctgcatttgtagctgggggtgcctggcacaccccacgtgggtggcttctctgcatcaagacggggctatgagcctggagtggtgtctgagtgtctgaggaggtgtgggttcgtggccaggtatgtgtgtccatttgtgttcgccttgtgatgtgtgtctgttgtgtccaggtct

SEQ ID NO: 353858 - DNA, 1179 bp, Homo Sapiens
  misc_feature (459)..(590): n is a, c, g, or t
  misc_feature (745)..(754): n is a, c, g, or t
  misc_feature (820)..(864): n is a, c, g, or t
  misc_feature (1011)..(1011): n is a, c, g, or t
tgagaagaaaatgacagacaattatttttcctttaggtcaaaataatgtcactgctatctggataaattataagttcatatatttgaaataagatcctggaaacgaatttaaatggtgtcaaactgcagagcaacagggcttcagtatattcacatctaataggttaatatgtacatttggatgatgatttttcttgataacattaacattaattttattttttcagacatactgtaatttaaaaattaatgtgagcgtttgttttaagttcacagaaaacttaataattcaaattctcaggaattaaggactcaccataacattgtcagttccaatgaaattttgtaaaagatggcaagtttgttacctcacttgagtggggttttccttttcccccaattctaagagaatataatgtgtatactaaaacattaataaacataattttgaaaatttcnnnnnnnnnnnnnnnnnnnnnnnnnnnnnnnnnnnnnnnnnnnnnnnnnnnnnnnnnnnnnnnnnnnnnnnnnnnnnnnnnnnnnnnnnnnnnnnnnnnnnnnnnnnnnnnnnnnnnnnnnnnnnnnnnnnncttgtccgcccccctccgccccctcaaaagtttttccaaaaccttttgtttttgcgcgcgcggccccctaaagagaaaaggaaactggggcacatagtttttttcccaaaaaaaaccctggcgccagagaaagagggtttggatacctccccccnnnnnnnnnncccccccgggggggaaaccccagaagggtttttgtaaacaaaaatcccaaaaaagtgagcttcttnnnnnnnnnnnnnnnnnnnnnnnnnnnnnnnnnnnnnnnnnnnnnaagctcccaaagcgggaacgctctccggaataattccgaataatttcccaccgcccccaccccccgcacgcatgagcaaaatctaatatattcagagaacagaaaaaccatgggtgatgggagagaatatctgtcctattataaacncgcgttctttttcgcgcgccacaaaatatgggtgtaagaacccctctctccacgacacaaaagcgggcggaggtgtggagggagaacaccctggtaaaatactcccccccaaggcggggataatattagggaccacaccttcttttggcgcgccgcctttggggcgcg

SEQ ID NO: 353859 - DNA, 934 bp, Homo Sapiens
gttgttcgccagcggacagttgatccggctgaagtttgctgtgtgatcaacattggatgggtagaaggcatttggaccctgagaatgtatgacctggatcatgtctaagtttgaacattttagtatctcaccttcctatactcttcttaaggttacagatatattgaggcattgtttctcccactgggaatcataactgtgaaaacaatctgattttggtgccaggaatcaagagaatcccgtaacactgggatcaatgtattagacacaatgcaaagccctaagctcctggcatcaggtagtttataaatattaagagatttgtgattaaacttgatcacaaatcaccctcagaataaaattcacatccagccttgttaactgcacacttttacagttatataattcaagaattgctttgttttaactggtcatatcttacattaaggttttttacaaaatcaaatagacatctaaggttccaaatcggaattaaatatttttaaaacaagtcacctaatttgctcaaaaactcgtttaataatttagatctcaatttaagtttaagattggagacaacaaaaaacactggagaagcttaatacccccctcactcagggttccttagaaagcagagctgacagttttctgtcggtgcactcgcacagaggcatttctctgtgggtggatgatgcagataaagcaggaaggacagtattcaaatgtcacttacatataaatgcagcattccatgaagcatcaagttcagaatcatgtgctgggaaatatgagacacctctgctcagctttcttaaacttcaagcataattaacggggcaaattgcagcaaacctctactggtatgttgatgggagtgcaagactgacccacagcttttaaaaaggtaaattaagaggtattatagttacagtac

SEQ ID NO: 353860 - DNA, 775 bp, Homo Sapiens
  misc_feature (230)..(238): n is a, c, g, or t
tgacactgtgcccagctgagatgtttcttattattttggaggtggagaggattttagacctctttgagcatctgaaaaaaggctatatatgtatggttttctcttcagaaaaatcttaagactcacaatacggggacttccttgttaccaggaagattttctggcaattcctagttaataaatcttattctaatggaacatacattgatcttgagttaatgcgtggttgnnnnnnnnngcgggggcaacttgaaatatatgcagtaaagtagtccatgcatacaagtccctaacatggtagatgatgttgcctcccggccctgctcagaaagaatacaaaaagtgtacattcctttttctataatttaagaagtctggaatacagagtgtaacactgtgtactgctagcacccaaagtggaaaatcttaagcattcagattgtttagtcaaagaagaaaaccagaagggcagttgcctattgaggtgattttaaacctgtttatttgtaaggattaagtaccctaataggcttaaactatgatagaggtttaatacagaaaaaattgacaggtattataaattgtggatccagttacttgcttatttaatttgtaaagaggtaaaattagctctggttgagatatcaagtatggcaggtatttgagaaggctataaatcataattttcatttagttaaaatatggacctgattctgggaaaccctatcaaaccatctcaatggtttacaataaaataaaaactaaagtgaaattc

SEQ ID NO: 353861 - DNA, 770 bp, Homo Sapiens
ccttttttatttgtcatagtccttccttcatctcactccaactcttctttcctggctccccgctcggctccaccgccgcgggcctcccttcacacatagcacaggtagaggtacgtcttctctatcctccagtcgggcgggatctcctcgggcttgtggcccttcatgtgcttctgcatggaggagaggctggggcagtactctgtgcagatggtgcactggtagggcgaggcgccgttgtgcgttctcaggtgcttgatcatggccgagtagtcccgggagcgctggtggcagagcttacactcaaagggcttctcacctgtgtgcaccctatagtgcgtctccagctgatgcttgaggctgaacttcttgccacagccattgcactcgtagggtttctcacccgtgtggatgcgtttgtggctcttgagtgtgctctcatcccggaagcagctgccacagaactcacactcgtaggggtggtcgcctgtatgtgagcgcaggtggcgtttgagagccgtgtggctggggaaggtgcggttgcactcactgcagatgtagctgcgcacgcccgcgtggacctccatgtgctgctgcagtgcgctctgcgcctggaagcgcttcccacacagcagacagaagacggccatgtcagtgccagtatgggtctgcctgtgtgtctccagggcatcctccttcgaaaactgtgcaccgcactgatcacagacaaaggctttggcagccgctgaatgagccagtaagtgcattct

SEQ ID NO: 353862 - DNA, 491 bp, Homo Sapiens
atttgtcatagtccttccttcatctcactccaactcttctttcctggctccccgctcggctccaccgccgcgggcctcccttcacacatagcacaggtagaggtacgtcttctctatcctccagtcgggcgggatctcctcgggcttgtggcccttcatgtgcttctgcatggaggagaggctggggcagtactctgtgcagatggtgcactggtagggcgaggcgccgttgtgcgttctcaggtgcttgatcatggccgagtagtcccgggagcgctggtggcagagcttacactcaaagggcttctcacctgagggcggagggacagggcaggagaaagtgaggacagacagaaggcagtgagggcaccatgtcaccctcaggcgtgccagggaagctgggttcctccagctgggcttgctccaacagaactttctgggacaatgaaggcaccacccaagacggcagccaccagtcacacatggctatg

SEQ ID NO: 353863 - DNA, 632 bp, Homo Sapiens
  misc_feature (234)..(242): n is a, c, g, or t
  misc_feature (360)..(360): n is a, c, g, or t
  misc_feature (519)..(559): n is a, c, g, or t
ccggcgtccccaacatggcggctccccaagacgtccacgtccggatctgtaaccaagagattgtcaaatttgacctggaggtgaaggcgcttattcaggatatccgtgattgttcaggacccttaagtgctcttactgaactgaatactaaagtaaaagagaaatttcaacagttgcgtcacagaatacagccagttctctatcaaagggcatttatttggactgcttccacannnnnnnnnaagctaacttattccctgacagacttttcttcaactcagcatgacttcaactctccaactacacctgttaccttcagtgacctgggagcagttggctaaagagcaagacaaagaatcngagaaaacacttctactcccagaagtggagaatcacaaaagcagatgctcagcaatcaggcctcatggaggaaagctaattttcacctgcaaaatttgcattcccaaaattcttaaaaaaaagcaaaatttccttcggggggggaaattctttaggggnnnnnnnnnnnnnnnnnnnnnnnnnnnnnnnnnnnnnnnnnctccgggaaacctctccttgaaaaacctctctgggggaaaccacaagagaaggaggcccccccagggggcccc

SEQ ID NO: 353864 - DNA, 1165 bp, Homo Sapiens
ggggtccccaacatggcggctccccaagacgtccacgtccggatctgtaaccaagagattgtcaaatttgacctggaggtgaaggcgcttattcaggatatccgtgattgttcaggacccttaagtgctcttactgaactgaatactaaagtaaaagagaaatttcaacagttgcgtcacagaatacaggacctggagcagttggctaaagagcaagacaaagaatcagagaaacaacttctactccaggaagtggagaatcacaaaaagcagatgctcagcaatcaggcctcatggaggaaagctaatctcacctgcaaaattgcaatcgacaatctagagaaagcagaacttcttcagggaggagatctcttaaggcaaaggaaaaccaccaaagagagcctggcccagacatccagtaccatcactgagagcctcatggggatcagcaggatgatggcccagcaggtccagcagagcgaggaggccatgcagtctctagtcacttcttcacgaacgatcctggatgcaaatgaagaatttaagtccatgtcgggcaccatccagctgggccggaagcttatcacaaaatacaatcgccgggagctgacggacaagcttctcatcttccttgcgctagccctgtttcttgctacggtcctctatattgtgaaaaagcggctctttccatttttgtgagatcccaaaggtgccagttctggccctttcagctcctgtttcaggatctgtcctggttcctgagctctaggctgctaagctgagccacacacccctccgtttgcaccagttgcctgcaggttggatggaacacagtgccccacttttctgcaagtagctggcttgtaaagggtgaacagagccatgggaggaaggtctggcattgggatgccgccctggggacatacgaaccgcctccttccaccattgtgcactatgggaggccgctgctgcgtggagcacttaaagtccagcctccaggaccggatgcccctcctgtctcccgctcccatcgtgcccttaaatgccagatctggtggagggaagagagaagaggtaggaagaaaggtgatgaaaactcctggtcattccttgaataaacttgattttatttaatagaaaaaaatgtatttgataatgtaagata

SEQ ID NO: 353865 - DNA, 814 bp, Homo Sapiens; identical to SEQ ID NO: 13834
  misc_feature (507)..(507): n is a, c, g, or t
  misc_feature (512)..(512): n is a, c, g, or t
  misc_feature (514)..(514): n is a, c, g, or t
  misc_feature (516)..(516): n is a, c, g, or t
  misc_feature (518)..(518): n is a, c, g, or t
  misc_feature (521)..(521): n is a, c, g, or t
  misc_feature (523)..(526): n is a, c, g, or t
  misc_feature (528)..(529): n is a, c, g, or t
  misc_feature (532)..(535): n is a, c, g, or t
  misc_feature (689)..(697): n is a, c, g, or t

SEQ ID NO: 353866 - DNA, 440 bp, Homo Sapiens
ggggagggcagggcctccgtctccgacgctgacttcctcagcgcagccagcactgtctccggtggcaagtcgaccagctcctcccacacggattctgtgtagaaatccacggacaaggctttgcttttcgaagaaaactgaaaatacagcaaagttacaagaaattgctacggaaggaaaagaaggctcaaacgtcactggaatctcaattcacagatcgatacccagataatctgaaacatctctatttagctgaagaggaaagacataggaagcaagcaagaaaagtcgaccatcctttgtcagaacaagttcaccagccgttgcttgaagaacagtgtagcattgacgagcctttatttgaagatcagtgtagctttgaccagcctcagccagaagaacaatgtattaaaacagtaaactcctttacaattccaaag

SEQ ID NO: 353867 - DNA, 463 bp, Homo Sapiens
tggaccggtccggaattcccgggatggcgtgtcctggagtggaggtggaggtggaggcaaggagctgaaattctgcgtagccggagtgagaccgctctgcaaaccactgcgtgctttgcagagtgattatcagcacagttccctgccctggataaggaacagctacagtcgctgttaaatgtgcctgaaaagcaatttgcaatctttgcattaggcatttcggccgtggaaccccaggctcggaggactgggtgtgagcgctgcccgggagaggctgacctgccgggaccggagtgcccggggacgctgtgcccccacttgcccaacgtgcggaatcggctaagcgcgtcggcctgcgcggggcacaagggacgacgcccgcctttctctctccgagaaggatccccaaacctcactctcttcactcctccccgttaaaaaaccccccaaccccccaaataac

SEQ ID NO: 353868 - DNA, 938 bp, Homo Sapiens
  misc_feature (13)..(13): n is a, c, g, or t
gatatgacacgtngtaaaaagcggcggtaccggccggaatcccgggatatcgtcgacccacgcgtccgaaaagaaaaagattctgtaactctcttttagcaccaaattatgtttatctgctggatattttatatgaacaggttaatttagatgcactaaagcaaaggtaggcaaactacaaccatgagtcaaacatggccacacccattcatttgctatgtctaagctggttttgcactacaactgcagagttgaatagatgcagcagatcctttacagaaaaagttttctgacctcaattctaaagtaatgtagtagggagctggaggactttctttccctttatggtaattttttgagctacaaaagagccttgcagaaatgggtgaagggatcaatcttttaaagaataaatgctatatattaggaaaataaaaaatattctagagctcatagttaacaagtacttcgagcgaaaacatgctagttgttatgcaggggattctgtattccaaatggatacaatccgacatatataaaagaagacagattcttaatctattgactcttatttagcaaatgcaacagacaagaatatccaacttgatatttataaaaggtagactttttccaaaagtgtataagctcaaagaaaaaatatgcaacctgttgcaagttaatatagtactatgtaatatatattattgtgtatttatgattagccatcataaatgccctatgtgcttggcctttaagagataatcacaaaatattgatattaaattatacaaatttgttgcagaagtgcctgtgagagaaatcttcaaaagacaaagcctggtcaaataataataattttaatgtcaatgattttttttgtctgactcatctgagttatatttagttttcaagtggcaataaatttatctaccttcttt

SEQ ID NO: 353869 - DNA, 1488 bp, Homo Sapiens
ggtccggaattccttgcatgcatagctgcgggacctgtactcgtctcccccgacgcagaccatggagagcgcgctggcggtgccccggctgcccccgcatgatccaggacgccggtgctgtcggtggtggacatgcacacgggcggcgagcccttgcgtatcgtgctggcggggtgtccggaggtgtctgggcccaccctgctggccaagcggcgctacatgcgccagcaccttgaccacgtgcggcgacggctcatgttcgagccccgagggcaccgggacatgtacggggcggtcctagtcccgagcgagctgccggacgcgcatctgggcgtcctgttcctgcacaacgagggctacagctccatgtgcggccacgcagtgctggcgctgggccgcttcgctttggacttcgggcttgtgccggcgccccctgcgggcacccgcgaggcccgcgtcaatatccactgcccctgcgggctggtgaccgccttcgtggcatgcgaggacggccgcagccacggaccggtgcgcttccacagcgtcccggccttcgtgctggccacagatctcatggtggatgttcctggacatggaaaggtgatggtggacattgcatatggcggtgcattttatgcatttgttactgctgaaaagttaggactagacatttgttctgcaaagaccagggaccttgtggatgcagcgagtgcagtgacagaggcagtgaaagctcagtttaaaattaatcatcctgatagtgaagaccttgcctttttatatggaactatattaacagatggaaaagatgcttataccaaggaaccaaccaccaacatttgtgtttttgcagatgaacaggttgacagaagtcccactggctcaggagtgacagcccgaattgccttacagtatcacaaagggcttctggaactgaaccagatgagagccttcaaaagcagtgcaactggctcagtattcacagggaaagcctgtgagggcaagcgaaatgtggtgatttaaaagctgttatagttggaagtatcaggacaagcccattacacggggtacagcaagctttataatagaaagatgacgaaccattgacggatggatttcttctcaagtgacttcttccatgattttaagggctttctttttaaagtaatcattatccttaaggactgttttctctaaattatatgaaaacaaataaattatacatataaactaactctcattctttgtaaaaatactaccctgtggctaaatataaagtcattatacctcgtatttgcaactgtatttgtataaatatcacttatgtctagcatacaaaatgccagaaattcagagtctttttctagtgattaacgtatcaggtaaattaaaacagtagttacttttaaaatattgctctatagtaattactattaatatcatattttgtattaaaggctcttcgaataatatgtggaatttaactga

SEQ ID NO: 353870 - DNA, 726 bp, Homo Sapiens
gtttccttaaggatctctacatcatatagtgatctgaaacatgtgaaaccatttatgttgtatgcaaaaatttggaacatactgtcttcaaaatctgaaatggaacataaaaataacaacatacatttattggatacttcactgtgcatcagtttccaagctaagcacttgatacatgccatctcatttaatcctcacaagaatcctacaaggtcagtactgtgctgttattatcgtttttcaatagatgataaaacggagaattggagaagttaggtaatttaccagaggttagttagtgagtagcagatccaggtcatgaaggtgggtctctgaacagaccacatgctgttaagccattatattatattgctgtcagacaaagcaaaaggtcaatgaggctttatattataggagctgttatgagaagaatctgggattgcaatgtccccccaaatagagagggagccgagagaccaaagaatgactcagacaagtccaggaagcgaaatgtggtgattttaaagctgttatagtggaagtataaggacaagcccattacacgggtacagcaagctttataatagaagatgacgacccattgagggatggatttcttctcaagtgacttcttccatgattttaagggctttctttttaaagtaatcattatccttaaggactgttttctctaaattatatgaaaacaaataaattatacatata

SEQ ID NO: 353871 - DNA, 431 bp, Homo Sapiens
  misc_feature (119)..(175): n is a, c, g, or t
ggatgtcacaagtaatataagtttaaggataaaagcagaaaagtgaaagatgcaagcaggcaaaacacagaatacatttgaaatatatgatcctcgaaatgcagtgaataaaataacgnnnnnnnnnnnnnnnnnnnnnnnnnnnnnnnnnnnnnnnnnnnnnnnnnnnnnnnnnatgataagcagaacttgctggaaatgtgcatacaatggacttgtaacaaccattgttaccaacagcatcaattaggggtgtgaaaagaagtatttttgaacctgttgtctggttttgaaaaacaattatcttgttttgcaaattgtggaatgatgtaagcaaatgcttttggttactggtacatgtgttttttcctagctgaccttttatattggtgaattcttaaataaagataacttaccggccacatcactgt

SEQ ID NO: 353872 - DNA, 1674 bp, Homo Sapiens
  misc_feature (559)..(559): n is a, c, g, or t
tttgctaggtgctagagatacaaaaaataaaaactgttcttgctgataaaaaattcagaaattagaacaaagttttaagagtatgttttaaatattccagaaaagtcacatatttggtgtttaaataggaattcataccagggacaaagcagaaaatggattttcatgtgttgcttaaatgtactattttcctttccatttgaaataatagaccttgaagctgatgatgttaagggcagtgtaccactgtcttcaagccctcctgctacacatttcccagatgaaactgaaattacaaacccagttcctaaaaagaatgtgacagtgaagaagacagcagcaaaaagtcagtcttccacctccactaccggtgccaaaaaaagggctgccccaaaaggaactaaaagggatccagctttgaattctggtgtctctcaaaagcctgatcctgccaaaaccaagaatcgccgcaaaaggaagccatccacttctgatgattctgactctaattttgagaaaattgtttcgaaagcagtcacaagcaagaaatccaaggggngagagtgatgacttccatatggactttgactcagctgtggctcctcgggcaaaatctgtacgggcaaagaaacctataaagtacctggaagagtcagatgaagatgatctgttttaaaatgtgaggcgattattttaagtaattatcttaccaagcccaagactggttttaaagttacctgaagctcttaacttcctcccctctgaatttagtttgggggaaggtgtttttagtacaagacatcaaagtgaagtaaagcccaagtgttctttagctttttataatactgtctaaatagtgaccatctcatgggcattgttttcttctctgctttgtctgtgttttgagtctgctttcttttgtctttaaaacctgatttttaagttcttctgaactgtagaaatagctatctgatcacttcagcgtaaagcagtgtgtttattaaccatccactaagctaaaactagagcagtttgatttaaaagtgtcactcttcctccttttctactttcagtagatatgagatagagcataattatctgttttatcttagttttatacataatttaccatcagatagaactttatggttctagtacagatactctactacactcagcctcttatgtgccaagtttttctttaagcaatgagaaattgctcatgttcttcatcttctcaaatcatcagaggccgaagaaaaacactttggctgtgtctataacttgacacagtcaatagaatgaagaaaattagagtagttatgtgattatttcagctcttgacctgtcccctctggctgcctctgagtctgaatctcccaaagagagaaaccaatttctaagaggactggattgcagaagactcggggacaacatttgatccaagatcttaaatgttatattgataaccatgctcagcaatgagctattagattcattttgggaaatctccataatttcaatttgtaaactttgttaagacctgtctacattgttatatgtgtgtgacttgagtaatgttatcaacgtttttgtaaatatttactatgtttttctattagctaaattccaacaattttgtactttaataaaatgttctaaacattgcaaccc

SEQ ID NO: 353873 - DNA, 391 bp, Homo Sapiens
tgctgacaccgccgcacaccgccgcacaccgccgctgcctcagtcatgccgaagcacgaggttctctgtggacatgacctgtggaggctgtgctgaagctgtctctcgggtcctcaataagcttggaggagttaagtatgacattgacctgcccaacaagaaggtctgcattgaatctgagcacagcatggacactctgcttgcaaccctgaagaaaacaggaaagactgtttcctaccttggccttgagtagcaggggcctggtccccacagcccacaggatggaccaaagggggcagctgagttggagaatggcaacgaagaccatttggcccacatagcctagactgtttactattttgcccttttcagaagaaaattgtctgtccat

SEQ ID NO: 353874 - DNA, 971 bp, Homo Sapiens
  misc_feature (508)..(508): n is a, c, g, or t
  misc_feature (510)..(510): n is a, c, g, or t
  misc_feature (519)..(519): n is a, c, g, or t
  misc_feature (521)..(521): n is a, c, g, or t
  misc_feature (523)..(524): n is a, c, g, or t
agcggagcgcgcactctcggaagcgcagccgaacccgccctccgaatccagagaggcgctgctgacaccgccgccacaccgccgccacaccgccgctgcctcagtcatgccgaagcacgagttctctgtggacatgacctgtggaggctgtgctgaagctgtctctcgggtcctcaataagcttggaggagttaagtatgacattgacctgcccaacaagaaggtctgcattgaatctgagcacagcatggacactctgcttgcaaccctgaagaaaacaggaaagactgtttcctaccttggccttgagtagcaggggcctggtccccacagcccacaggatggaccaaagggggcaggatgctgatcctcccgctggcttccagacagacctgggacttggcagtcatgccgggtgatggtgttcctgcggagaccctcagttgtcctattccttcctagcttccctgcaataaaatcaagctgcttttgttggaaaaaaaaaaantnacaaaaaananannccttgtcggcgcgccctcggccttcgaaaaagctttctaagaccgttcgtttgggcgcgcggggcccagaaggtgaagtgaaacatgtccatagcctggtttccctaaggaaaaccctgggccaaggactaaagggcttggaattccccccccaaataaaaaaccgcccgggggggcaaacccaagccgtttctgaaacacaaccccgaatgggaagttcctggagggccatttactggggaatcctaaccaaacagggaagctcccaagcggcagagctccgaaataccacaattttacggcccccgggcccttgggcccactttattttcgccaggaacccggtgtgggtagaaatccaattaaaaaggcaattttctggccccgaaaaattgggagagacccccacttccaccacaaaaccggggccattgggattaaaaccct

SEQ ID NO: 353875 - DNA, 1040 bp, Homo Sapiens
ccactctcgcccgtggctgcttcctccatcctggtattttttggagcttccatcctggttcttccaaagtgcccggacccaaaacaggaaagtgttgcggagataggaacatgggagagaaacaatctgggtaacatgaaagtgatgctggttgctaagggaaggcaacttgattctgtgggaagggctgtagctgatccatccgttgtctagatttgagtatgagcgacagtggaagaggattctgacacagtaacagtagaaactgtgaactctgtgactttgactcaggacacagaagggaatctcattcttcactgccctcagaatgaagcggatgaaatagactcagaagaaagtattgaacctccacataaaaggctttgtttgtcctctgaggatgatcagagtattgatgattctactccttgcatatcagttgttgcacttccactttcagaaaatgatcagagctttgaagtgaccatgactgcgaccacagaagtagcagatgatgaggttactgaggggactgtgacacagatacagattttgcagaatgagcaactagatgaaatatctcccttgggtaacgaggaagtttcagcagttagccaagcatggtttacaactaaagaagataaggattctctgactaataaaggacataaatggaagcaggggatgtggtccaaggaagaaattgatattttgatgaacaatattgaacgctatcttaaggcacgcggaataaaagatgctacagaaatcatctttgagatgtcaaaagacgaaagaaaagatttctacaggactatagcatggggtctgaaccggcctttgtttgcagtttatagaagagtgcttcgcatgtatgatgacagaaaccatgtgggaaaatatacacctgaagaaattgagaagctcaaggaacaactgtggaccccaaaaaaaaggccacactttcaaactttggctctcaaagtattgctgcccacaacttccaaaccagtcaaatgggaagaagaagaatgaagaat

SEQ ID NO: 353876 - DNA, 1060 bp, Homo Sapiens
  misc_feature (74)..(124): n is a, c, g, or t
  misc_feature (633)..(647): n is a, c, g, or t
  misc_feature (909)..(919): n is a, c, g, or t
gctaacatcatttctcctcagtaagttctattctttgaatgagagacaagcaggcacgattttgtaatagtttnnnnnnnnnnnnnnnnnnnnnnnnnnnnnnnnnnnnnnnnnnnnnnnnnnncttccccaaatgataaaaatatctatgactactgagaactaattttgatataatttatctgcatactgttttcaataaactccctatacattatacataaggtatattttatacctattttatgttatacatttaatattttaggtttccatttgattaacgaaaacattatcaactagtaagccataataaactttatacattctcattattccatagtaatgaaagtgactactggcataggtaatccagaagtcattcatatcaaatctttaaatataaaatctgtagagatttacttcttaaatgtcttatcaaagctaattctgtttatatttcctgggcctatagcacctagactagtgaagaaagtattcccacagtctgctgcatgcaagccaggctggaattaacaactatgaatttctaaagtaggaacaatcaatagtttataaaattaatacaaatacatataatatataaaagcaacagactatgctacattagcnnnnnnnnnnnnnnnttcccattcaagtaattacttccttattttctctttttaactattcccaaataagaaacaaaattaggtgtgtaaaacaaaacctaatattcttgtataaacataccaggactgttattttatacagacaagtactgttacaagaccaaacacaaactgctaatggattaaaatttaattaaaatgtattagatatttaatatgacatagaaaaagtcaatatctgattttccttatgttttaggaaattatctcagggccnnnnnnnnnnngagataggatctcactccgttgcccaggctgaagtgctgtgcacagaacagctcactgcagcctctacctctcaggctcaagcgatcctgccacctcatcctctcaagtaactgggactacaggcaaagaccaacacacct

SEQ ID NO: 353877 - DNA, 713 bp, Homo Sapiens
  misc_feature (441)..(457): n is a, c, g, or t
atatgcatacttccatagagaagtgactgcttcaacagttgtgtgttttggtaaaagttctgaaagtatgcatatttttaaagtaattaggcttttaaatagtggagtcttagactatcagatttttattactttttttccttcaaaaaaacacgtcaatataatgcaaaatgaaaatcaagggtatatggcatatcattctttttaaaaggtggtttcttggtttttttccccctataggacacactaatttatttaagccataatctcttgacattaaacttttaagttcactctgtctgtaaagtatactcagattccctgctgaagtgcaatgactatgctgaaaaacttagaaacagtatgagtaaatttcacacaattactaatctcctaagaatgtacaatgttatcagttaggaaacaattgtgcgaaagtcnnnnnnnnnnnnnnnnnaacttggtgtgggtggaatagcaagtttctgatctaaaacaagtaatgcattgcttctataaaggtgacaacatgtaaggcagttcaaagaatgctgactaaccaaacgaaatgcagttattggattatcttgctattcatatcagcttaacttgttattacgcattgctcttaaatctgtacagcactccatttacacagagtaaccccactcttgattaatctgttctaaagtgccagtattatttacactttc

SEQ ID NO: 353878 - DNA, 1645 bp, Homo Sapiens
  misc_feature (1168)..(1184): n is a, c, g, or t
  misc_feature (1315)..(1316): n is a, c, g, or t
  misc_feature (1477)..(1491): n is a, c, g, or t
tgcagtactatcccggcgttatggtagcgaggctgggtggcgaattcggcacgagggggtggagctgccgcgctgtccgcgttatctcctcccggtgagaacgaaccgcagtgtccaccggcgaggagccagccctgtcccggtcagagaaagacgacgaggatacctgggagcgggcggcggccgggctgggccgcgccggtgcgggctggcgactctgctcctccgcttgctgctgtctctgggaactgggtgccagcgctgaggggcttccagcggacagggacccccttccccggctcccctgcccaccctgccggggagggcggaagatgccggtgaagaagaagagaaaatcccctggggtggcagcagcagtagcggaagacggaggcctcaaaaagtgtaaaatctccagctattgcagatcccaaccccctgctagactaataagtggagaggaacatttttcaagcaagaagtgcctggcttggttttatgaatatgcaggtcctgatgaagttgtagggccagaaggaatggaaaaattttgtgaagacattggtgttgaacctgaaaatattattatgttagttttagcgtggaaattggaggctgaaagcatgggattttttaccaaggaagaatggttaaagggaatgacttcattacagtgtgactgcacagaaaagttacaaaacaaatttgactttttgcgctcacagttgaatgatatttcgtcatttaagaatatctacagatatgcctttgattttgcaagggataaagatcagagaagccttgatattgatactgctaaatctatgttagctcttctgcttgggaggacatggccactgttttcagtattttaccagtacctggagcaatcaaagtatcgtgttatgaacaaagatcaatggtacaatgtattagaattcagcagaacagtccatgctgatcttagtaactatgatgaagatggtgcttggcctgttcttcttgatgaatttgttgagtggcaaaaagtccgtcagacatcatagcaagaactatgtgaagaaaatgcaaacctttcaattcccacgtgtatacaagctaatgtgatgagggggaaaaaaatccaacgggtgcattttcattcatatgaaagacttctcatagtacnnnnnnnnnnnnnnnnnaaaggaggtttttcttgttacatgtgatgggcattgagccacacctcttcttagactgaatattgaagtttttgttttgagttatgtttataacatttatttcagaacaataaagattcagatttgtgacnncgaaaaattatctttcaaccaaaaacaacgccggattttccccggcataaaagagctttgcccccagcacctagaccatagtaataactaccacagtacgtccaacaaccctccccggaaggattataaccaaaaaggtaaggtgtggaaatttggggggnnnnnnnnnnnnnnnacaaaaaaaattttttttaacaccctttcgttgtggggggccggggcccccccacaaagaaaaaaaacaccagtggcccatcgcgtgtgtctctccacaagaaaaaccccgcgggatataaaacaacagggggtggcgttttcccccacccaat

SEQ ID NO: 353879 - DNA, 1075 bp, Homo Sapiens
  misc_feature (45)..(45): n is a, c, g, or t
  misc_feature (57)..(89): n is a, c, g, or t
acacctccccggggcgaagtgctttgttttattccgtccggggtntggcggcgcatnnnnnnnnnnnnnnnnnnnnnnnnnnnnnnnnnatcaggccaaatcggcgagctcgaattcgtcgagagcggaggctgagcctcttgcttgctgtgactggtggagctgccgcgctgtccgcgttatctcctcccggtgagaacgaaccgcagtgtccaccggcgaggagccagccctgtcccggtcagagaaagacgacgaggatacctgggagcgggcggcggccgggctgggccgcgccggtgcgggctggcgactctgctcctccgcttgctgctgtctctgggaactgggtgccagcgctgaggggcttccagcggacagggacccccttccccggctcccctgcccaccctgccggggagggcggaagatgccggtgaagaagaagagaaaatcccctggggtggcagcagcagtagcggaagacggaggcctcaaaaagtgtaaaatctccagctattgcagatcccaaccccctgctagactaataagtggagaggaacatttttcaagcaagaagtgcctggcttggttttatgaatatgcaggtcctgatgaagttgtagggccagaaggaatggaaaaattttgtgaagacattggtgttgaacctgaaaatattattatgttagttttagcgtggaaattggaggctgaaagcatgggattttttaccaaggaagaatggttaaagggaatgacttcattacagtgtgactgcacagaaaagttacaaaacaaattgacttttggcgctcacagttgaatgatatttcgtcatttaagaatatctacagatatgcctttgattttgccaggagtaaagatcaggagaaagccttgaatatttgatactggtaaatctatgttagctcctctgcttggggggggcaactggcccctgttttcagtattttaccagtacccggagccatcccagtgtcgggttttgaacacacggttcctggccccggtttgaaattcgcgaaaggcccgggggcttgacctgatgaag

SEQ ID NO: 353880 - DNA, 671 bp, Homo Sapiens
agataagcaagaccacaatggacaaaaatataaaatcctattggtaaaccttaaagaagacccaaatggaaagagaggtaaaccatgttcatgaatcagaaaactcaatattgtaaagacgtcaattttcccaaaactgattgatagctataataaattcccaaactatcaagtgcatcattgttgttggaattgacaagctgattttaaaacttatatgggagaaaaaccttacatgaaaatacaaagagccagaatagtcaagacactctcaaagaagaaaaataaggtggaaaagacttactttatcagatctcaatacataattgataataatgaagacagcttgatattggcacaagaacagacagactaatggaacagaggaaagaatccaacaacagatctacatatgtcatatgtggacatatgacagaggtggcattgcagatgggcgcagaaagttagattacaaacaatgataggacaggtgtgtaaccctatggagagaaaaaaatgaaagtgaatccttacctcacaccatatgcaaaaaaaccaaatctaggtgaattaaaggcctaaatatgaaatttacatttataaggatttcagaatataatctaagagactatcttcatgaccttggagtggaaataatttcagtggttttc

SEQ ID NO: 353881 - DNA, 1025 bp, Homo Sapiens
  misc_feature (607)..(727): n is a, c, g, or t
  misc_feature (946)..(954): n is a, c, g, or t
  misc_feature (971)..(980): n is a, c, g, or t
gttgggtgtggccgcatggcgtgctgtggtgcaggtggccgaagggggcgttactgttgcgactggcatccgcatccggcagatgtagatggaaccaaagtccagaagttacgcgtcacccttgctctacagccaaacatgcaggactctagtaacccgcgaaatgatgggatagcgttgcaaatccttaaaagagtcttaacgaaatcctggctgacattgacttctccactgcaaccatcgagttcattgtctcctaaaccttgccatggaggcctgtggcacctgagccagccattatcatcaccagcacttccatgagctacaagctggacccactgcagtcctcctgacacactgaaatcagagcctgcacacaaagcagcagatgcttcaatgcaaaggtcatttccagctatgtgttccaagattactgaagcaggattctggccttcctgataagaacatgaccagatccagctggtttgcaacaagatgaacttcagtgctgagctttcaccaagtttttctcactacaatctcattgtaatactaaaatctccacccaagatggaggttatctgccattttctgtacatgtgttacnnnnnnnnnnnnnnnnnnnnnnnnnnnnnnnnnnnnnnnnnnnnnnnnnnnnnnnnnnnnnnnnnnnnnnnnnnnnnnnnnnnnnnnnnnnnnnnnnnnnnnnnnnnnnnnnnnnnnnnnnaagaatgccttactccataaggcagaagccatggccttttgggctgactcaacctgactttgtaacttggttaactttctggaaggtataatggctaaaacaaaggggaatttggaataacctccctttggttataaacaactttttcctcgggaaaaaagagaatggggggctatttttccccacaaaacccggaaggggggtttccctccccccccnnnnnnnnnaaaagccactattaaannnnnnnnnnaaacctttcccctgagaaaaaggtttttcccccccttggggcgaa

SEQ ID NO: 353882 - DNA, 998 bp, Homo Sapiens
tctggtgaagatttagtattccaatggtttgtagtgagaaaccttggtgaaagctcagcacggaagttccatcttgtgccaaaccagctgatcctggtcaggttcttatcaggaaggcccagaatcctgcttcagtaatcttgggaacacatagcttgactttgcctcttctgtctaccttccacccccactatcctctggaagagagttgcccggtgttgggagctcaggagtgtcttcagaaatctctccacgaagcttcctgccatctgtcatgaaatctcctcacaagaccacatcaggggaacatctcaaaatcatcctcagaaccctgcaccaatcatgtgctgatgagaagccggtggtgagcagttgtacaagatccacagagcttgatgggaatttgtcaacccccaaatgtttctaaagttgatcttatagatgctgaaaatgtcaccctccctttccggcctcttgtgccttgctcctgtcattcgaagctgcccatctgaagccctctagcctcaacctgaaggttattgccatggatctggcccagatgcacgcctgtcaaggacctggaaatgacctttacattgaagcatctgctgctctgtgtgcaggctctgatttcagtgtgtcaggaggactgcagtgggtccagcttgtagctcatggaagtgctggtgatgataatggctggctcaggtgccacaggcctccatggcaaggtttaggagacaatgaactcgatggttgcagtggagaagtcaatgtcagccaggatttcgttaagactcttttaaggatttgcaacgctatcccatcatttcgcgggttactagagtcctgcatgtttggctgtagagcaagggtgacgcgtaacttctggactttggttccatctacatctgccggatgcggatgccagtcgcaacagtaacgcccccttcggccacctgcaccacagcacgccatgcggccacatcgcaagaatt

SEQ ID NO: 353883 - DNA, 725 bp, Homo Sapiens
  misc_feature (19)..(19): n is a, c, g, or t
gcggccgctgcccgccttnaatcgactgaagaagaaggagtacgtgatggggctggagagtcgagtccggggtctggcagccgagaaccaggagctgcgggccgagaatcgggagctgggcaaacgcgtacaggcactgcaggaggagagtcgctacctacgggcagtcttagccaacgagactggactggctcgcttgctgagccggctgagcggcgtgggactgcggctgaccacctcgctcttcagagactcgcccgccggtgaccacgactacgctctgccggtgggaaagcagaagcaggacctgctggaagaggacgactcggcgggaggagtctgtctccatgtggacaaggataaggtgtcggtggagttctgctcggcgtgcgcccggaaggcgtcgtcttctcttaaaattttcttttttaggtgatttccttcctgccaggctccgttgtaggggttacagaacagtcgttcccgcctcacaacctgtggatacagctgttggggcagaagagacgggaccagctgctggccacatttcctgctgtattttaaaaggtagtatgataaatgatgaaaaagagggaatatcagggcttctgctgatttttatttttagacatgttcataattaacaagtattttccagcactccaaagatgtaagcacattttactgaaaatgtttgggtttctgaattgaaacagatctgctta

SEQ ID NO: 353884 - DNA, 1972 bp, Homo Sapiens
  misc_feature (1041)..(1074): n is a, c, g, or t
  misc_feature (1698)..(1709): n is a, c, g, or t
  misc_feature (1954)..(1954): n is a, c, g, or t
taggtgtttcaggtatgaggataataggaacggtctatatagggagtaacatgttgtaatgtgtcacccattaggagaaggttggagaatgacatacatatgagactcctgcgtgtttagtttaattggagaataagaaatggctaatgtttcttttgaggaccagcagtgattagccctatcactgagattgaataaattgttgaacatctgttatttttgttgtattaaaattttaggttaaatttatatatgtatgattagatattgaaggttgtgaaatgtgaatgagaaacgtgtaaagtgaggcttcacaaagaatcttattctctgtgtttcaaaagtatttgtcctattttaaaataattttttaaattgagtggttctggccacttaaatgacacgattggtactattttcctaaggtgggatttattcccttgaatctattaaccagttgtataaattgaattatggtgtccttcagtgtaagaggcattaagaaattctttgtgaaacatcactgcttgataaagtatatacgtatttagcatccttgtttttctttgtgctaaagtggatacagctgttggggcagaagagacgggaccagctgctggccacatttcctgctttattttaaaaggtagtataagaaatgaggaaaaagaggtaatatcagggcttctgctgttttttatttttaacatgttcataattaaaaagtattttccagcagtccaaagatgtaagttatcttacacataaaatgttttattttgttatttggttatgaaaatggaatccttgtttttgcacaactgtaaatgttttgttgctagataatacgatttgagacctgaattggtctttggtttccagtgcatcacagcatattttgtaaaatcatctactactgcacttgagcatgaatgggtagtagccaaactcacaaattggagtgatgaacctgcttatacctaagggcaggagcaagcccctcacaatgcagctgcatgggtttttagtgcctactgaatnnnnnnnnnnnnnnnnnnnnnnnnnnnnnnnnnnaaccaaaagtagttggaaagattatttgaaatgactaatttgtgctatctttatgaaatatgttaaatgtagcttttttgaaacagaagccttgaattgaaatttaactaatacttgaacattttgtatatatttctttgtatataattttgtgcagtaccaatgacaaaaatatggtgtcataataaaaccaggtttgttgatcttttagttatgggctcaaagaatttattcatctctaacatgatattggaaaataatggatgaaaataggaaaaatgattgttaatgctgactgtgggtcttaaaaggttctggaaagcagtaagttcatttttctaaaaactataacattctgttggagtattttcttccttacgtcaatacttttcctgcattatttgaaattgtgggctggggagaaacagtagtcaaagctttctgaattgagatacattgaaattccaagtgtagatttttagaatgtcattttataaatggcagtttttggaattacttgataagaacttttgaaaatggaaggattagtatggcctatttttaaagctgctttgttaggttccttatgttttattaactgtcttttctcagtttccatttcannnnnnnnnnnnctagtcttggtgacttagtgaatttgtcatcttttacatcaacttcatggtcttgtttttacatggtaaattgcatgtacttaggatctatctaataggggctttaaataaatttggtcatatttatgtgtaaacacattttactgtaaatgtttggggtttctgaaatttaaacagatctgtttatttcagtatgtagtaaacaatatcttaaagtgtccgattcactacttgttaattaaaanagttatgattaaaaaaaa

SEQ ID NO: 353885 - DNA, 908 bp, Homo Sapiens
  misc_feature (71)..(107): n is a, c, g, or t
  misc_feature (269)..(284): n is a, c, g, or t
ctaatctcttctcaaagtacttttttctttaatgaatgtcttaaataaaaacttttttctaaccacaaacnnnnnnnnnnnnnnnnnnnnnnnnnnnnnnnnnnnnngagagttggtcttgctgtttggacccggctggagtgcagtgatattcacaagtgtgatcttagtgcatgagagcttcatattcctgggctcacaatccttctacctcagcctgccaagtagctgtcactacaggtaccagctgctgtgcctggcttccaccnnnnnnnnnnnnnnnnctttaatcagttccttttaaagaccaaagaaaacctgtcctcttgtgtggcctgagttgatctatgaacattattcactatgacccagaaaatcccacgaagtcgtgcatgttagaaagatgaaaccctcatgttcactgtaaactgtgaaggtgctcaagccatcacaggtatgcctatatgaaaagccaccaagtatctgaaatattttcctttacagaaaattatgtgtaccatttcagtcttaaaaagtggaattggtcgctgtacgcaagacagacattggggctggactcaccatcagtggccccgaaaaggtactgaaatttgcttacaagtgcagagttatgctgaacttaagggtatagatgtagattccctggttattgagcacatccagggaaaaggcacccataatgtaccacctgacttacagaactcatgggcagatgaacccatccacaaactcccctgccacatccagatgatgcttagtgaaaagaaacaccttgttccaaaagcagaaaaggaggatgcacggaagaaaaagataccccagaagaaacataaacttaagagacaaacaaattcagccaaaagaaaatgcaaataaaagttcaaaac

SEQ ID NO: 353886 - DNA, 715 bp, Homo Sapiens
  misc_feature (39)..(39): n is a, c, g, or t
  misc_feature (43)..(43): n is a, c, g, or t
  misc_feature (60)..(60): n is a, c, g, or t
  misc_feature (71)..(71): n is a, c, g, or t
  misc_feature (75)..(75): n is a, c, g, or t
  misc_feature (88)..(88): n is a, c, g, or t
  misc_feature (154)..(201): n is a, c, g, or t
cacccaatttcttctttcccacacaccttaatatcactnactntgtgccgggcactagtnatacaaaagantttnacagttgttcagnctgcattttcgtatcatgggctacatgccgagtgctggggcacagagatgaacaagatcggttccnnnnnnnnnnnnnnnnnnnnnnnnnnnnnnnnnnnnnnnnnnnnnnnnctcacagactcccagttgggttgaagaatggttgactgagtttgattcttcctgtaccctcggtcgtctgagctgtgtgcagacaacatccccccaccacccaagagggagggtagctcttccgccaccaggggcaagcacaggtcctggtggccccacgccacatgttagcccccctggagggggcgccagttggagacgggggctgggtgtccctggcccactcccggtcccctgtgctttacctccttgcccttgtgtctcaggtgtggtccctgcctgcttgatgaagttgctctgttcaagcctttggtgggatcatgtgtttgggggcttttaggggacccagctgcactggggcactgcccgtggcctgggtaggacatttcccagcaagggctggaggagttgccgtgccttcagcctgaatcgaatgtcagaaccagccagcggtgcttcaccctcttggggataacttgcttagttttttaataaatgttcctggttggttttc

SEQ ID NO: 353887 - DNA, 596 bp, Homo Sapiens
  misc_feature (371)..(391): n is a, c, g, or t
  misc_feature (596)..(596): n is a, c, g, or t
gctttgcccctggtggcggaagagctaccctccctcttgggtggtggggggatgttgtctgcacacagctcagacgaccggagggtacaggaagaatcaaactcagtcaaccattcttcaacccaactgggagtctgtgaggcctggcacacaggtgctcaataaacacttgtggcatgaagaagtgaaggaaccgatcttgttcatctctgtgccccagcactcggcatgtagcccatgatcgaaaatgcagactgaacaactgtcacactcttttgtatcactagtgcccggcacacagtcagtgctcttcaggtgtgtgggaaagaagccaatgagtgagaagttcccacaccgtctagcagtgaggnnnnnnnnnnnnnnnnnnnnngtaccttgtttactcccattcccatcccatagctcagctccctgcacacagcaggtgctcagtaagtgtaccgaatcaggaacttatctttgtgacatgagtgccaggcacacagtaggtgaccaatatgtgcttgaataaatggatagaagcatcttatttatctcaatattcccagagcctgggctgggcacagtggctcatn

SEQ ID NO: 353888 - DNA, 825 bp, Homo Sapiens
  misc_feature (217)..(217): n is a, c, g, or t
ctctcactgagacagtgatctgggaggattttctggatttttttctggcaaaaagagcatcatttctgactccaagtggaagggaatggataaagaagaaaaatatcagtgagactaccgtgacaccattgcccgttctttcatgaggtttgaagatgtctgcaagacacttctaatttgcaaaaaggaatagcagtttgatcttcggtaaacactntggggcatggaattttaatatagcagtaaatgttttactgtttcttttaaaccattcttgatattgttgtgaaaaacctaactttagcagagagtaaaatttaattcaagattgttcctcgtgcactggagtataatcatttgattttttttcttctcagcgatatggaaattatggcttatgattaaattgcatattccaggctacacaaatttatatttgctcctgtttgatagtgtcatgaaagttcacgaggagaatgcaagaaagaaactaatgctatattataattaagaggaaaactccattaaagaaataagtactgttttaagtggctacttatttgtgtttctgtcttaagtgagtacagttgcctccctggtgattcagcaatgaagttctttgcagctctgagctgtgtcggaatgcgtagacagttgatgaagaaggaatcaatgcaaatggattcatgggcagggagtattaagtaactcagtggaaagtcaggacaagtgttctgtaaactgacgttcacttaccattggacagtttatttacctttacacaagggcacatttaaaattctaggctcttgtgaataatgccca

SEQ ID NO: 353889 - DNA, 545 bp, Homo Sapiens
gcaaatccctgtaggggcatcccaggactcaggtcaccgcggggtgaacccagacctcacattcaggcaatccccaggacgccgatcggctggcactacccactgtcccggccaccccccctggagctcaaaggcttggccctccaactgctccaccctgccggcaaccaggctcaaacctgcagcccgcggatcccctgccccggaagcaaccagattcgcgggaggttacctgactgatccaaggtgatacagctggtaactgatggagatgttggtagtgaaattcatgtacttttagttctttctatggaatctagaggtagaatacatgtacaagaatatcgactaccgtctactcaggtctctgttttatctgtttattcattaactctcagcttttaataggatccaatgagccctctgtggttctgaagaattgccttgagtatatgcagcctcaaaaaaacccacttcctaggctcagtctttgatcaatatttatcattatcaccagttattgttctaataaactctactctgga

SEQ ID NO: 353890 - DNA, 2014 bp, Homo Sapiens
  misc_feature (1447)..(1475): n is a, c, g, or t
  misc_feature (1901)..(1901): n is a, c, g, or t
ggtccggaattcccgggatatctatacgaagcctgcaagagtgacatcaaaaacttctgttccgctgtgcaatatggcaacgctcagattatcgaatgtctgaaagaaaacaagaagcagctaagcacccgctgccaccaaaaagtatttaagctgcaggagacagagatgatggacccagagctagactacaccctcatgagggtctgtaagcagatgataaagaggttctgtccggaagcagattctaaaaccatgttgcagtgcttgaagcaaaataaaaacagtgaattgatggatcccaaatgcaaacagatgataaccaagcgccagatcacccagaacacagattaccgcttaaaccccatgttaagaaaagcctgtaaagctgacattcctaaattctgtcacggtatcctgactaaggccaaggatgattcagaattagaaggacaagtcatctcttgcctgaagctgagatatgctgaccagcgcctgtcttcagactgtgaagaccagatccgaatcattatccaggagtccgccctggactaccgcctggatcctcagctccagctgcactgctcagacgagatctccagtctatgtgctgaagaagcagcagcccaagagcagacaggtcaggtggaggagtgcctcaaggtcaacctgctcaagatcaaaacagaattgtgtaaaaaggaagtgctaaacatgctgaaggaaagcaaagcagacatctttgttgacccggtacttcatactgcttgtgccctggacattaaacaccactgcgcagccatcacccctggccgcgggcgtcaaatgtcctgtctcatggaagcactggaggataagcgggtgaggttacagcccgagtgcaaaaagcgcctcaatgaccggattgagatgtggagttacgcagcaaaggtggccccagcagatggcttctctgatcttgccatgcaagtaatgacgtctccatctaagaactacattctctctgtgatcagtgggagcatctgtatattgttcctgattggcctgatgtgtggacggatcaccaagcgagtgacacgagagctcaaggacaggtagagccaccttgaccaccaaaggaactacctatccagtgcccagtttgtacagccctcttgtatagcatccccactcacctcgctcttctcagaagtgacaccaaccccgtgttagagcattagcagatgtccactgcgttgtcccatccagcctccactcgtgtccatggtgtcctcctcctcctcaccgtgcagcagcagcagctggtcgctggggttactgcctttgtttggcaaacttgggtttacctgcctgtagacaagtctctctcataccaacagaacttccggtacttccagaaccaactcacctgacctgcaactcaaaggcttttttaagaaaaccaccnnnnnnnnnnnnnnnnnnnnnnnnnnnnntgtatatagtaacgcatctcctccaggcttgatttgggcaatggggttatgtctttcatatgactgtgtaaaacaaagacaggacttggaggggaagcacaccacccagtgtgccatgactgaggtgtctcgttcatctctcagaagcaccttggggcctcgccagggccgtggtcttcaccgaggcgtgggtgggcagccgttccccaggctgtgtggggtcctgctttcttctgctgagacagtgacgctttccagtttccaccctaatcagccactgctggtcacagccccacagccatgggtatttctgtggtctcctcgcttcattgaagcaaagcatgagccttcctagacaagggcagctgggggaggggaagggaccggaaagtttgtgaaagttgaacagtccatccatctgcactngagaagctgggatccctgaagtccccggggcaagcaggatccccaggaaaccttccctcctcccaggggcagcacaggaacttcagcccgtggtcttggaaccggccccctgg

SEQ ID NO: 353891 - DNA, 681 bp, Homo Sapiens
ggtgaggtgtctcgttcatctctcagaagcaccttggggcctcgccagggccgtggtcttcaccgaggcgtgggtgggcagccgttccccaggctgtgtggggtcctgctttcttctgctgagacagtgacgctttccagtttccaccctaatcagccactgctggtcacagccccacagccatgggtatttctgtggtctcctcgcttcattgaagcaaagcatgagccttcctagacaagggcagctggggaggggaagggaccggaagtttgtgaagttgaacagtccatccatctgcactgagaggctggatcctgagtcccggggcagcaggatcccaggaaccttcctcctccagggcagcacaggactcagccatgtctggaccggccctgctgaggctacagtcactctggaagctctgcgcttcatcaggaggcaggactgtggcgggaggggtccttgaagatgggtgtggggagcagtgggtcaggaagtgggagccagaggtttgactcactttgctttatttttcaggctacaatacaggtcagagacaatggcttataaaggtttagtgtggtctcaggatgtgacaggcagtccagcctgacctttctgcacactccagacaaacttcccagacaagctcaaccctccgggactcctctagagtac

SEQ ID NO: 353892 - DNA, 325 bp, Homo Sapiens
catcatcatcatcatcacatgctaatacaactcaatattgggacaacaactacaacaacaactactaaaacttgggcctttagagcccagcttcctgagcttctgcacgaagtaagtggaacattcatttcttcctgatttgctaaggattgatcaacctccagcaaaatgtatgattagtgagtgtttcagttggtgcatcaattaaatgagaaccaatcacagaacattgaagctaaaaaggaccagagagcttctaggatgaatctgtcttacagatgagaaaaataaaggctcagagagggaagctaacttaactctgagc

SEQ ID NO: 353893 - DNA, 1004 bp, Homo Sapiens
  misc_feature (322)..(335): n is a, c, g, or t
tttgaccattctcttttagtctatgggaattacagggttgccgctaaaatattcacttgttcatatcgtgtcagagatttcctcttctctggagcttaggtggctcttcacaatccataggcttgaatctgcaacctagtgtaaactgccttgctttccccggttctttcccctgctagcacctgctttctcatccctatctccagtcaaagatgggattgcttaatccaactctggagagggaccaagtcttttctgcccacatctcacacaattgaggtgtctgaacaagcttggggagggtctataaggggtaggctcnnnnnnnnnnnnnncccatttgcagaggcagttttgccaacacaagggctctttcaagccgactttcacaaagagagccggacttgttagttggcttctgtctctttagagccaagaaaatagtaattaagtggcctagatataggaagggcagaataagcacttactccccctgccttccaagatgaagaggagaagcaggccaaccctcaataattgcaagcctgaagagaagtgatcttagagaaagcagagaacagaatggactggatagacatcttgactctattcagcccgtagtctgtgatctggagagtccagttaaggtaacccagatttttgacaaccgccttcctgctgagccaaagttttctcattacccctccactggggaagcagctgaggcccagggccttgctccctgggaaattctcttctctccatctttcggtgcattggccatgttactgtgccaaagtgtcttaattcttgtcccatctattctcagctggccttggaacccacataggagttggtgggggagggatggaatgggtattattcattgtagttgatcctggtgtgtgtattatataaagagacccctccccttattttgtgttttccatccctctcccttaacaggattgaaataaaacatgcttctgttttttttaaaataa

SEQ ID NO: 353894 - DNA, 963 bp, Homo Sapiens
  misc_feature (246)..(262): n is a, c, g, or t
  misc_feature (659)..(667): n is a, c, g, or t
gggaactagcttgaaggatttgacataagagccgctatatgtgaaaaactgtatagtggacatatgtgtaaactgtgtagtaaatctgtaaatgaggaaataatctcaagggcaatgggatatttactgacccgcggaatgtaaagttacagtcttttcacacaacaaaggcttaaccttaacctactcagttgtagagccatttttgtagtcaacctagaaaatgctggaaatgtatttaatagnnnnnnnnnnnnnnnnnggtcatatccatttcagtctttcctatgctctttctctactgctcatttaagttactgttacaaaaaggtgctgctaaatgtaggatgtcttagtcatgttgtactttgggacaatgccacatttttaacatggtctgctatgcattcctgttaaacattcactgtcagctacactgaactgtctaacaaacctggtttaaagtaattcatataaaacaaataaagagctggcttctgcactgtttattagtagtagtattaattgccatgttagaaatgattcatgtagttgagactatattaaatattcaacacttcccagctgcagggcatctttcttggggcaatgctaaatactttatgttcctttagtaatcttcctattatgtctgattnnnnnnnnngatacctccacgtagataaaatattttattcaacgtgagctctagcagaataatctgggtcagttatgagttctggatcaagagtttaatttctgctgcgctgtacttttaactatttgtactttgcttcattatttaaaacatgacacagggttttaaagtaaatgtactcactgttgaacttaagtacttcttctgtttcatagaaatgttaatattaaatgttaaaatatatattaattttccctcacatttccctgattttttcaccttattgcatttttttcttatactgc

SEQ ID NO: 353895 - DNA, 1332 bp, Homo Sapiens
catttgaacagggaaagtttaatgttaagaattattaactactaagtgttataacaaaaagtgaaactcaaaagaatacagcaataacagatatagagtgtctctagggctgaggcagaacatcaaaggtaagaacaaatttgcaggagggtgccacaacttcccctttcgtgccaggtcttagatccaggccttgttggagagggcacagccacaagcccactggatggagatgccactgcagtgctgagctggcagaactcactgaggagccacactctggggtgctagaagctccccatggggagctgatcctggtacagaacttgctgggaagctacccatagggataggggcctttggaactcattgggatgtgcactgctgggtgtcccatgtgctacagaaacaaacacaaagaacatgccagaaccaggaagaaaagccctttcttccagttcctctgcaaccccctctattgataaagctcacagcatgccagctggcaaatagtccagtatcacagacagggcaatgaagcgtagatttgaaactgaggcaataaattgatagctgtcacagatgccagggattagaactgaaaggactttgattatgttattggcaaaatcatccttatgggcagcagatatatcaggtataccagcttgttctcattaatcttttgttaaatctgactacccttctgattttgtcttcaccaagcaatcttattaacttcctatgaagcttagctgtaataagaaaattgcatttgttcagtctggtccatgtgatggttacattactcattaattctcattctgtttttattactgagtttcacgggcttagttattaagagtctaccccaagagataaatctattttttgtatgatgataaaattaggtatatgaggacctaagcccaaaggccagaccctggacctcggcagttcaccaaaggaatccataccatccatccactgaattcttctgggaaactgcttcccaaccttccccaggcatcataccctgatactaccattagccaagcaggccctcttaagtatcttctgcaccaagcaggtgctacattaaaacgggttttgaaaattcatctcaaggaaatcaagctgtctctatttgcagataatatgatcccatgtctagaaaaccctatcgtctcagccccaaagcttcttaagccaagaagcaactacagcaagtctcaggatacaaattaatgtgcaaaatcataagcattcctatatacagagattcctcggacgcgtggtcgacgatatcccggaacttccggccgtaccagc

SEQ ID NO: 353896 - DNA, 813 bp, Homo Sapiens
cctgaactgtatgggcactctcagccctggtttttcaatccccaggtcgggtaggacccctactggcagccagcctctgtttctgggaggatgacatgcagaggaactgagatcgacagtgactagtgaccccttgttgaggggtaagccaggctaggggactgcacaattatacactatttatttatttattctccttggggttggtgtcaggggcgagccaaccccacctctatgccctgagccctggtagtccagagaccccaactctgccctggcttctctggttcttccctgtggaaagcccatcctgagacatcttgctggaaccaaggcaatcctggatgtcctggtactgacccacccgtctgtgaatgtgtccactctcttctgcccccagccatatttggggaggatggacaactacaataggtaagaaaatgcagccggagcctcagtccccagcagagcctgtgtctcaccccctcacaggacagagctgtatctgcatagagctggtctcactgtggcgcaggccccggggggagtgcctgtgctgtcaggaagagggggtgctggtttgagggccaccactgcagttctgctaggtctgcttcctgcccaggaaggtgcctgcacatgagaggagagaaatacacgtctgataagacttcatgaaataataattatagcaaagaacagtttggtggtcttttctcttccactgatttttctgtaatgacattatacctttattacctctttattttattacctctataataaaatgatacctttcatgtacagagcctc

SEQ ID NO: 353897 - DNA, 691 bp, Homo Sapiens
  misc_feature (291)..(303): n is a, c, g, or t
tttaaattttatattttttttccagccaactcaaggccaaaaaaaatttcttaatatagttattatgcgaggggaggggaagcaaaggagcacaggtagtccacagaataagacacaagaaacctcaagctgtgaggtcaatttgtaattaaaagaatactaagattagatgaacacaacactcagaaatactctaggagagctgaaaaagaaggaacagatgttaacaaaacaaattaaggctgctggggaacctgagtccatgttaagcttgggttgactgtaaagaannnnnnnnnnnnnaatgcaagttagacatggagttagagggtcagataaataacgaagagaattaagttagcgatagaaagatctaaggatactagctcctggggcacctagggtgcaaactgacttgtggcagcataagctgatgctgcacaggggacccaagccatgttgctacttgtcacttaaggcaggaagcgcacaaaggaagtgatgaaaggttattagcctgcaacattatttacagcatgagagcctctcctacggttctcaaccttcattaggcactactgtgatctagtgatggttgtaacccattctttaaaggcaaagatgtaagatttacagggaaaagcttcgggttttatcaattcactatcatcaaacacatattgagttggtt

SEQ ID NO: 353898 - DNA, 484 bp, Homo Sapiens
aagtagcacttaagataataaaaacaaacagtaaaatgattccagagtagcacaagccaactataacccctatggtgaaagaaagatgaactcgttacgcctttgaggactgccattgtatcacaattctctaatttagattaaaaatgactattctctacaattgattaaaaaaagcggtttccctgtgtgtgttttcttctggcacaggccctttgcacccttgcagctttttccttttgatatttattaaaagataaaagtggatagaaggacagtttgtctctgtggaaggttattttttggagaagggcaaaaaaggactttccccctcatgtcctctcttggtgacttgtgaagaagaaacactcgattcagagggcgcgtcctgagcctcctgtcccctaccctcagtgtttcctctgggggagatgcatgcaggtgggttgagggtgagagggagatggggaggggagccgctcag

SEQ ID NO: 353899 - DNA, 1830 bp, Homo Sapiens
  misc_feature (74)..(82): n is a, c, g, or t
  misc_feature (698)..(710): n is a, c, g, or t
caatggtaatccaccaaattcttcctaatttttaggattaaaaaaattgactatttctcctacaaattgatttnnnnnnnnncggtttcccccggtgtgtgttttcttctggcacagggccctttgccacccttgcagctttttccttttgatatttattaaaaagataaaagtggatagaaggacagtttgtctctgtggaaggttatttttggagaagggcaaaaaaaggactttccccctcatgtcctctctttggtgacttgtgaagaagaaacactcgattcagagggcgcgtcctgagcctcctgtcccctaccctcagtgtttcctctgggggagatgcatgcaggtgggttgaggttgagagggagatggggaggggagtcggcttcagtaaattgtttttcgttgagatttaggtaattgataagaagtttcagaatgaaatggtcttagaaattcaagtggtgggctcttgtgtttccacgtacgtggtacgtgtcgagacacaccgtgttctcagagagagacaggtgcaataagtgttgttattaagctgattgctgcagaaagtacaaaatagccctcagaggatgaaggaaggccccagcagtagtaaacacatgtgaggataatacaaatcatgtcattgtaaggaagtgcatgtgctataagaaggaaacgtttgtgttgcnnnnnnnnnnnnngcatcagtagaggctagtcctttccatcccagggctatcccatccacacacactgatcctaacagggtgctgagcggggaaggggagctgaggccaagaagcttccagggcatgccgaagaggaagactggagcttgtgttggggctgtaggcgtgacattaggatttgtcaagacagcaaggtacctgttcgtagaaagtcatatggcactttaaaaagtggcagcaggaactggtgctaggtatttggtcagtaaattgtgataaagaactgagctttacttagatgaaatgtgttcaattaaaaaaaccaaaaaggctgggaaagggctatgggcttctaactccagacacctggtatattcagaggtacctactgggatcagagatgccccagcataatggctgattagaaatattatttaggagtatttaggaaacagaaacaaaacccctcaagagactgtcctgccacaaagtcgttttactgcaaggtatatgaaaatattctagactaggacatagcactaaacgtgatctcaaaagcatacaggattgttaggtgctgaatctacctccgttttccctcagggtttatccaattactcgttaaaactgaagaaggaattctagtagcacattaggaattcttttcccaaaaatgagaaataatcaaaagtagtaaaagtagtgtaggattttttccccctttagattggcctccgtggaattgttttcctgttttcttttggatcttaacccaaagaacaaagtagtcaaaccgaaacaacttagaggatagatgcagggaaaaaaatccaaattggaaacaccccaaaacaaactcaaatcatgacagtataaaaagtcatcaacattccagatagctctgggtagaaagggttaaaagttcaaaactttctcaccttagaggtttccatagattatgaagaaaatacatggtgaggttgccttcacagcactgatgtgcggagtggttaaaaaagtgggacatgggcacttatacaatgtcttacaaaaaacatcagagagaaataacaaacaataacaatttcaggcaacaagaccacaggatagcaagttaacaaactttgtaacc

SEQ ID NO: 353900 - DNA, 604 bp, Homo Sapiens
  misc_feature (11)..(11): n is a, c, g, or t
  misc_feature (23)..(23): n is a, c, g, or t
  misc_feature (33)..(33): n is a, c, g, or t
  misc_feature (483)..(509): n is a, c, g, or t
aatcaaccccnacctgcatgcanctccccccangggaaaacactgaagggtagggggaacaggaggcctcgggaacgcgccccctctgaaacgagtgtttccctccctccacaagtcaccccaagagaggaccatgaagggggaaagtcccttttttgccccctcctcccaaaaaataaccctccccacagagacaaactgtcccttcctatcccacttttatccttttaataaatatcaaaaggaaaaagcctgcaagggtgcaaagggcctgtgcccagaagaaaacacacacagggaaaccgctttttttaatcaattgtagagaatagtcatttttaatctaaattagagaattgtgatacaatggcagtcctcaaaggcgtaacgagttcatctttctttcaccataggggttatagttggcttgtgctactctggaatcattttactgtttgtttttattatcttaagtgctaattnnnnnnnnnnnnnnnnnnnnnnnnnnncctgtagtttcattaccttttctgcataatgtcatacaaaaaatgtatttgttttttcgtgctgtgagaattaatgttagagatacgggtatact

SEQ ID NO: 353901 - DNA, 1004 bp, Homo Sapiens
agccagagaagtgtgtcccacccccctaccctggtcctgtgggaaccatgtggtttatccggtgacggctgtggcatcgcctgtgccatcgttacctggtttctggtcctctatgcggagttcgtggtcctctttgtcatgctgattccatctcgagactacgtgtatagcatcatcaacggaattgtgttcaacctgctggccttcttggccctggcctcccactgccgggccatgctgacggaccccggggcagtgcccaaaggaaatgccactaaagaattcatcgagagtttacagttgaagcctgggcaggctggtgtacaagtgccccaaatgcctgcagcatcaagcccgaccgagcccaccactgcagtgtttgtaagcggtgcattcggaagatggaccaccactgtacctgggtcaacaactgtgtaggcgagaacaaccagaagtacttcgtcctgtttacaatgtacatagctctcatttccttgcacgccctcatcatggtgggattccacttcctgcattgctttgaagaagattggacaacctatggactgaacagggaagaaatggcagagactggaatctctcttcatgaaaaaatgcagccccttaacttcagttcgacagagtgcagctccttctctccacccaccacagtgattctccttatcctgctgtgctttgagggcctgctcttcctcattttcacatcagtgatgtttgggacccaggtgcactccatctgcacagatgagacgggaatagaacaattgaaaaaggaagagagaagatgggctaaaaaaacaaaatggagaacatgaaagccggtttttggccacacccttctctctaggctgggccagcccctttgccacgccagaccaagggaaggcagacccgtaccagtatgtggtctgaaggaccccgaccggcatggcgactcagacacaagtccacaccacagcactaccgtcccatccgttctcatgaat

SEQ ID NO: 353902 - DNA, 1241 bp, Homo Sapiens
acggagcgaggcctgggtggcgaattcggcacgagggcgcggcggccgctcctgcagccgcggccgccgccactgccgggagagctcgatgggcttctcctgcgcgccgcccggtgtctggccgagtccagagagccgcggcgcctcgttccgaggagccatcgccgaagcccgaggccgggtcccgggttggggactgcaggggaaggcagcggcggcggcggcgggagccccaccggggtctgggactggggaactgcctccggcttcacgatgccagtatggacagaatagcttatgatgcttatccccacccaccacttccgaaacattgagcggaaaccagaatacctccagccagagaagtgtgtcccacccccctaccctggtcctgtgggaaccatgtggtttatccgtgacggctgtggcatcgcctgtgccatcgttacctggtttctggtcctctatgcggagttcgtggtcctctttgtcatgctgattccatctcgagactacgtgtatagcatcatcaacggaattgtgttcaacctgctggccttcttggccctggcctcccactgccgggccatgctgacggaccccggggcagtgcccaaaggaaatgccactaaagaattcatcgagagtttacagttgaagcctgggcaggtggtgtacaagtgccccaaatgctgcagcatcaagcccgaccgagcccaccactgcagtgtttgtaagcggtgcattcggaagatggaccaccactgtccctgggtcaacaactgtgtaggcgagaacaaccagaagtacttcgtcctgtttacaatgtacatagctctcatttccttgcacgccctcatcatggtgggattccacttcctgcattgctttgaagaagattggacaaagtgcagctcctttctctccacccaccacagtgattctccttatcctgctgtgctttgagggcctgctcttcctcattttcacatcagtgatgtttgggacccacgttgcactccatctgcacagatgagacggctgcagatgatcacccaggaagagaatgcagaatgcccaaagcaaaccatctcagctggtcactgcttctgtgccaagaagggaggccctggcgaggggccagtcaggaaagcagcatggcatcacatgctcatgacccacatgaaggtcccctttagaccttgtgtcaacaaaaatcccattttcctggaaacaactat

SEQ ID NO: 353903 - DNA, 884 bp, Homo Sapiens
  misc_feature (523)..(523): n is a, c, g, or t
  misc_feature (527)..(527): n is a, c, g, or t
  misc_feature (530)..(530): n is a, c, g, or t
  misc_feature (532)..(532): n is a, c, g, or t
  misc_feature (536)..(694): n is a, c, g, or t
  misc_feature (700)..(700): n is a, c, g, or t
  misc_feature (716)..(716): n is a, c, g, or t
aattatcttagggactgatattggtaattatggtcaatttaataatattttggggcatttccttacattgtcttgacaagattaaaatgtctgtgccaaaattttgtattttatttggagacttcttatcaaaagtaatgctgccaaaggaagtctaaggaattagtagtgttcccatcacttgtttggagtgtgctattctaaaagattttgatttcctggaatgacaattatattttaactttggtgggggaaagagttataggaccacagtcttcacttctgatacttgtaaattaatcttttattgcacttgttttgaccattaagctatatgtttagaaatggtcattttacggaaaaattagaaaaattctgataatagtgcagaataaatgaattaatgttttacttaatttatattgaactgtcaatgacaaataaaaattctttttgattattttttgttttcatttaccagaataaaaactaagaattaaaagtttgattacagtcaaaaaancccncancncccnnnnnnnnnnnnnnnnnnnnnnnnnnnnnnnnnnnnnnnnnnnnnnnnnnnnnnnnnnnnnnnnnnnnnnnnnnnnnnnnnnnnnnnnnnnnnnnnnnnnnnnnnnnnnnnnnnnnnnnnnnnnnnnnnnnnnnnnnnnnnnnnnnnnnnnnnnnnnnnaaaaanaaaaacaaagttgtgngccgctcccctcgccccccaagaaaatatctctttcaaccccttttggcgggcgggccgcggccccaccaagagagaagagagaaccccggggataaaccttcgtgttctcaaaaagaacaccaccgccggcacaacacaaagcgggcttgtccttcttcccaccaac

SEQ ID NO: 353904 - DNA, 643 bp, Homo Sapiens
tgttttatgtttttaaaaaaaggcatttgaatgaatgtttgactcaggtttgttaaattaaccttcagtaactgcagtaccaaaaattacactcaactgatgaaaaaaacgaattgtatgatttaggaatcaaaaactaaaataagtggaattatgtatcttttctaaagttaaaaaagtaaaatattttattatgagttattataaaaattggttaattgtataggaagatgacagtatttttttcaagttatcataaaaagtaattcagatgacatttgagaagtaggggaaagggaatcatgttgacagttttagttctgtgaacactaatttgtgtgaagctattaaaatgattgtaaagttgactactgtaaatttcccataattatgtgtgtatatgtgtcatatgtatgtacatgtatatgtctaaaaattactttacacatgtgcctacatagacacaccaagaagtggatgtatataatatagaaagtatatagcaaagtaattttactctgataataaaaattgtttgacatgtattttgttatgaatagtttatcttccaaaagatattttgctctattttaaagtgtagaagaatacactgctaataaataataaaagttttattcaattt

SEQ ID NO: 353905 - DNA, 1131 bp, Homo Sapiens
tgtccattccaatttcacatttattaatgaaaaataatgccttctctacatctattgtgactgtcacagaatcaagcagtaatacaaatatttgctgaaagtaaacacatgatgttaataaagaaaaaaggttcttttcttaagattttgaaaagaacatattcaagaattggaatcctacacaggatgcagaagcaatgctaaggataaaatatcctgactacctttattgacatgatttgtgtttaccagctcattaaaatctatgtttcaaattccctggattttcccaagttccagactggtaaaaagtatttttacatacacatttgatgctcacattacaaacttaatatctataaacttgaaacttgttttgcacaagtctatggctttactacttttcaagacaaaagtcacatattaaaatacaaactactcaaaagcaaatagttgtcaagaatgtggtttacaagacagatcttacagataatacagactatattatgatttatctgtttgaaaacagaaagtagtgtattatactgaattctggtataaggtgcgcaggaaactttacttacaatcctttattttcataaggtaaacaccaaagtatttctcacatatattaccaccagattttttttaaaccaaattccggtttaaaaatcacacactgacaacacagaaatacgaaatgctaggaaaagtctagcatatgaaggaaaaacatgtcttatgcattctaatataattttttacaatctagcataaaggcaaatgcggtttttttaaaaatgcagtccatatacaattatagaaaaaacattagtcaagccacctaatataaccaatttcacagatagcactcatttaatataatgtccaaaaatttccaagtaagtgtctacgtatcagttagaataatgcccacaaggatctccaaactacaaaatatcagcaagtaaatgaaaatcacacatttctctttgaaagactgaagcttgactatgagttaaaaggcaacaactatgaactaactttctttaaaatgacttaaactgcccaatctagagcaatacatgtttcctagctatacatgcaaactggactgtgtggtaaaatgcc

SEQ ID NO: 353906 - DNA, 1728 bp, Homo Sapiens
  misc_feature (1644)..(1644): n is a, c, g, or t
  misc_feature (1704)..(1704): n is a, c, g, or t
  misc_feature (1710)..(1710): n is a, c, g, or t
aattgcggaagtttggtggggagggtcggagctctggtggagagagtgttgtctaaaacaagttccggaagggaggctgcccttcgcggtccgagaaccaccggcctccccagtttgagggctgttaccccgtgcgcgcttcgacgttgctgctgttggctctcctcgcccctcgttcccttgggaaccgcctgggaactccgccatgtcatccacttcgcccaacctccagaaagcgatagatctggctagcaaagcagcgcaagaagacaaggctgggaactacgaagaagcccttcagctctatcagcatgctgtgcagtattttcttcatgtcgttaaatatgaagcacagggtgataaagccaagcaaagtatcagggcaaagtgtacagaatatcttgatagagcagaaaaactaaaggagtacctgaaaaataaagagaaaaaagcacagaagccagtgaaagaaggacagccgagtccagcagatgagaaggggaatgacagtgatggggaaggagaatctgatgatcctgaaaaaaagaaactacagaatcaacttcaaggtgccattgttatagaacgaccaaatgtgaaatggagtgacgttgctggacttgaaggagccaaagaagcactgaaagaggctgtgatactgcctattaaatttcctcatctttttacaggcaagagaacaccttggaggggaatcctattatttgggccgcctggaacaggaaagtcctacttagccaaagctgtagcaacagaagccaacaactcaacatttttttcaatatcttcctctgatcttgtttctaagtggctaggtgaaagtgaaaaactggttaagaatttattccaacttgccagagagaacaagccctccattatcttcattgatgaaattgattctctctgtggttcaagaagtgaaaatgaaagtgaagccgcacgtagaattaagacggagttcctagtgcaaatgcaaggggttggtgtagacaatgatggaattttggttctgggagctacaaatataccctgggttctggattctgccattaggcgaagatttgagaaacgaatttatattcccttgccggaaccccatgcccgagcagcaatgtttaaactgcacctagggaccactcagaacagtctcacggaagcagactttcgggaacttgggaggaaaacagatggttattcaggggcagatataagtatcattgtacgtgatgcccttatgcagcctgttaggaaagtacagtcagctactcattttaaaaaggttcgcggaccttcccgagctgatcctaaccatcttgtagatgatctgctaacaccttgctctccaggtgaccctggtgccattgaaatgacatggatggatgtccctggagataaacttttggagccagttgtttccatgtcggatatgttgcggtcactatctaacacaaaacctacagtcaatgaacatgacttgttgaaattaaagaagtttacagaagattttggtcaagaaggctaagccaaagacaaggaagatgcttaccatatgtattctttctttcatagatatttttgtctatttggatcgcattaattgtttccagtaaaactcttttaccacanggaaaatacacatctcacttcagagttccattaggttttatattgtacttttcctcattnactatntaatactctattaacaaa

SEQ ID NO: 353907 - DNA, 546 bp, Homo Sapiens
  misc_feature (240)..(240): n is a, c, g, or t
gctgttgaaagttgctatagataatgccagagctcaagagaaacaggtccaactggaaaaaactgagctgaagatggattttttaagggaaagagaactaagggaaacacttgagaagcagttggctatggaacaaaagaatagagccatagttcaaaagaggctaaagaaggagaagaaggcaaagagaaaattgcaggaagcacttgagtttgagacgaaacggcgtgaacaagcagnaacagacgctaaaacaggcagcttcaacagatagtctcagggtcttaaatgactctctgaccccagagatagaggctgaccgcagtggcggcagaacagatgctgaaaggacaatacaagatggaagactgtatttgaaaactactgtcatgtactgaatctttcctgttgaagaaatccatgttatagaaaagaactttgcagtcagacattcgtcatgggaaagttcagaaaaaaataaagtccttttaagggaacttcctgaattttgtgtattaatgttctttaaaagtttaagtattctac

SEQ ID NO: 353908 - DNA, 2025 bp, Homo Sapiens
  misc_feature (237)..(237): n is a, c, g, or t
  misc_feature (290)..(290): n is a, c, g, or t
  misc_feature (924)..(924): n is a, c, g, or t
actagcgcgcagttccatccatatatctgcattgccttcatatttacgcacactcatgcatctctactacgattacgtgcctaggtccgtgatagcactatgagaagccgatgactaatctccatcgagcacgacagtcacgctatgactcacgaatctaactcgtactcaacattacgcgactatgagccatagaggtcgatgagatcaggtacacaggtacagccattcacgcanatgccatacctcatgtatgcatcattagattcacatcagagacagcagcatgnagaatgtgctccttccttgttcacagcacacaccagagatcagctctgaggacagacattatcagggcgctgtcatctacaatgttgaatcttgttcatccaagtacccacactggggaggttccctaggaatgctagctgtgttggaagctatctggagacaagttacattctcttactgtagagtttatcagcgttttttcactgctggggttgtgatagaagccatgtcagcaccacacactgcagctctccaaagagtgtgtccaccactccactgtgctcagggaaggcagacctctcctctctctttccaatccctaaagggaattaggagtagtctgaagccttgggaagatgtcattcccgcccctgtatggctggtttagccatggacatgaccagcttttggctgtgaagacctgagcagggttttgccaacagcttgttctagagaaggtttccctttttctgggacattgttggtctcatgttatgcctgtgaaggatttgtccagccttcatgttactctacacaacaacttatctcctgtgtattgccctggttcatgtgatgataatggccttatgataaagccgcctttagtcttccatgttctgatcactgtgtggnggtgggtcaagagcagagttaagatctaccaaactgaaggggtctccagattatcttggaggggacagcaggatggcagagaaacaactgtcaatccagatttgacctcatttgcattgccaccaaggcctcctaggaaaaattgtaggaatttatgggtataatattgtggtctgaatggcgtgaatttttatcccgaggagggggcagttgtgacaacctccagtgcatgtgggaacagcatgaattgggtcccttattcccagggggtgccccatattccccaatactgtaaagcagatgctgtttagcacctgccaaggagccatatgccctgaagttcagcattaggcaggtatctcttaactgtaagacataccacgcccagctggggaccataatttgtacagaaacactggatgtgattaatagggagtaggcgagattatagcaaaccagcagaaatggaactctgctaaatgtgcatccgtgaatgctcccttgaatgtggctgtgcaggattcagggtttgcagaaattctcaggacctcagacctctgtcctatgactaatgttactggcagagcaaataatctaaaggttttggttttgtggattaccatctccgtgctgtgcatctgaaggccagtgctgtgctggcaggaaaatagggactgagaaaaagcagatcctatactatagggactgtagtatctatgacgtagccagccattctttgctcccaaggcaagaagaaagagatgacagagtcaatatagggttgccaaatcggattttctaaaatgagtaggaagttggatttttatgtgcaacagtttcttttaatagctttgttgatatgtgattgccatgcaataattatccatatttggaaagtgttgcacatatataatgtacactcagggaaccaataccataatcatgataatgaacgtatccatcacctgcaaagctacctcatgcccctttacattccctccttgccttccctaagaaaccgttgattcacattttttactttagatttgattgccttttctagaattaacacaattggaatcataaagcatttatactctc

SEQ ID NO: 353909 - DNA, 485 bp, Homo Sapiens
gtcaagaaatttattaacctttataaacactattttcactcaatcattcataaaaaatgatttgtgattaaatctgtaataaaaccatataacgttcatcaatgcattcaataagaccagtttcttccatggaacataataaaccactttaaaacagcagttttcattcatgtcatataaggctgtcaaactaaaagtattccttataatgagttgttacccaagaaatccatctcacttcccgtgatgtggagcctggtgatgtgccctctaagagttgggtctgaaagaagactctgcccctttatggccaccttcccagtctctctcaaacaagtttcacaacaggaaaatatttatgagcagagaaatcaaattcaggaggaactttagattcctttttgtgtcctcctgccaataacttcataaccacaaagttgggtttggcaaactttaaaattctattaacctgaaacatgaacata

SEQ ID NO: 353910 - DNA, 575 bp, Homo Sapiens
tctgtgtctgaatgaagaactggatgaattgtactctagggcatggcttccatgtgtgagactgtctctttgaacaaatgtaccaatgaggaagatcccgcctacagtagccgcttccattgatttcctgcttaccaagtggggagaaacttcctaggcatattccctggatatatgaatgctcaatgaaggatgccaggataggggctgtatagtagggatgtagaatttgggattagctaccgcctttcccacactaataggaacatcgattctccttttcacgtttactgaccgtgtgaatttctcttttgtgaattgtctatgcatgccatttcccattgggctgtttatctttctgttttcaaactgtaacggtcattcagtatattatagatatagacattatatatgtcataagaattataaacatatttcccaatgtagtgattttgtttctggatattttaatttacatgtaaaaggttttaaattttaaaactaatcatttaagtctatcttttcttctgggttttctgttagaaacattctaattttctattgcaaaatttctc

SEQ ID NO: 353911 - DNA, 1331 bp, Homo Sapiens
  misc_feature (558)..(558): n is a, c, g, or t
  misc_feature (747)..(747): n is a, c, g, or t
  misc_feature (886)..(946): n is a, c, g, or t
gcggccgccgcctcagcagcctcctcgtcgtccgcctcgtcttcgtcttcgtcatcgtcctcagcctcttcagggccggccctgctccgggtgggcccgggcttcgacgcggcgctgcaggtctcggccgccatcggcaccaacctgcgccggttccgggccgtgtttggggagagcggcgggggaggcggcagcggagaggatgagcaattcttaggttttggctcagatgaagaagtcagagtgcgaagtcccacaaggtctccttcaggctccatgttggctcaggcagacaagcttccaatgactgacaagagggttgccagcctcctaaaaaaggccaaagctcagctctgcaagattgagaagagtaagagtcttaaacaaaccgaccagcccaaagcacagggtcaagaaagtgactcatcagagacctctgtgcgaggaccccggattaaacatgtctgcagaagagcagctgttgcccttggccgaaaacgagctgcgtttcctgatgacatgcccaccctgagtgccttaccatgggaagaacgaganaagattttgtcttccatggggaatgatgacaagtcatcaatttgctggctcagaagatgctgaacctcttgctccacccatcaaaccaattaaacctgtcactagaaacaaggcaccccaggaacctccagtaaagaaaaggacgtcgatcggaggcggtgtgggcagtgtcccggctgccaggtgccngaggactgtggtgtttgtactaattgcttagataagcccaagtttggtggtcgcaatataaagaagcagtgctgcaagatgagaaaatgtcagaatctacaatggatgccttccaaagcctacctccagaagcaagctnnnnnnnnnnnnnnnnnnnnnnnnnnnnnnnnnnnnnnnnnnnnnnnnnnnnnnnnnnnnngcagtgttgtgaagaacgtggtggactctagtcagaaacctaccccatcagcaagagaggatcctgccccaaagaaaagcagtagtgagcctcctccacgaaagcccgtcgaggaaaagagtgaagaagggaatgtctcggcccctgggcctgaatccaaacaggccaccactccagcttccaggaagtcaagcaagcaggtctcccagccagcactggtcatcccgcctcagccacctactacaggaccgccaagaaaagaagttcccaaaaccactcctagtgagcccaagaaaaagcagcctccaccaccagaatcaggtccagagcagagcaaacagaaaaaagtggctccccgcccaagtatccctgtaaaacaaaaacc

SEQ ID NO: 353912 - DNA, 1046 bp, Homo Sapiens
  misc_feature (77)..(77): n is a, c, g, or t
  misc_feature (79)..(79): n is a, c, g, or t
  misc_feature (85)..(85): n is a, c, g, or t
cctggggagactgcagtacctgtcccaggtcctcaaagagtcgctgaggctgtacccaccagcatggggcacctttngnctgctngaagaggagaccttgattgatggggtcagagtccccagtcaacaccccgctcttgttcagcacctatgtcatggggcggatggacacatactttgaggacccgctgactttcaaccccgatcgcttcggccctggagcacccaagccacggttcacctacttccccttctccctggggccaccgctcctgcatcgggcagcagtttgctcagatggaggtgaaggtggtcatggcaaagctgctgcagaggctggagttccggctggtgcccgggcagcgcttcgggctgcaggagcaggccacactcaagccactggaccccgtgctgtgcaccctgcggccccgcggctggcagcccgcacccccaccacccccctgctgagggggcctccaggcaggacgagactcctcgggcaagggccgtgcccgcccacctctgctgcccacggccacccacccttctcccctgccccgtcccctgggccacccttcacgctggcttccagcgggccctctgccgaccgcctgcttcacacccctcagcgctccctgtcgcctgcggactccatggcccttcctggactggcccttgcccaactcccagccaccaccactgtccctaccactgagcccttgcacaggccacttgctcagacgagacaccctaactcttgctcactccctaaagccctcttcaggggtcacctcctccaagaagccctccttgccaccccccgccggcaggggcccctcctctgtgctccctcggtcacctgtgctacctctaacaccacactgaccacactgtatcgtgagtgtccgttgacgtgaccaattgccctgccaggctgtcagcgcctcaagggtagggtctgcgtgtgatttgtctctgagccccctgtgcccacccagggcccggcacagagtcgatgctcaataaatgtgtgttgactgcatgaa

SEQ ID NO: 353913 - DNA, 283 bp, Homo Sapiens
cagaatgacttgtaacccttcagtggaatgggaaatttctggtatgcaaatagggtggtgttccagacatttgttttattggtggtgtttgggccttgaaacacatttctaatagaatgacatatggcaaagggtatttagatggtcctatgggatcacagaagcccatatgatttaaaatatagataaaataacacaaaattgggtacataagggtttaaccaggctttcctgggttagactaagcctctaacctctgttcctatcctgttcttatgggagg

SEQ ID NO: 353914 - DNA, 538 bp, Homo Sapiens
  misc_feature (338)..(364): n is a, c, g, or t
gcctggggactttcactgatgctcttcctgattctagagcaaaggtgtgggaaggggaaatggaggaatgccctcctgtctgtgtcgttctctgtgccacagctacagatgcagaaggtttctctggatagcacacctctgaatgtaaatcatgataaaatggatatttggaaacttactcctaagctgtgatttagggtgtatttctacttctggactgcctcaatatcaagggctgagacttttgaattttgaatattcgttgggtttcatgttaagaagcctgtggtctaggagtgctattcagtgtttcttttcctgataaacactttgaatannnnnnnnnnnnnnnnnnnnnnnnnnnctgaagctgttcctccttttaaatatttttaatcacattgataaaatctatccttcacccacctctggttctactatagttgatttttattttaaatgtttaattgtatttgattaaacacttaactggattttggaataataaaactctcgtccaatttggcttttaaaaaaa

SEQ ID NO: 353915 - DNA, 785 bp, Homo Sapiens
ctaaataaaatctttttattctcaattttatcatagttacagtattatcattgtcaggttgctttctgaacaccaaatcaaaacacatcttaagtaagtataataagctttgttcagagtgtactaaattagaatttttctaactcagaagagtaacaaaggtccacttattgctattcatctgcccattttcaccatttaaagggtccttgccagtgatgcttgtagtcacatgtgcgggacagtgcaatcacagctgcaaaaagtagaggtgacagaaaggcacagaacctccaagatttcccacggccttgtggtgtgaagcagtgtaacttccctgccaggtagaaggacgcaaaggccagaccagcaaatgcaaaggaagaatgtccactggggaagctctttcggccctcattcaccacgtccttatcccctgtacacatcaagtcagaatgggctagcccatcagggaagcagcggtagaagaaatctgggcgtggcctccctacgatcagttttattgtgttggtaaagacgccattcagagccagggcaaggctggcagccaggcaggcttgtctgctgtctcttgtgtctgccttaaacatcggcttggtggggaaatactccgcctccacgtaggggttccggtagagccacatctcctccggctggatgagtctctggaacggggggagcagctccgtcaccaggaaggccgcgaacagcgcgagccgcacgcccacttcggccccaaaggccaccgccgccgccgccttccc

SEQ ID NO: 353916 - DNA, 987 bp, Homo Sapiens
gggaaggcggcggcggcggtggcctttggggccgaagtgggcgtgcggctcgcgctgttcgcggccttcctggtgacggagctgctccccccgttccagagactcatccagccggaggagatgtggctctaccggaacccctacgtggaggcggagtatttccccaccaagccgatgtttgtgcgtggagaaagatcgtctttcctccctccccatgacccggcttcccgcgggcacctgtgcgttttccaccccgagacggcctttgtagggacccactgcccactccgctgctgtgcgctgggttccgcctcctagggctcgagtgtttaagatcctgattgagagaggagggtgtccgagcctctttgggctgagacaacgttttcccgggcgctctgtgcctcagcctgaggtaccggggcccgagccgcacgggcgctgctgttcactggtggcgctgcctggcgccccggttacgcgcactcagagaccttatgttagctccagtgagtcctgctgtgtcacatccctctttcctgtaggagcacgagtgtggctttttttgggattgttttttaacctctgacattctgattcaggttatcgcatttctctctccactgtctctgaatcttcctggccaaatttctcaagaaggcagacacaagagacagcagaccaagcctcgcctgggtgagcgctagcccctttcgggccggtttcttcgtgctgggaacctagaggtcgtgtgggattcagccacggtgagcctgtgtggaggccactgagttctgaattcctaaaggaactctatccccgggggagaggaaaatagcactgcagggacttggttacgccaggctacacggcaaggcagcccgtgcctaatggcctgggtaatttgtagctccaaatgtcttgggcctattaccaaaactctccggtacacaaaagtgtctcctgagagccaattatttgtgcccg

SEQ ID NO: 353917 - DNA, 586 bp, Homo Sapiens
  misc_feature (34)..(34): n is a, c, g, or t
  misc_feature (58)..(58): n is a, c, g, or t
  misc_feature (104)..(104): n is a, c, g, or t
  misc_feature (123)..(123): n is a, c, g, or t
  misc_feature (142)..(142): n is a, c, g, or t
  misc_feature (157)..(157): n is a, c, g, or t
ccccaccaaggccggagtttgttatgcatttccnctccccactgtctctgatcttcgngccaaatttctcaagaaggcagaccccagggaccagcagacaagcntgccctggctgccagcttnccctggctctgaatggcgnctttaccaacacaantaaaactgaatcgtagggaggccacgcccagatttcttctaccgctgcttccctgatgggctagcccattctgacttgatgtgtacaggggataaggacgtggtgaatgagggcccgaaagagcttccccagtggacattcttcctgtatgaatatcatatggactctaccctatgcttgttttcacatcattgaatttaacctagaaagctagtagggatgggaaaatctgactactcttgtttctacaatttggaaaatccccccttctttagtaactccacagtttaacaagtctgagccttgactatttgggtaaatattacagaacagaaaggtagtttaccttcatgagatttgcacatttaattgttatattatttgcctagatcctgcaatcttgtactagcaataaaaatacctttaacg

SEQ ID NO: 353918 - DNA, 421 bp, Homo Sapiens
  misc_feature (71)..(71): n is a, c, g, or t
ggacaggatgtgttccagatccccagaacaggatcccctttgttgctttaggccaacgtgccatgcatccntggagcatgaaacccaggatgggccgccttccagcctcccacagctgtgatgcaagttgaacacatacagagagactgcatctgcactgggtggttttcctgagccttggggagcagaatgcatgaatcccaggtatctgccgatctgtatgtaacaaattcacttcatgtaacttactgtgtgtccgtgagattatctctcactcaactcagacacattggcaaccagtgtgcagtgaacctgcttcacaagcaaggatgtggagaaactattttcgtacattttgtgggaatctgaaatactgcggtcagtatggaaagcagtatcatgggaaacttcctcaactcaa

SEQ ID NO: 353919 - DNA, 899 bp, Homo Sapiens
  misc_feature (237)..(493): n is a, c, g, or t
gccagtaacttataaaaatagccataaacgacgtagtttttgttgttgttgttgttttgagacggcgtctccctctgtcccccaggcgggagtacagtggcaggcactcagctcgctgtaacctccgcctcctgggttcaagtgattctcttgccccagcctccagagtagccaccacgcccggtccaacttagttttttaatactttttaaaattttaagacagggtctctgccannnnnnnnnnnnnnnnnnnnnnnnnnnnnnnnnnnnnnnnnnnnnnnnnnnnnnnnnnnnnnnnnnnnnnnnnnnnnnnnnnnnnnnnnnnnnnnnnnnnnnnnnnnnnnnnnnnnnnnnnnnnnnnnnnnnnnnnnnnnnnnnnnnnnnnnnnnnnnnnnnnnnnnnnnnnnnnnnnnnnnnnnnnnnnnnnnnnnnnnnnnnnnnnnnnnnnnnnnnnnnnnnnnnnnnnnnnnnnnnnnnnnnnnnnnnnnnnnatgaatcaccttgcatgggagataaggacccccacatcaagccctcaggttatttttgaaacacaaatacataaggcccacaagcaggcccattggctgcagacagtggggtcacctgaagaacttttctttgatctgagtaccaacttctcacctaggtcactgggatcctggactacggcactgctccaggcaggcctggttatcctgcttgaggcagcaatcctcttgagcctagtgaaatgcaactggctgtacctcaatgatgttgccctgagattctgccagtcgaggtattacttcaatctcctgagaccagcctctacctccagatccagggaggtcagtgcacatataaatggactagctttattaaaggggatatctgggccaggcgtgcgtgtca

SEQ ID NO: 353920 - DNA, 551 bp, Homo Sapiens
  misc_feature (18)..(18): n is a, c, g, or t
  misc_feature (37)..(37): n is a, c, g, or t
cggttggctagttgagtntgctggaagggaaatgggncggcctcggggggcccgacaggcctggctgccactccgcttccgcgaaaacgactcttgctgtccacatagccaaccgtggactagtagcccaccgtggactagtactagtccacggttggctggataaagcctgctgtggatgtctttatattcaaagattgatgatgccatttgaatatgtgtcctcaccccatctcatgttgaattatattccctaacgttgaaggtggatcctggtctaaggtgattgaatcctgaaggcaaatttctcatgaatggttcagcaccatccccttgctactgtcctcaccatcatgagtgacttctcatgacacctggtcattgaaaactctatgtcacctccctactctgcatgttttcctcttgccatgtgagacaactcactctttctttgccttgcacaaagattgaaagatttctgaggcctcccagaagcagaagccttgtgcttcctgtccaccctgcagaaccgtgaccaaccgtggactagt

SEQ ID NO: 353921 - DNA, 484 bp, Homo Sapiens
gctgggagagacgcgatcgccaaatttcggtctggcgccccttctgcggccgggacccaggcctttcacatcagctctccctccatcttcattcataggtctgcgctggggccgggacgaagcacttggtaacaggcacatcttcctcccgagtgactgcctcctaggaggacatttaggggagggcagaggcctgcagtttggcttcacggctggctatgtggacagcaagagtcgttttcgcggaagcgactggcagccaggcctgtcgggccccccgacgccgccccatttcccttccagcaaactcaactcggcaatccaagcacctagataccagcacaagtcggttaatccctgtcctggaactgagcctccgttggacttctgaactggaaattctgccagctaaccctttccacggattagaaaccttagggcattgggggaatttttagatgggattaattttattaaaaggatt

SEQ ID NO: 353922 - DNA, 483 bp, Homo Sapiens
aacaatcctttaataaaattagtccatctaaaactccccaatgcctaaggttctagtcgtggaagggttagctgcagaattccagttcagaagccaacggaggctcagtccagacagggattaaccgacttgtgctggtatctaggtgcttggattgccgagttgagtttgctggaagggaaatggggcggcgtcggggggcccgacaggcctggctgccagtcggcttccgcgaaaacgactcttgctgtccacatagccagccgtgaagccaaactgcaggcctctgccctcccctaaatgtcctcctaggaggcagtcactcgggaggaagatgtgcctgttaccaagtgcttcgtcccggccccagcgcagacctatgaatgaagatggagggagagctgatgtgaaaggcctgggtcccggccgcagaaggggcgccagaccgaaatcggcgatcgcgtctctacccagccgcaacct

SEQ ID NO: 353923 - DNA, 429 bp, Homo Sapiens
atttcggtctggcgccccttctgcggccgggacccaggcctttcacatcagctctccctccatcttcattcataggtctgcgctggggccgggacgaagcacttggtaacaggcacatcttcctcccgagtgactgcctcctaggaggacatttaggggagggcagaggcctgcagtttggcttcacggctggctatgtggacagcaagagtcgttttcgcggaagcgactggcagccaggcctgtcgggccccccgacggccgccccatttcccttccagcaaactcaacttcggcaatccaagcacctaggataccagcacaagtcggttaatccctgtctgggacttaagcctccgttgggtttttgaacttggaatttttgcagttaaccctttccacgattaggaaccttagggaattggggga

SEQ ID NO: 353924 - DNA, 1601 bp, Homo Sapiens
tgaaacttcagtatgaaatacaaataaaaacaaagtgtagcagcgatggcctcagacagtagatggcagggacaaactaaggctggctctgggccaaagacacgagcctcctggggagcctgtggggccccctccctcctgtgaggctctcgtctggggtgtctgcatttctgatttacatttcatacttgtttggtgccctgtgaaattggcctttcttctttctgcttccagctggtcctgtgtggaggtgaaggacaagggctgcagtgagccaaaagtgaggtgcacagaggtcttgttttcctgaggctgatagagggttccctctagacccggctccaaataagcagggctcacaagccaaaatccagattctcacgggttagggtctggattcctggggaaaccagcccacaaactgctcctgtgaggctgtggggccagcccatttctccatgcaaacaggtgagactccagccccaccagggccttgggaacccgtctcgtctcagagcccaatctcagggagccagaagcccccaggggcttttcctccctctgggaggcaggacaaagaactaggggcacctagaggacgctcccaccccaccaggtgtggtgcaggaagcaacagaggcctggaaaagcattcactgcgtgagaaacggcgcccagggcactcgcagcctcgctcacggcctgcttcttcaggtgctctggcgaggccagggccacatcctgctcccgctccctcctgtgacgtctgagctccctgaaaatggttttctttggtttcctccccgttccctggcctggggtcacaggtttggacagtcagggtggctcagtggtctggtcactggaagcacggggatgtgcccttggcatcaggaggcctggcacggacgcagaggcacccgggggcccggggctggctaatggcccagctgtgggttcttctgcagcagccactccagggtctccaggaggtacgacatgccgtagtgctgggcaatgttccggaatattccgatctgttccatgaagacctgggtgtggatggtgagggcgaagtctcccgcgcagctgcagtacacaggcatgctggtctccttcaccccgcggcacttcaggcagaccaggtcctgcagggtgaaggccatcagcttcttctgtagaacttccaccagcgtcatctcgatggcagaggagtcgtagggcgcctgacagttggagcagagccactgaggcaggaccgccccatcctctgagaaggaagagtctttacacaggtccagctcgcggcagaagttacagctgcggcagatgacctcaggaagcacgtaggagcggcaggggtctcggaactgggcctcctcggagaactcgccgacatccaccaggcgaagcaggtctcggttcagcttattcacctggtttgtgatgttggtgtccagggacagcaccttgcacacgtatttgatgaactccagggcagggttattgagcagcaagtgggaaccggggaggacaggaaacatctctgagagctcagtggagttccgagagcctgtgactttcttctgaatcttctgagc

SEQ ID NO: 353925 - DNA, 743 bp, Homo Sapiens
cacggattcggaaacttcagatacgaaatatcccgccctcatttactgtgggaggtgctggatagtttactagtccagtatggagtggtggagagctgtgagcaagtgaacactgactcggaaactgcagttgtaaatgtaacctattccagtaaggaccaagctagacaagcactagacaaactgaatggatttcagttagagaatttcaccttgaaagtagcctatatccctgatgaaatggccgcccagcaaaaccccttgcagcagccccgaggtcgccgggggcttgggcagaggggctcctcaaggcaggggtctccaggatccgtatccaagcagaaaccatgtgatttgcctctgcgcctgctggttcccacccaatttgttggagccatcataggaaaagaaggtgccaccattcggaacatcaccaaacagacccagtctaaaatcgatgtccaccgtaaagaaaatgcgggggctgctgagaagtcgattactatcctctctactcctgaaggcacctctgcggcttgcaagtctatttctggagattatgcataaggaagctcaagatataaaattcacagaagagatccccttgaagattttagctcataataactttgttggacgtcttattggtaacagaaggaagaaatcttcaaaacaaatttgagcaagacacagacactaaaatcaaggatatctccattgcacggaaattgaggctgtataat

SEQ ID NO: 353926 - DNA, 1654 bp, Homo Sapiens
  misc_feature (532)..(542): n is a, c, g, or t
  misc_feature (1021)..(1036): n is a, c, g, or t
  misc_feature (1245)..(1308): n is a, c, g, or t
ggcctgggtggcgaatttggcacgaggaagatggtttaagtgcaggcccttcagacaagtcacgtcaggcaagagagggctggcctctaacccacaagagggcagatttgtggccaagagaatacctggcatccacccccaggcccaagggatcagtgtggtgccagagaggatctttaagctgggactgtactgaggcttgatgggaagtatgggcagcatgtacttgacacgttaccacccagtccccttgtaaaatctggaatggagcgtttaagctgagcgttagcatcaggtcagcaggcaaagcaaacctcccacaaactgggtgccgtaaggtgggaggtgacacatggagagcttcgtcctggccgagcaggcacccagccccatgtcccccgccagcattctggatgtcagaggagggtgcgtgtgatggcgtcacattcatctgaagcacactgattgattttccacaaggtggcaagtttgatcaaattgaccgcttttcatgagacaaccagatgctgtnnnnnnnnnnncagcactgggatgtgttgaggagggggcagtttgctgtgctctgttctgtctgctgctctcttctgggggccgcacaatgtccgcacacatcacggaggggagaaaggcatcagtaccaaacggaacaacctcttttttctacattgtccatacccggacatgtgaggctctattatcaacaggtggtgagaaaaattctgtttttattcgctttctggtaacttctgtaggccctggctcaaggacttagcatttcgtctcatgtacatctttttcttaagtgttctttgccatttctggaattgtccttggtttttccttagctcataggtcatagatgcagaaatatagtatttaaggcatccgcatccagcatcagatggctttgcatccagaaaaacattgataactcagtttgaagcaccaagcatgtgtaatatggctctatacaatataataaatgcataatgttaagccnnnnnnnnnnnnnnnncctctccaggcgcgtggactccggccataggggcctgtgaactcctttcgaagggggggcccggttaccagcttttgtgttcccctttaagcggagggttaactctcgagcttggcgcgatacaccagggcccatcagcgtgtcccgggtgtggacactggctaactccggttcaacaaattccccaccacaaatatcacgaaaacaannnnnnnnnnnnnnnnnnnnnnnnnnnnnnnnnnnnnnnnnnnnnnnnnnnnnnnnnnnnnnnntggcgcttacaccacgaaacgcgtgaccacacaaaacctttgcctctaaacacgccaacccactagggcacaccgagaaccacacccacccgttggaacgcgcacgaggccgaaccaccaccacaaagcagcgcaaccccaacaccacccacacagcacgacacaccacccgcaactaacaggaacgacacgcacccaaccgctcagcacttacacacacgggctgagtacctggcgacccataccagcgcttggttaaaacggcggcggacaacccaacgtcaccgggacgatccccgggcggcccctccttgacccagggggagaacaaacacagagaaacacc

SEQ ID NO: 353927 - DNA, 922 bp, Homo Sapiens
tgatctagaggatcccagctccaacaagatttacaaggggactgggtgataacgtgtcaagtacatgctgcccatacttcccatcaagcctcagtacagtcccagcttaaagatcctctctggcaccacactgatccctggggcctgggggtggaatgccaggaaacctctttggccacaaatctgccctcttgtgggttagaggccagccctctcttgcttgacgtgacttgtctgaagggcctgcacttaaaccatcttcaggcaaccagggcatctgagcataacctgagcagtaacaacataaatcaagggtcagtaatttggggtggatgagacctagccagccatccagtcagatgctgccgtgcaggtaagcatgattctgaaggcgtggggtaccttttgtcctgtaaagtcagagagaaggctaagaagtgcatggccagaaccccaagaaagtgcagcttggagttttggcttccttccccaccgcttgggttaaaagttcgggtggaatgcacttgccaggacctgctgggcctgaactctgaagtgctgcgctcacattactgtcagtgtatccaggacaaagggcccggagccagaacaggtgccccctacagccgagggtccaaggcaaccctgtgactcagagctggcttcagcaagccagcagagcagctgggaggaagcctcatggcatggctgtggcatcaagtgggtgtctgtgagcagcttggctctcaccactgttttgacctctgggatccttactcttgctgggggtcagatgtcaagaaaatagaaggattattaaagaataattaaataattaaagatcaacaacatgaatttcccaagccaggctgatttccaggtcacagaagtcagagaccctggaagtgatcaactctctttg

SEQ ID NO: 353928 - DNA, 394 bp, Homo Sapiens
ggcaactataaattacattcactagtacacctggaattcttcatagtgtgttcaactaaagaataagcaaacacagcatacatcagtttaaaagaaatcatggtacttcttagagcaatttgcaaaaggggaaaaaagtcttaggctcactccttggaaataaatatcaagtaaccataaaaatattcagccatttttcagttattcggggagttcaggcatggtcccacgcagagcatcagagttcctctttgaaataacccagctttgccaatgacatctcttttctcaactgcataacctcccaaaacatctgatcaacatcctgctgtttcacgagtccctgctgaatgtatcgaatgtatgtaaaaaagttacatacagaagtgatcta

SEQ ID NO: 353929 - DNA, 971 bp, Homo Sapiens
ggcctgggtggcgaattcggcacgaggcagactggctgacatgcatagcacagaaatttcacttcagcagcgactagagtacattgctcgagccattcttagtgccaaaagttccactgccatttcatcaatagctgccgatggtgaatttcttcatgaattagaagaaaaaatggaggttgctaggatccaacttcagatacaggagacactacaaaggcagtattcccatcattcttctgtacaggatgcagtttctcagctggattctgagctgatggacataactaagctttatggggaatttgctgacccatttaaacttgcagagtgcaaacttgcaataattcattgtgccggttattcagaccctatattggtgcagacactttggcaagatatcatagagaaagaattgagtgacagtgtgacattgagctcctcggatagaatgcatgctcttagtctcaagattgttctccttggcaaaatttatgctggcacaccacgcttctttcctttagattttattgtacagtttttagaacagcaggtttgtactttgaactgggatgtgggcttcgtaatacagacaatgaatgaaattggagtaccattacctagactactagaagtttatgatcagttgttcaaatcacgggatccattctggaacagaatgaagaagccactgcaccttttggattgtatacatgtattattgataagatatgttgagaatcccagccaagttttaaattgtgaaaggaaaagattttccaatctctggcctggaagctgtttgtgggttaccttgttgagctccagtctatgagctcgtcagtagcagcacaagccatcactgggaattttcaatctcctcaagctaaattagagcggcttcattaattactgtgatatactttcatccgttttatgatctgtacaataaaaactctgttgggtccaga

SEQ ID NO: 353930 - DNA, 1220 bp, Homo Sapiens
ctttggatggattctctggtgctacagaaaaaaacagtaaatggtccttcaagtgtatcagtgtagaactgagagagaagaggtaaaactgaaaaagaataatgaatttgttttaagattgaagaccttcctgaaataattcagttactttggtactgcctagccctgtaagcattttgcttgaaatttaaccttttaagcaccatatgctaaccatcaccatgtatctgggggcaaaaaagaagccttaactaccattccctcactctgtccccgtcatgacaacaggagctaagtcttgaactgggggttacacagcactcttaagtaggcgtgataagttttgcaaaatgttcagtatctcctcagtgtcttgtccttaggtagagacaggtccagaggctacaaatgcaccccatgtggaagagatttgatccagcagaacagcaatttatgtagtgccctgggggcgggaagtgctaataatgtttctcagctcttgaagaaacccctgacagaattttagtcccactacaggtatcaaaaagattcccagctctaagtcttggatattaataaggctccactgagagggagaaatcccagaatcaagagagcgctcccttcccaagccctgcctccaaaatgaagattgaaggaagttggttattctctcaatacaaaattgttcaggcacaagtcctggtggtggtctgtttgtaactttagtgtatctgggactgtaagtaacacctgtctacgctcttcccatgacctataactcccagagatcacctcttatggccgcctctatcttaaagttgagacccgggacttggaaaccaaagccttgctgtagtaaacaaatccagcagtccttttaaatgctggaggcacacacaggtctgttttcccatgaagcaggaggaaagaggagaaacgagattctagaagatgagcccagcatctaccaaaaagaggatacaatggaaaatcttacagaaacaaatgtctgggatcccactgatgcacagccgccagaccagaagaggagggggagagtgagtgctgaaagcagaaacgaggctctgctgagcaggcacagaacatgtgtttacacgctgttgtgggcccaggagggaagagcgggcacctctggatacagtccacaatgtcaccatggccagtcaccccaagggttgagttgggcactccattgc

SEQ ID NO: 353931 - DNA, 432 bp, Homo Sapiens
  misc_feature (15)..(15): n is a, c, g, or t
  misc_feature (154)..(184): n is a, c, g, or t
agctgaccacaaaantgtattgttaaaaaataattgaaaaccagcagtgatttgggtccccctgaaacctctgtgaatcggaggtgggcccaggagggtgcaggacgcagcagaaatagtcccagaaaggagagacgggtcatgcagcgggctnnnnnnnnnnnnnnnnnnnnnnnnnnnnnnncaccatacatctcccaatgaagtatttattaacaattgtagtgtaagcctgtgataaaatagcacaaaggttctttaaagaagttcacttttaaggcatcagaaaagttaatgtggcaaacattttaattaaaacataagaagtaaattttattttaaactttaggcctctgaatttttccagtaaacacagttcagctatgtggcaaagtcaatgggtggcatctaaaatgactttttacattctac

SEQ ID NO: 353932 - DNA, 882 bp, Homo Sapiens
  misc_feature (46)..(83): n is a, c, g, or t
  misc_feature (181)..(181): n is a, c, g, or t
atacgactcactatagggcgacttggattaaccgcggtggcggcgnnnnnnnnnnnnnnnnnnnnnnnnnnnnnnnnnnnnnnatcaggccaaatcggccgagctcgaattcgtcgagagcggagtcaccccagcgaagccgccgcagttcagtgcttggataatttgaaagtacaatagntggtttcgctgtccacccgccccacttcgcttgccatcacagcacgcctatcggatgtgagaggagaagtcccgctgctcgggcactgtctatatacgcctaacacctacatatattttaaaaacattaaatataattaacaatcaaaagaaagaggagaaaggaagggaagcattactgggttactatgcacttgcgactgatttcttggctttttatcattttgaactttatggaatacatcggcagccaaaacgcctcccagggaaggcgccagcgaagaatgcatcctaacgttagtcaaggctgccaaggaggctgtgcaacatgctcagattacaatggatgtttgtcatgtaagcccagactattttttgctctggaaagaattggcatgaagcagattggagtatgtctctcttcatgtccaagtggatattatggaactcgatatccagatataaataagtgtacaaaatgcaaagctgactgtgatacctgtttcaacaaaaatttctgcacaaaatgtaaaagtggattttacttacacctgtggaaagtgccttgacgaattgcccagaagggttggaagccaacaaccatactatggagtgtgtcagtattgtgcactgtgaggtcagtgaatggaatccttggagtccatgcacgaagaagggaaaaaatgtggttcaaagagggaa

SEQ ID NO: 353933 - DNA, 1238 bp, Homo Sapiens
  misc_feature (230)..(249): n is a, c, g, or t
  misc_feature (604)..(617): n is a, c, g, or t
agcgggggcgcggaggcggtggaggaggtgctgggagcagccgggcagccgcttcccgcccccgagcaggagccggtgcgagcggagcagagccgaggtcgggccgcgagcggagccggctgagcgggcgccgagctcccgccatggcccggaacacgctgtcctcgcgcttccgccgggtggacatcgacgaatttgacgagaacaaatttgtggacgagcaggaggannnnnnnnnnnnnnnnnnnnagccaggcccggacccgagcgaggtggacgggctcctgcggcaaggggacatgcttcgggcattccatgcagccttgcggaactctcccgtcaacaccaagaatcaagctgtgaaggagcgagcccagggcgtggtgctgaaagtgctcacaaacttcaagagcagtgagattgagcaggctgtgcagtcactggacagaaacggcgttgacttgttaatgaagtacatttataaaggctttgagaagcccacagaaaatagcagcgcagtgttactccagtggcacgaaaaggccttagcagtaggaggactaggctccattataagagttcttacagcaagaaagactgtttnnnnnnnnnnnnnngactcatgttaccttgagaagaattctggatgcccaggctggtgaagaagggattgacaatggaccatcttcctaggaactcccaagtaaactatttcaggacatgtatctgctgaaatgtattttattttcaaggtggaggggaaaatcgtctgtttcctaaatcctgtttaggatctgatagtctatgcctttgtctccgagtactgcagaactgacattttgacggtctaccagcgtggcggctggtgttggtcagatgcacctgtgtgcactgggggagggatggtttgggcaggtgcagatccaagggctgtggtaaacgggagagcttgtgtttttgaagtggaaaaaaacccaagagtttgtacagacatcctgtcttcccagagaaggtggacactcttgggctcattgtaaagtgcctgctgcatcaataaagctcttggcttattagtctattaaaaacggggccacgaacaaaacaaggggccgtggcggccgccctcggcccttcgaagaagcttttcaagaccctttcggtttgggggcgcggggccccggtaagggtaaggggaacctggggcccataagctggggtttccccaaggaagacccctc

SEQ ID NO: 353934 - DNA, 726 bp, Homo Sapiens
agcgggggcggcggcggcttgcgcgcggaggcggtggtacggaggtgctgggagcagccgggcagccgcttcccgcccccgagcaggagccggtgcgagcggagcagagccgaggtcgggccgcgagcggagccggctgagcgggcgccgagctcccgccatggcccggaacacgctgtcctcgcgcttccgccgggtggacatctgacgaatttgacgagaacaaatttgtggacgagcaggaggaggcggcggcggcgggcggcggagccaggcccggacccgagcgaggtggacgggctcctgcggcaaggggacatgcttcgggcattccatgcagccttgcggaactctcccgtcaacaccaagaatcaagctgtgaaggagcgagcccagggcgtggtgctgaaagtgctcacaaacttcaagagcagtgagattgagcaggctgtgcagtcactggacagaaacggcgttgacttgttaatgaagtacatttataaaggctttgagaagcccacagaaaatagcagcgcagtgttactccagtggcacgaaaaggccttagcagtaggaggactaggctccattataagagttcttacagcaagaaacgactgtttaacaaacaaataagcaagactcatgttaccttgagaagaattctggatgcccaggctggtgaagaaggggattgaccatgggacaatcttcctaggaactccc

SEQ ID NO: 353935 - DNA, 1987 bp, Homo Sapiens
  misc_feature (1050)..(1051): n is a, c, g, or t
  misc_feature (1056)..(1057): n is a, c, g, or t
  misc_feature (1234)..(1244): n is a, c, g, or t
  misc_feature (1434)..(1469): n is a, c, g, or t
  misc_feature (1537)..(1545): n is a, c, g, or t
  misc_feature (1670)..(1670): n is a, c, g, or t
  misc_feature (1799)..(1799): n is a, c, g, or t
taggggtgcttccgtggtcggcggctgctgggctccgcgccggggtccgagtcccacgaagccccggcccgagccgccggatgcccgcgcgcagcggggcccagttttgccgacggatggggcaaaagaagcagcgaccagctagagcagggcagccacacagctcgtccgacgcagcccaggcacctgcagagcagccacacagctcgtccgatgcagcccaggcaccttgccccagggagcgctgcttgggaccgcccaccactccgggcccataccgcagcatctatttctcaagcccaaagggccaccttacccgactggggttggagttcttcgaccagccggcagtccccctggcccgggcatttctgggacaggtcctagtccggcgacttcctaatggcacagaactccgaggccgcatcgtggagaccgaggcatacctggggccagaggatgaagccgcccactcaaggggtggccggcagaccccccgcaaccgaggcatgttcatgaagccggggaccctgtacgtgtacatcatttacggcatgtacttctgcatgaacatctccagccagggggacggggcttgcgtcttgctgcgagcactggagcccctggaaggtctggagaccatgcgtcagcttcgcagcaccctccggaaaggcaccgccagccgtgtcctcaaggaccgcgagctctgcagtggcccctccaagctgtgccaggccctggccatcaacaagagctttgaccagagggacctggcacaggatgaagctgtatggctggagcgtggtcccctggagcccagtgagccggctgtagtggcagcagcccgggtgggcgtcggccatgcaggggagtgggcccggaaacccctccgcttctatgtccggggcagcccctgggtcagtgtggtcgacagagtggctgagcaggacacacaggcctgagcaaagggcctgcccagacaagattttttaattgtttaaaaaccgaataaatgttttattttctcgaaaaaaaacactccatctcacnnaccannaaacctgtccgcgccgcccccgccccttcaaaaagcctttctagcaccatttcgtttgggccgcgcggggccccagcaagggaaacgggaaccatgggccataagctcgtttccccaaaagaaaataccctgggccccttgaacctaaatggccttgggaatttccttcccaccacnnnnnnnnnnnccgcccccgcgcggcggaaccacccgcagccgtattccttccgaaacacaaaattctccccgaattgggagaagttctctctcgcaagaggtcgcccctctatacttcgggggaatctcttcctatcccccacccacgagggagggtcttcctcacatacgcgcgcaagcgtctctcctcaaattatttnnnnnnnnnnnnnnnnnnnnnnnnnnnnnnnnnnnnacgcgcgcgcacttggtggtcacacacatctctctaactgtcattcgcgagaataaacaaaggggtcnnnnnnnnnaacaatttccccccccctatattaaacgcgcctattttctctggtgcgcggcccacacaccttgtgggcgcaaatactcccccttctcttcccccaccaatcccgggagcgccgtcattcaccgncgagacacacccctcataaacacatttgcgcctccactagcggctgtcgtcatctctcaccaccctccctctattgtcctcccctgcctctggtgcggcccgatataaacagaataatctattttcccnccccctctgtgcgcgcggtacatataacacacggcgcggggcggcgcacgcaaaaccaaacacacatttgtgcctcctctcacaatattatcgtgcgcgcgcccaccctctctcttataaaatatcttccacaaccaccggtgtggccgagaaaaacacccccactccccacgccccgcgagcccgcg

SEQ ID NO: 353936 - DNA, 555 bp, Homo Sapiens
taaaaatgaaacaattaatctagattttaacattttcagaaacttagtgataacattatgaacaattctaaaagccctgtgatttgaaaaatatagaatcattaatggcccaagataggccttcacaccttcacaggtgcgaaaggaaaggccttcacaccctcacagaggcatcatgcaaaggacagcggctttggcttttccaattttccatctttaggccctggtgagaggcacacttatgcactaaaatgcacatatatgcacatgcattcaaaaataggcatttggtacaatggtgatcttgtacctgatgggctgaaaccagcttaagaacaaatttgttcttcctgatatgataactaggtctccaagagaaaatagaaaggctgctttagtgccttacgcttactaaatttaaatctttatttacctgggtttgagcctacagtctatttatgattacatatcaaaattgattaaaacacttccatttctaaaagttcaaatatacttgttaataaaaggattatcggcattaatactttaatttaa

SEQ ID NO: 353937 - DNA, 501 bp, Homo Sapiens
  misc_feature (487)..(487): n is a, c, g, or t
ggatataaagggtagagataaactctgcaaatcttatgtctggaattatattaatgtttattgtccttgccaaaattcctagaaattaatttccttcaatagcatcctaaaactctatttttatttggggcagagtaatttcatttatagtgccagtaggtgtaccttgtgttcactcgaactaagaacaatggttaaggcagaataatgactaaaatatgttcatatattatgatgtggaaataattgataacttttaagccatactatgtttttaaagataatttgcacaaacacgtttgtgtctgttctgtccaatatagatttggcaattatttaaagagggataatcttgaaaaaattaaccaaggtgatttcttatatgtagatgctcgattttggaatttgaaatagtagatgcacctctttaccttttttacttggataaaaacctatgatgattttaaacaaaaaacataacaaaaanaatccactcctgtc

SEQ ID NO: 353938 - DNA, 442 bp, Homo Sapiens
atttgaatacaataaagagtctttcagctgaaaacttttgccatgaagcaggactctaaagaaggaatgagtgcaatttctaagactttgaaactcagcggaatcaatcagctgtgttatgccaaagaatagtaaggttttcttatttatgattatttaaaatggaaatgtgagaatgtggcaagatgaccgtcacattacatgtttaatctggaaaccaaagagacccctgaagaatatttgatgtgatgattcacttttcagttctcaaattaaaagaaaactgttagatgcacactgttgattttcatggtggattcaagaactccctagtgaggagctgaacttgctcaatctaaggctgattgtcgtgttcctctttaaattgtttttggttgaacaaatgcaagattgaacaaaattaaaaattcattgaagctga

SEQ ID NO: 353939 - DNA, 653 bp, Homo Sapiens
  misc_feature (13)..(13): n is a, c, g, or t
ctcgggatccctngtctcaaaataaataatccagtcccccccaagaaaggaatgaagtgctataatgagaaaaatcctagtacctaacatatagtagacagtggagagtggttctctttcgtttctcaggggcagacagatggggtgctggagtcctctatcaaagagtcagagctctatcccagatgtgtaatgaacgtggtcacagacatattgtcccattaccatttaccttccctataaccactgtgcctccagccttgtagaatagacacataggagcgcagcaatacgtctaaaaataggagtgagagagggcagggcatgcccgttcttgtggtagaagaaaagaatgtcaaagaaagcagctgggactaatgaactttacattagccatattccattatttcagcttaagtcaaatgtcggtcctcatgaggcaactggctttgacaggagctacgctaattaccacttaccaacctttaatttctgggtaaaagcaaaagagaaaaactaatggatttttcattttccagagagacaagaataaaataatagtagtctgtagaaaaaagaaaacctgcatcaattacaagaattattaatgtatctttaataaataaccacattatttagctgtttaatttcct

SEQ ID NO: 353940 - DNA, 1735 bp, Homo Sapiens
  misc_feature (1376)..(1384): n is a, c, g, or t
agaaaaggtaaggtgttgtgtcacaaagaggccccagtctctttcttcttacatccatgcctcttactagatgatacatttacagattgggcagtttgttctcaaaacctgggtgagaagactattcctggactctagcaacttcaaaactgaggctgggtttcagaatctttttctgcatcaattcagtcaatttgccttcaacaaagagaagtcagcaagttctatttatgctgaaagaactattccatgagaaaagcagagaaccccaaagtgggcaggcaaccccgacgagagcttatccctgtggcggcatcaggagtggctgtacattgaattttcaagtgctggttggctgtcgccagcccatggtaggaggggaggaatggcttaagatgaggtaagatctggtggtggggcatctttcctcaattccatactgactttgatcttgagaaagaaaaactggctatgcattacctaaaaccagtccaaaatgaaacagaccaacacacacacaaaagcaaattgttcaatccctttgggaattaagggaagcagcataaggtttttctttttggaaaaaatgcatttattttctttttctccaacagcaagaatcttttgttttcattttgcacgtgaccttatcttggaaactcttatacccaattgcctcccctcctattattcagagcttccctgtctttttacttgaagacaaataagtttgagcacttgagtaaaacttcacaggtgtgtaagtaggaaggcaacattttcaaaaagagaccatatgatgagaacgcctaatgatcaccacatgcaaacaaacaaaactgccagtctcatttcccacatttcttacttaagagaagagaagtaaatgaaaggaagaagaaatagatttgtaattaaagatgtggcaaaaaagatagggctgagccagttcaatttagccttcaggtgcagaatacttagagtccaaaggaaatgtgggagtggacttaattagatgcagttgtctttatcctgaaagtagtgagctaagcctaatttccagcattttgaaagagattcctttttgtttctttccatggtgccctctttaaggcacagagttgctcccacaccactgggtggagaaagaaagattgcgaaccctcgaccatccttttgaggctacattctatgttatttggcagatttataaagctatcagtaataacaatgctatgtactgcaagctgcccttgtgttagttaaagggagcatttttaatcgttcggaaattttcgtgacatgtcaagtgcagttgtgaggactgtgtgggtgaacgaaaatgtgtctgtcaagttcagagtcctttagatttnnnnnnnnnttatgacttatcaatggtgccgttatagctgtgtcagacaatgggtgtgcccattctcacaattatccttcaaaaaaaatctatgttcaaatgctttaaaaatttatcacacgatacaagagtatgactttgtcagccttctagagttcttttgtcctttattttctttcgtattttttccttcaaaaaatcaatgaagacttgatttctgtcaataattgtatcaagggtgaatatactacctgaattttgtgcatgttacattgtagttgtaaccttttctaattcaggatgaatacgagatggttgtgattgtgcagtgtaccaataaagttcgagaaatttgtaaaa

SEQ ID NO: 353941 - DNA, 441 bp, Homo Sapiens
  misc_feature (23)..(23): n is a, c, g, or t
  misc_feature (28)..(28): n is a, c, g, or t
  misc_feature (37)..(37): n is a, c, g, or t
  misc_feature (53)..(53): n is a, c, g, or t
aacctctttccaaaaagccgggnaaatnaggccttanccaaactaactttccnggaaaaaagacaactgccacccaaataaagtcccactcccacattctttgggactcctaagtaatcctgccaccctgaaggcctaaattgaaactggctcagcccctatcttttttgcccacatctttaattacaaatctatttccttcttcctttcatttacttctcttctcttaagtaagaaatgtgggaaatgagactggcagttttgtttgtttgcatgtggtgatcattaggcgttctcatcatatggtctctttttgaaaatgttgccttcctacttacacacctgtgaagttttactcaagtgctcaaacttatttgtcttcaagtaaaaagacagggaagctctgaataataggaggggaggcaattgggtataagagtt

SEQ ID NO: 353942 - DNA, 940 bp, Homo Sapiens
attatccggattgagtctctggcgtccaaattgcctgtttttctcgcaggctctattccgttcgctggttcgccacctcaggggaacgatggccatggagtccacagccactgccgccgtcgccgcggagctggtttctgccgacaaaattgaagatgttcctgctccttctacatctgcagataaagtggagagtctggatgtggatagtgaagctaagaaactattgggtttaggacagaaacatctggtgatgggggatattccagcagctggcaatgcattccaggaagcagctagtcttttaggtaagaagtatggagagacagctaatgagtgtggagaagccttctttttctatgggaaatcacttctggagttggcaagaatggagaatggtgtgttgggaaacgccttggaaggtgtgcatgtggaagaggaagaaggagaaaaaacagaagatgaatctctggtagaaaataatgataacatagatgaaactgaaggctcggaagaggatgataaagaaaatgataagactgaagaaatgccaaatgattcagtccttgaaaacaagtctcttcaagaaaatgaggaggaggagattgggaaccctagagcttgcctgggatatgctggatttagcaaagatcatttttaaaaggcaagaaacaaaagaagcacagctttatgctgcccaggcacatcttaaactcgggagaacgtagtggtgaatctgaaaactatgtgcaagctgtggagggagttcagtcctggccttaactggaggaacagtacctggaagcccccgacccggctccttgcagagacccactaccagctggggctttggcttatgggtacaactctccgtatgatgagggcagtggcacaggtcagcaaaatctattggaagcttggaaaacagatggctggacta

SEQ ID NO: 353943 - DNA, 2755 bp, Homo Sapiens
  misc_feature (2675)..(2675): n is a, c, g, or t
gctgtccctgagtgagtctctggcgtcccaaattgcctgtttttctcgcaggctctattccgttcgctggttcgccacctcaggggaacgatggccatggagtccacagccactgccgccgtcgccgcggagctggtttctgccgacaaaattgaagatgttcctgctccttctacatctgcagataaagtggagagtctggatgtggatagtgaagctaagaaactattgggtttaggacagaaacatctggtgatgggggatattccagcagctgtcaatgcattccaggaagcagctagtcttttaggtaagaagtatggagagacagctaatgagtgtggagaagccttctttttctatgggaaatcacttctggagttggcaagaatggagaatggtgtgttgggaaacgccttggaaggtgtgcatgtggaagaggaagaaggagaaaaaacagaagatgaatctctggtagaaaataatgataacatagatgaggaagcaagggaagagttgagagaacaggtttatgacgccatgggagaaaaagaagaagccaaaaaaacagaagacaagtctttggcaaagcctgaaactgataaagaacaggacagtgaaatggagaagggtggaagagaagatatggatataagtaaatctgcagaggagccacaggaaaaagttgacttgactctagattggttaactgaaacctctgaagaggcaaaaggaggagcagcaccagaaggaccgaatgaagctgaggtcacttctgggaagccagaacaggaagtaccagatgctgaggaagaaaaatcagtttctggaactgatgtccaagaagagtgcagagaaaaaggaggtcaggagaagcagggagaggtaattgtgagcatagaggagaagccaaaagaagtttcagaagagcagcctgtggtgactctagaaaagcagggcactgcagtggaggtagaagcagagtctttagacccaacagtcaagccagtggatgtgggtggggacgagccagaggagaaggtagttacctctgaaaacgaggcaggaaaggcggttcttgaacaactggtaggtcaagaagtaccacctgctgaagagtcaccagaggtgacaacagaggctgcagaggcctcagctgtagaggctggatcagaagtctctgaaaagcctgggcaggaggctccagttctccctaaggatggtgcagtcaatggaccgtcagttgtaggagatcagactcctattgaaccacagacttctatagaaagactgacagaaacaaaagatggctcaggactagaggagaaggtcagggcaaagctggttcctagtcaggaggagactaagctgtctgtagaagagtctgaggcagctggagatggggttgataccaaggtagcccagggagctactgagaaatcacctgaagacaaagttcagatagctgctaatgaagagacacaagagagagaagaacagatgaaagagggtgaagaaactgaaggctcggaagaggatgataaagaaaatgataagactgaagaaatgccaaatgattcagtccttgaaaacaagtctcttcaagaaaatgaggaggaggagattgggaacctagagcttgcctgggatatgctggatttagcaaagatcatttttaaaaggcaagaaacaaaagaagcacagctttatgctgcccaggcacatcttaaactcggagaagttagtgttgaatctgaaaactatgtgcaagctgtggaggagttccagtcctgccttaacctgcaggaacagtacctggaagcccacgaccgtctccttgcagagacccactaccagctgggcttggcttatgggtacaactctcagtatgatgaggcagtggcacagttcagcaaatctattgaagtcattgagaacagaatggctgtactaaacgagcaggtgaaggaggctgaaggatcgtctgctgaatacaagaaagaaattgaggaactaaaggaactgctacccgaaattagagagaagatagaagatgcaaaggagtctcagcgtagtgggaatgtagctgaactggctctgaaagctactctggtggagagttctacttcaggtttcactcctggtggaggaggctcttcagtctccatgattgccagtagaaagccaacagacggtgcttcctcatcaaattgtgtgactgatatttcccaccttgtcagaaagaagaggaaaccagaggaagagagtccccggaaagatgatgcaaagaaagccaaacaagagccggaggtgaacggaggcagtggggatgctgtccccagtggaaatgaagtttcggaaaacatggaggaggaggctgagaatcaggctgaaagccgggcagcagtggaggggacagtggaggctggagctacagttgaaagcactgcatgttaagaggggcacagccctcctcccaagggaaagtgtttttgtatataatgtattttttcacttttggaggattctttttgtataacttcaataaagattgtaagcaaaggttgaggctttgatggtttttttcttaattattggctgaatctgccttggagcactgctggttttatatattagccaaaggttttgttctggccttctgtactgatctgtgntcctgatcctaatccctatctgtctaacgtggaggtgatcaagtggtggctgtaggccctttgtttttcccatggttgct

SEQ ID NO: 353944 - DNA, 1168 bp, Homo Sapiens
  misc_feature (628)..(628): n is a, c, g, or t
gggaatctgccattttctgtccctgagtgagtctctggcgtcccaaattgcctgtttttctcgcaggctctattccgttcgctggttcgccacctcaggggaacgatggccatggagtccacagccactgccgccgtcgccgcggagctggtttctgccgacaaaattgaagatgttcctgctccttctacatctgcagataaagtggagagtctggatgtggatagtgaagctaagaaactattgggtttaggacagaaacatctggtgatgggggatattccagcagctgtcaatgcattccaggaagcagctagtcttttaggtaagaagtatggagagacagctaatgagtgtggagaagccttctttttctatgggaaatcacttctggagttggcaagaatggagaatggtgtgttgggaaacgccttggaaggtgtgcatgtggaagaggaagaaggagaaaaaacagaagatgaatctctggtagaaaataatgataacatagatgaaactgaaggctcagaagaggatgataaagaaaatgataagaccgaagaaatgccaaatgattcagtccttgaaaacaagtctcttcaagaaaatgaaggaggaagagattggngaacctagagcttgcctgggatatgctggatttagcaaagatcatttttaaaaggccagaaaaccaaagaaggccccagctttatgcttgcccaagcacaatcttaaactccgaaaaagttaatggttgaatcctgaaaaactatgttgcaagctgggggagggagttcccagtcctgcctttaacctgccaggaacagtacctgggaacccaccgaccgttctccctgcagaagacccactaccagcttgggctgggcctatgggggaacaactctccccaatgattgaggccatggggccccggttcagccaattctattggaaatcctttggagaacgaaaatgcttgaactaaaaccaaccaggtggaaggaaggcttaaaggaaccctcttgcttgaatcccagaaaagaaattggggggaacttaaggggactggctacccccgaatttttaaggggaaaatttaaaattggccaagggggctctcaaccgctaatgggggaaaatgtaacctgaaactggggtcttaaaagcc

SEQ ID NO: 353945 - DNA, 1097 bp, Homo Sapiens
cgaacggcatgtactctacggtttaacggtagcgaggcctgggtggcgaattcggcacgaggctgtccctgagtgagtctctggcgtcccaaattgcctgtttttctcgcaggctctattccgttcgctggttcgccacctcaggggaacgatggccatggagtccacagccactgccgccgtcgccgcggagctggtttctgccgacaaaattgaagatgttcctgctccttctacatctgcagataaagtggagagtctggatgtggatagtgaagctaagaaactattgggtttaggacagaaacatctggtgatgggggatattccagcagctgtcaatgcattccaggaagcagctagtcttttaggtaagaagtatggagagacagctaatgagtgtggagaagccttctttttctatgggaaatcacttctggagttggcaagaatggagaatggtgtgttgggaaacgccttggaaggtgtgcatgtggaagaggaagaaggagaaaaaacagaagatgaatctctggtagaaaataatgataacatagatgaaactgaaggctcggaagaggatgataaagaaaatgataagactgaagaaatgccaaatgattcagtccttgaaaacaagtctcttcaagaaaatgaggaggaggagattgggaacctagagcttgcctgggatatgctggatttagcaaagatcatttttaaaaggcaagaaacaaaagaagcacagctttatgctgcccaggcacatcttaaactcggagaagttagtgttgaatctgaaaactatgtgcaagctgtggaggagttccagtcctgccttaacctgcaggaacagtacctggaagcccacgaccgtctccttgcagagacccactaccagctggggcttggcttatgggtacaacttctcagtatgatgaagcagtggcaccagttcaacaaatctattgaagtcattgagaacagaatggctgtactaaacgagcaggtgaaggaggctgaaaggatcgtctgctgaatacaagaaagaaattgaggaactaaagggaactgttacccgaaaattagagagaaga

SEQ ID NO: 353946 - DNA, 1625 bp, Homo Sapiens
agccgttcccggtacggcctttcctggcagggttgacattggacagcttcaggattcacggagaagtttgatgggctggagctcatgcgccctgggcttccctgttgaagtcgacctgctggaacatctccaggatgaaagccagcaccgggatgaaggcccccgagctcccccgagagcagcgtcaagggcacggatgcagtgcattccgcagcgggtagaagcgggcagtggggatgagcttgatacagccaatgatgacttgggcaagggggtagaccaagggctggagggcttcgctggggcccgcagtgctcaggacccggcaccacaggaagaggcagtgcacatactgccagttgtacacagactggtatgtttccttcttgcgggtggtcatggcgttgcgcaggtgtatggcgagctggcggatgtagaggaaggcgtgctggtaggccacacccggctccagggccagcagctccgtcaaggtccactgcatgaaactgatgaaggggagggcaccaggcgaggtgaacttgcagttcctcacatacgtgatgtacatttgcttgaggacggggccaaggaaagtgtccttcttgtgccggcagactctgctgaggaccaggaaagccagcacccgcagagactcctccacagtgctccatacgaccaccattctcttgagcagcatgcggcactgcttggggaaggtcaggaagcagggcaccagcacgctgatgtgccgcagcacggccgccaacaccgtcgtctccgacagacaggacaccagctgtatggccgagcccaggtaagccttgatgtccacacgaagcttcccccagagcgggctgctggacggctgcagcatcctgctgctatcctttgccacctttccaaacagcagcttctggagacagccaatgaggtctctgatgcagaaggtaaccagagcattgaatgcagcactgtccgtgacctggaatttgttggcctcagcactttcctggtcccctcgggtggtggccacagctgctcggaacgcctgtaccacttcatggaacagctttggagtgaggcgttgctttgctgcctgcttccatctctcaaccatggcgacggtcacaggaacagaattcttcttccccttcagccctctggggactctgtccccatcttctccttcctccgctccatcctcctcctcactggcttcctccagcacatctggcagggagtggaacggcccctcttcctcctcagagctgtccgagtcgctgaagtttagcaggctctggtcattctcctgcaggaacttgtagaactcggggtctctgtccttcagccgagagagctggtctttgtgctcagaggcacggcctttacgccggctggccgaggggctcccgcccggcttatccggactccgggcagcctcgcgtgcttcccgtgtctccgcttgtggagaattttcggactcggattcggactcggagtcaaagcccgaagctaggaactcgtccaccgtcagctccgccaggcgcctcttgcggctccccgcagctgccatgacaccaacccgaagccctcgtgccgaattcgccacccaggcctcgctcctt

SEQ ID NO: 353947 - DNA, 2241 bp, Homo Sapiens
ctaggagaggccgggcggttaatcggcacgaggcctgcccaagtcatcattggctgtatcaagctcatccccactgcccgcttctacccgctgcgaatgcactgcatccgtgccctgacgctgctctcggggagctcgggggccttcatcccggtgctgcctttcatcctggagatgttccagcaggtcgacttcaacaggaagccagggcgcatgagctccaagcccatcaacttctccgtgatcctgaagctgtccaatgtcaacctgcaggagaaggcgtaccgggacggcctggtggagcagctgtacgacctcaccctggagtacctgcacagccaggcacactgcatcggcttcccggagctggtgctgcctgtggtcctgcagctgaagtcgttcctccgggagtgcaaggtggccaactactgccggcaggtgcagcagctgcttgggaaggttcaggagaactcggcatacatctgcagccgccgccagagggtttccttcggcgtctctgagcagcaggcagtggaagcctgggagaagctgacccgggaagaggggacacccttgaccttgtactacagccactggcgcaagctgcgtgaccgggagatccagctggagatcagtggcaaagagcggctggaagacctgaacttccctgagatcaaacgaaggaagatggctgacaggaaggatgaggacaggaagcaatttaaagacctctttgacctgaacagctctgaagaggacgacaccgagggattctcggagagagggatactgaggcccctgagcactcggcatggggtggaagacgatgaagaggacgaggaggagggcgaggaggacagcagcaactcggaggatggagacccagacgcagaggcggggctggcccctggggagctgcagcagctggcccaggggccggaggacgagctggaggatctgcagctctcagaggacgactgaggcagcccatctggggggcctgtaggggctgccgggctggtggccagtgtttccacctccctggcagtcaggcctagaggctggcgtctgtgcagttgggggaggcagtagacacgggacaggctttattatttatttttcagcatgaaagaccaaacgtatcgagagctgggctgggctgggctggtgtggctgctgaagccccacagctgtgggctgctgaagtcagctccgcgggggagctgaccctgacgtcagcagaccgagaccagtcccagttccagggggaggcctgcaggcccctggccccttccaccacctctgccctccgtctgcagacctcgtccatctgcaccaggctctgccttcactcccccaagtctttggaaactttgttcttttccttggaaggtcacattttcttttaaaattttttgttttgcatccgaaaccgaaagaaataaaagcggtgggaggcaggccccattgtgttgagtggtggctcctggagatttgtgtggccccacccttaacccccggcaacctcaacacagaggctgggaagggtcgggggcccctggaagtagagccaaggtcccattctcctgcttgggtgaagtttgaccggcaagggcgtggccccctccatagggggacgtggccgtcgtgggggacaagggctgctctcctgtgccgagttctcgctccggggcccgcagggttggtggctgcagtggcagagccacggggaagctggccacgtagaaaactcggcccaggcgcctggccacctgggcccggatcttgagggcgggccccagcttcagccccatgttggtcagcaggtgctcctccgtcagcagtggcagggtctccccgtcgatcccctgctccctgaagacccgagtgtactctccacagccagacaggccccccacgaagctgcagacgtcatccacggtccacttggtgacgtcctcaggggctggggcctcctccccatccatggagagtccccctaccgcgcctgtgtggaagtaggggctgacggcataagggaagcccaggggcagtgtggaccctgggaaaagccccttcccctcggcgccggcccctccagctggagcttggcccggagtgggccccctgcacccaacagctgccgtctcggggtcctctccgtccgagtctttggggggctcgtcttccgagccatcttgtgcccacctcgtgccgaattcgccacccaggcctcgctac

SEQ ID NO: 353948 - DNA, 349 bp, Homo Sapiens
tttttttggtaacacaggtgccagtgtattatagaaaaaataaaaactacaagcattagcagttttaatactgctgtgtcagttttgtaaaaaatgtacattatgtcttttgacatgttgaattttaaactagggaaatgacattgtaaatcatagtagcctcttttaatttaatatgaaaaatgccactatattgaaagtacttaatgtattgtatatatttctctactttggttctagctattttatatgattgacatgttatttaaaagataactgccttgaacttttggagacttgtactgtaaataaagaaatcttaacaataaactcagaatctacttactcc

SEQ ID NO: 353949 - DNA, 1498 bp, Homo Sapiens
  misc_feature (72)..(72): n is a, c, g, or t
  misc_feature (90)..(90): n is a, c, g, or t
  misc_feature (563)..(563): n is a, c, g, or t
tttgtcgtggggtcagaggaaaaaactttactatgacacggactatggttccaagtcccgaggccggcagantcaacaggaggcagacgnggaggaaagacaggaggaggaggaggcacagatcattcagcggcgcctagcccaagcgctgcaagaggatgattttggtgtcgcctgggttgaggcctttgcaaaaccagtgcctcaggtagatgaggctgaaacacgggtcgtgaaggatttggctaaagtttcagtgaaagagaagctgaaaatgttgcgaaaagaatcaccagaactcttggagctgatagaagacctgaaagtcaagttgacagaggttaaggatgagctggagccaatgttagagttggtggaacaagggatcattccacccggaaaaagaagccaatacttgaggaccaagtacaacctctacttgaattattgctcgaacatcagtttttatttgatcctgaaagctaggaaagtcccagcacatggacatcctgtcatagaaaggcttgttacctaccgaaatttgatcaacaagctgtccgttntggatcaaaagctgtcctcagaaattcgtcatctgttgacacttaaggatgatgctgtaaagaaagaactgattccaaaagcaaaatccaccaagcccaaaccaaagtctgtttcaaagacttctgctgctgcctgtgctgttacagatctttctgatgattctgattttgatgaaaaagcaaaactgaagtactataaagaaatagaagacaggcaaaagctaaagagaaagaaagaagaaaatagcactgaagaacaggctcttgaagatcaaaatgcaaagagagctattacctatcaaattgctaaaaataggggacttactcctaggagaaagaagattgatcgcaatcccagagtgaaacacagagagaagttcagaagagccaaaattagaagaagaggccaggttcgtgaagttcgtaaagaagagcaacgttatagtggtgaattatctggcattcgtgcaggagttaaaaagagcattaagcttaaatgaagtttttgcttagcataaggtttttggcagttttggatcaataaatttttacttttaactaaagtcattgtattaatatataatactttaaattttaaaaattcttgtccacaaggaaatttgtctgggttattggacaatttataagaactatggggagcaatatgaaggtgcttgagaaaagagatgatgttgaagttttccaatattctgttgaagttttccaatattaagtattagcttagggaaatttcacagttcattgtggagtgttaaacttagaacaatgtgtaacttttcacataaagagaatgcatctttgacagttatcttatttgtaaggcagcctataaaatagttctgaagtattttatttacctaactataattattgggccagatacttgttaataaatgggcttaatgttaacatgg

SEQ ID NO: 353950 - DNA, 791 bp, Homo Sapiens
  misc_feature (127)..(165): n is a, c, g, or t
ggggtgggagctccgtgcaaagtgaagctgaggcctctgtggatcccagtttgtcgtggggtcagaggaaaaaactttactatgacacggactatggttccaagtcccgaggccggcagagtcaacnnnnnnnnnnnnnnnnnnnnnnnnnnnnnnnnnnnnnnncacagatcattcagcggcgcctagcccaagcgctgcaagaggatgattttggtgtcgcctgggttgaggcctttgcaaaaccagtgcctcaggtagatgaggctgagacacgggtcgtgaaggatttggctaaagtttcagtgaaagagaagctgaaaatgttgcgaaaggaatcaccagaactcttggagctgatagaagacctgaaagtcaagttgacagaggttaaggatgagctggagccattgttagagttggtggaacaagggatcattccacccggaaaaggaagccaatacttgaggaccaagtacaacctctacttgaattattgctcgaacatcagtttttatttgatcctgaaagctaggagagtcccagcacatggacatcctgtcatagaaaggcttgttacctaccgaaatttgatcaacaagctgtccgttgtggatcagaagctgtcctcagaaattcgtcatctggttgacacttaaggatgatgctgtaaagaaagaactgattcctaaagcaaaatccaccatagcccaaaccaaagtctgttttcaaagacttccgctgctgcctgtgctgctacagatctttctgatgattgctgattttcgatg

SEQ ID NO: 353951 - DNA, 1051 bp, Homo Sapiens
  misc_feature (425)..(463): n is a, c, g, or t
  misc_feature (603)..(621): n is a, c, g, or t
  misc_feature (674)..(715): n is a, c, g, or t
ggtaggtaacaagcctttctatgacaggatgtccatgtgctgggactctcctagctttcaggatcaaataacaaactgatgctcgagcaataattcaagtagaggttgtacttggtcctcaagtattggcttccttttccgggtggaatgatcccttgttccaccaactctaacaatggctccagcatcatccttaacctctgtcaacttgactgtcaggtcttctatcagctccaagagttctggtgattcctttcgcaacattttcagcttctctttcactgaaactttagccaaatccttcacgacccgtgtctcagcctcatctacctgaggcactggttttgcaaaggcctcaacccaggcgacaccaaaatcatcctcttgcagcgcttgggctaggcgccgactgaatgatcatgtgnnnnnnnnnnnnnnnnnnnnnnnnnnnnnnnnnnnnnnngttgactctgccggcctcgggacttggaaccatagtccgtgtcatagtaaagttttttcctcggaccccacgacaaactgggatccacagaggcctcagcttcactttgcacggagctcccaccatcatcatcggcattnnnnnnnnnnnnnnnnnnncccgcattccctccatcttcgtcgtcctcatcgtccatatctagggctagcannnnnnnnnnnnnnnnnnnnnnnnnnnnnnnnnnnnnnnnnngtacttcattccagcccttagctaaggcggcccgggatcgtgcctcatgaaagtcatctaccgatcttggtagtagctggtgtccctggtgagggtggcaatcctaaatcatctccattttcgtcggtgagcgtgggacctgccttggctcgcacagctgcccacttagctgctccgcgccgccgggatctccccaccatggctcacaatctcaggttttacagcgactccggactttcggccaccactgacttcggcgcaggaatcaggcgctccggtaactcgtggctctaaacagcagcgcgctcccctaccaccggagtttgcagacccgct

SEQ ID NO: 353952 - DNA, 409 bp, Homo Sapiens
ccatcaaactaaacgtagtttaattcagatgaacacctatcgatattcaaaaggcaaaacaaaaaaactaattccagggacattagaccttggtgaaatgccaaatggaaaatggtgctttaaaaggtagtctcttaccatataaggaataagtaaaacattagcttgtgatttctcattattcaggtcaatgttttagacacgactaacaagggacagttcaaactattaaagagaacaaatttttacttaagcactttgaggtatccactccccttaaatgtaagttatgtattttatctgttgattaaggggaggtccaagcatttgtacttggcaggaatgctggcaatagcttgtgccagattactgtataaacttgaaagtaataaaaatgttctttaaaagt

SEQ ID NO: 353953 - DNA, 397 bp, Homo Sapiens
  misc_feature (236)..(246): n is a, c, g, or t
ctcatgccacttttaatgtcattttctaaaggaaaatcttatctatgatattttcccttataagagatagttgttttgagtagggttttttaaaagataaaggtagtaggaaattttttaaagcctaaatatcaaattcctttccctttggagttgggggaaggaatgaagggggagcaacttgctctttcatatgagttggtcatagcatgtaagaaccaatcttgaaatatcgnnnnnnnnnnnaatggcttataatggatttctaaaaatactttggacttaaaatgataacaggttggatctttttggccatataaagatactttataaataaaaaaattaacattggaaataatggtaatatggatttatacaaaataaattttcttttatt

SEQ ID NO: 353954 - DNA, 682 bp, Homo Sapiens
  misc_feature (20)..(20): n is a, c, g, or t
  misc_feature (664)..(664): n is a, c, g, or t
ggttaaaagtttttaaatgntattgcatcatataatttgctattcatccaatatggcattgcatatcaatcagttaatacacttaatgttgcatgagtgatatcttggtctgggtttcctcttaagattttagtttgtctgaattaaggaaaaatgtttttaatatacattcttattttgtcccacccctccagaaataagctggaaatcttaactttttggggggtcttttttggtgttttaatgggcccagaactgtggtttaaatttttatgtatgtattttcttttttgtggagtataaatttaaaaactggatttgggacctaaaatactcctcaggttgatgtattcatgaagttttaaaacatctttagttttcaaagtaaactggatatgtggaccttaaagttattgagtttaagctacaaattgtaacgtcattactggacatgtcagcatcaaccctctcaaaatagcttggtcactttatgaaggggcgttttaaagttgttgtttagcagtgacatttaatatggtccaattgcttttctttttaacgtgacaaaaagagaataaggaacaaacactattgctgccgaatgccataacactgagttgtacaaattgtgattgaggaaatgaaaaggtttatacttttaaanggcccaaaaaaaggccac

SEQ ID NO: 353955 - DNA, 532 bp, Homo Sapiens
attgttgaccatggaaatggaaccttcagtgtgtatttccgacataattcaacaggcctgggcaatgtttcagtgagcttggtaccaccctccaaggtggtggaatttgaagtttccccccagtctaccttggagaccaaggaatccaaatctttcaattgtcgcattgagtatgaaaaaacagatcgggcgaaaaagaccgccctgtgcaactttgacccatccaagatctgctaccaggagcagactcagagccatgtgtcttggttgtgctccaagcccttcaaggtcatttgcatttacattgccttttacagtgttgattataaactcgtgcaaaaggtgtgccctgactacaattaccatagtgagaccccatacttatcttctgctgatcttcctgctgtggtggaaacgagggatacatatgtatttgattagaatgacaaagaaacaagcccagctctttatgataaaggatcccttttgtttctggcagtgaacaatagttccctatcaggttttcaaattt

SEQ ID NO: 353956 - DNA, 983 bp, Homo Sapiens
ttatgttttcagttatttactagttttaacaattactttacacagaacccccaaattgtccacaaacaccataggtacctcattttgaaaaggatatttttgataaagatgactagctaaaaaataaagcaagaaaagcaacacccaaaatgtgtgcccctagctcattctggaggtatttagtggacagtctctcttgaatcctaagcaggctggtcatgcttggcccagaattcccaaataatgatttgcgtctgaaatttcccataaggttttgcaatgttccactcatacctatgacagtccagaacaatactaatccagaagcatttttaggtaattgagagtacattttttaaacacaatctatgcacaatacagtgattaggcatattaggggtaaagagctttacaaaacattgctgaaacataattgcgagtctgaatcaaatcaaaaagaccacagaaatattcagtattgtatcttagtttctgttaagtactttcaaaatgtatttaatactaaaagtaattagtagaagagaatttgaattcttgatttttgttctgaaaatttttactctcgatatattaaacaaacatggaaaacttctgtattaaagtcttccacatgtaaaccatttgtcattcattcatatatttttctactttacttctttaccaaaaatcgtgtgatgtctgatccatgctttgatgctagagattgtcttctcacctggcttctttccttagcttgtctggcagttctctctttgtgacagactgtgcagagagtctgcaggttgtccagggaacactgtcctcctcccccatacactggcttgatgtgatccacctgccagaaatgtccttcccctgggtttcttatcatttcatttagctgttctaatgggagctttgaagtccaggtagcatacagaagattcttcctctgacttttaggggcatctctcagacgtacc

SEQ ID NO: 353957 - DNA, 259 bp, Homo Sapiens
  misc_feature (12)..(12): n is a, c, g, or t
  misc_feature (46)..(46): n is a, c, g, or t
  misc_feature (55)..(55): n is a, c, g, or t
ggcataaaaagncctttatcaaaaaaaattgtagcatgcttgcccntttgttttntcaatcatggccatattatgaaaatactaacaggatataggacaaggtgtaaatttttttattattattttaaagatatgatttatcctgagtgctgtatctattactcttttactttggttcctgttgtgctcttgtaaaagaaaaatataatttcctgaagaataaaatagatatatggcacttggagtgcatcatagttaa

SEQ ID NO: 353958 - DNA, 273 bp, Homo Sapiens
gggagacagccatcccatagaaagtgaccgtacgggtttttaatcactgctgggtggggtgggggtagggggattgtcctggctttgtcgacaaagtcccacttccccgagtattaagggcccttggtatcaagtgaggtaaattcacccatcacagggtctcgccctaccatcctggaattatttcacttttaagataaatgcactatttcactgttcgcctcccattctaaggaggtgaggtggttggaataaaaacagttcctgtcaaaa

SEQ ID NO: 353959 - DNA, 1582 bp, Homo Sapiens
  misc_feature (855)..(863): n is a, c, g, or t
  misc_feature (1001)..(1027): n is a, c, g, or t
  misc_feature (1276)..(1297): n is a, c, g, or t
cggtccggaattcctgcggatctacggatcactgggagccaaaacctgtcccagtttttccctgaggccatttctttcatagatgaagcccggggcaagaactgtggtgtcttggtacattgcttggctggcattagccgctcagtcactgtgactgtggcttaccttatgcagaagctcaatctgtcgatgaacgatgcctatgacattgtcaaaatgaaaaaatccaacatatcccctaacttcaacttcatgggtcagctgctggacttcgagaggacgctgggactcagcagcccatgtgacaacagggttccagcacagcagctgtattttaccaccccttccaaccagaatgtataccaggtggactctctgcaatctacgtgaaagaccccacacccctccttgctggaatgtgtctggcccttcagcagtttctcttggcagcatcagctgggctgctttctttgtgtgtggccccaggtgtcaaaatgacaccagctgtctgtactagacaaggttaccaagtgcggaattggttaatactaacagagagatttgctccattctctttggaataacaggacatgctgtatagatacaggcagtaggtttgctctgtacccatgtgtacagcctacccatgcagggactgggattcgaggacttccaggcgcatagggtagaaccaaatgatagggtaggagcatgtgttctttagggccttgtaaggctgtttccttttgcatctggaactgactatataattgtcttcaatgaagactaattcaattttgcatatagaggagccaaagagagatttcagctctgtatttgtggtatcagtttggnnnnnnnnntctgatactccatttgattattgtaaatatttgatcttgaatcacttgacagtgtttgtttgaattgtgtttgttttttcctttgatgggcttaaaagaaattatccaaagggagaaagagcagtatgccacttcttnnnnnnnnnnnnnnnnnnnnnnnnnnnttgtgctcttttctaatccaaagggtatatttgcagcatgcttgactttaccaattctgatgacatctttacggacactattatcactaagaccttgttatggcgaagtctttagtctttttcatgtattttcctcatgattttttctctttatgtagtttgactatgccttacctttgtaaatatttttgcttgtgttgtcgcaaaggggataatctgggaaagacaccaaatcatgggctcactttnnnnnnnnnnnnnnnnnnnnnnccttcagctgtgctaaacagtatattacctctgtataaaattcttcagggagtgtcacctcaaatgcaatactttgggttggtttctttcctttaaaaaaatttgtataaaactggaagtgtgtgtgtgtgagcatgggtacccatttgataagagaaatgcatttgattgtgaagaagggagagttaaattctccattatgttcgtggtgtaaagtttagagctggaatttattataagaatgtaaaaccttaaattattaataaataactattttggctattg

SEQ ID NO: 353960 - DNA, 536 bp, Homo Sapiens
  misc_feature (68)..(68): n is a, c, g, or t
  misc_feature (75)..(75): n is a, c, g, or t
  misc_feature (93)..(93): n is a, c, g, or t
  misc_feature (110)..(110): n is a, c, g, or t
  misc_feature (134)..(134): n is a, c, g, or t
  misc_feature (149)..(149): n is a, c, g, or t
  misc_feature (178)..(178): n is a, c, g, or t
actcgcccgccgttgcccaatgctggggcctcggggacctgcgggaatcaactctgaatccttccctnggaacancgaaccctgaaccttganccgaaaacccccaatantgcaaacaaactcggaatggtaantcccgctgtcccaanagcccaaccttcccttccccagtggaagntcttgcccttccctcctacttgggctgtgcccaaagactccaccaacttggacgtgttggaggaattcggcatcaagtacatcttgaacgtcacccccaatttgccgaatctctttgagaacgcaggagagtttaaatacaagcaaatccccatctcggatcactggagccaaaacctgtcccagtttttccctgaggccatttctttcatagatgaagcccggggcaagaactgtggtgtcttggtacattgcttggctggcattagccgctcagtcactgtgactgtggcttaccttatgcagaagctcaatctgtcgatgaacgatgcctatgacattgtcaaaatgaaaaaaaa

SEQ ID NO: 353961 - DNA, 1168 bp, Homo Sapiens
  misc_feature (460)..(487): n is a, c, g, or t
agtttcaggtgtctccccacctagggcaaattcatgcacattgtcatgttataccaccattctggaaatgatttctgtggatttgaaattgcacttttaattttatatatgacagcatttaaatgcaaacactaccatgaatttaatgtataaaatgttgtcaaaccaagggaaaaaaccacagttcaccatgtggagtttactttttttatatgaatgtttgttgtactgtgtctaagcataacttccctaatgtcattacttttacataccagatttgactgaccactaatgtagtactggggataacttaatatcctatgttgtgtcaagactctttgaagactttcttgaattgctttcgtaaaggtctgaacactgttaaggagaaagctgagtatcaacttgcctttctgatagaaatgtttcttgtgccagttttattgttgagatatactannnnnnnnnnnnnnnnnnnnnnnnnnnnaaaaaaacaaatgtattgtggcttccagttaccaggttgtctaggtaatgacagtaaactgactgtagaatgataattgtggtatagtgaccaatagatgccaaacagcttgtggcctcactaaaggtggggtcgcttagtccccgggagtaaaatgagtgacctcagaaacaagaattcctggaaaggcacatgccgaagaggaatatggtataattttaaattttaatgcaaaattttaatttgtctttattttttatcatttgaactgataagcactttttgtgtcaatataaaatatactaaaactgatgaaatgctaagacatgtcttgtgaaggaaggtttcttggagaccacttttatttactcatgagaagtggaagctcctagtatcagaagaagctgatacatagtgtcatgtgctcagtggttgccaaagtctaccaactttggggagctgcagggttctttttgggaggtgggaggaagggagatgagttttgttattttggggttttcaagcattggaaccaaaggccaaataataaacagcctttagtttttaaagtaaaattcattttatttgcagagtacacttgtatggtagactgttaaagacaattttatgactatttatgcacattataatggttacatctgctttttgtctttttaaatt

SEQ ID NO: 353962 - DNA, 411 bp, Homo Sapiens
  misc_feature (52)..(52): n is a, c, g, or t
aaaagcacccattttgttcaatgcttctgttctattactcaaaatgtagccnaaatagaagggaatcaattactagtgtattattttgaaagcttcaaacagaaattgtgaaatgttatttctgctcatattcttagtgttttccccttggtagaatcataatgtttagcctttatgatatttaaaacccattttgagtgttaggtttatttttatgatactctgccggtaacttttaagtcatcaggctaggatatgaagagtagttttttatgttttaaaagtgaaatattgtgaatctttcatcatagttctcatcaatatccctcagaatttttaaatgttaatgctttaatatttaggaaaaattttataccaaagttgaaaaaaaatagaatcctgttactcccg

SEQ ID NO: 353963 - DNA, 777 bp, Homo Sapiens
tccttttctgtaagtattaatccaaagaaggggtttgaaaagtttccatggggctcacctgaatctgtcactggagacagtcaccttgctcttgtgtacatagcaaactgtctgccccactacatccatttggctgaagtttgtaatgggaactccaggatagtgaacatattcgatctggccatatcgcggaggggaggtgatgacatagagcagttcctcaggcttgcctgttccgtccacagccaggagcgtggtggttgttaagaaacctctatcacctttagacaccacgagtggttttgtaaggatgacaatatcacctttttccatgtccttgatggtgatttgacagtcaagagcaggggacctgttgttgccatcccaaaggtagaaggtgaagctatcttgattctgggaatccattgccccggtgtgtgtgtatctcagcaagttcagatccacttcctcctgagtgcatttcatgccaggggagagaggaacccagtccctccctatcttaagctgaagttgcccattttggggaagcctttcaaatacatagtaaatcttctccctgggtgagtcttcatctatggctgaaagaatagcactggaaataatacgagtttcacccatattcattgcaatttcagccttcttgctcagcattggtttttcatcattaacagggatgacctctactgaaatggttttaagtatcttatgtttcccatctgacaattggattgtaaaatcatcagcaaggctctctga

SEQ ID NO: 353964 - DNA, 623 bp, Homo Sapiens
  misc_feature (16)..(16): n is a, c, g, or t
  misc_feature (31)..(31): n is a, c, g, or t
  misc_feature (69)..(69): n is a, c, g, or t
acgggccgtgaagccnatggctggcccccangcccatacccatcccatccagtttttaagataccttancccaaaacatttgtgcctaggtgtccaagatatacttcctaaatatttagctatagtgatggaagaggtagaagagtgacaccaaaggggcgagacacagagctaaatacaattaaatttcttcttaaaatgattatcaattgtctaagaaattttatcaggagtgatttgttctcaaaaaaatgtggtaacttcctttctatatcactctggcatgcatagggccaaagaatgttttgacaaacgaaaggtacaaaaatctgcacttggaggaggaagaaaatcttactggtttaggctgcctaaaatgagcttcccttttctagggaaaaagtagcagttttatactttggatgtgacaaattagttatctgccttacattcttctttctaaaacattcctatccaaccttatacccctaaatctgatttcgaatgattttttcatacggccctacatccagtttctccaaatccaagaatattgtcaagtaacttaatgatttaagagaataagaagttccatgtaagtccacagaaagactcagttgggc

SEQ ID NO: 353965 - DNA, 1113 bp, Homo Sapiens
  misc_feature (500)..(502): n is a, c, g, or t
  misc_feature (504)..(506): n is a, c, g, or t
  misc_feature (508)..(508): n is a, c, g, or t
  misc_feature (510)..(517): n is a, c, g, or t
  misc_feature (520)..(525): n is a, c, g, or t
  misc_feature (527)..(594): n is a, c, g, or t
  misc_feature (597)..(597): n is a, c, g, or t
  misc_feature (653)..(663): n is a, c, g, or t
ctggcagtcatgcaccgctgtctgccatagccgctctagggtcttggcagaattctgagcttgaagtgcagctcccttactaccctttcccttcctttttcttccctaataggaggtacaatctgcttttgtttgtcgttaagtggtcactcccatttcctttatcttggccgacaacacagagaggagggggagctgggcagtagcttggggtgggggtgggcacctgtggttgtttttaatgggaaatacctctcagagatgttcatgcaggctccctagggccccatcccagtgccaggctggtttccatggagatagggcactgaggctcccgtgaggttggaatcgacttcaccatgggggtccttcagccagcatccagctccccacccccaggctggcagtagcactgctgagatgctgtatttccacccaattctgggtatatcagtgtgtcttgcagaatcttggatcattaaagataaacatatttttannngnnngngnnnnnnnncgnnnnnngnnnnnnnnnnnnnnnnnnnnnnnnnnnnnnnnnnnnnnnnnnnnnnnnnnnnnnnnnnnnnnnnnnnnggngcgccgaccccctccgtcgccccccccgcagccccgaagaaaaaatttccgaacgnnnnnnnnnnngcgcaaaagagcttattaagccccttgttctcccgggcccggggcctaccggttgaaaaaaacactggggggggagatcggccccgagagaaacccaccccaaaaggaccgtcgtgggggtcttcccccccgagaaaaaacacccgcagtgagggacgtgggcggtgtttataacaaaacccaccctcgccttggcgcggggcgtctatggggaacttttgaaagcggccggcgccgcccccccctggctccgccctgtggagtacttatgggccgcggcacgggcctccatgccaccccctcgtgatgccgtggggtcgaccacccctccctcgacaaaggtgtccgcccttccgaagtgcgggggctaagcctctctccggcacagcggcgccgccgcatcgaacagagccggggtgataatacgaccacgccgtggcgctcgatgat

SEQ ID NO: 353966 - DNA, 1029 bp, Homo Sapiens
  misc_feature (604)..(604): n is a, c, g, or t
cggtccggaattcccgggatcatagattggacagatggaattgcaagagaagttcaagacatcgttgagaaatacccactggaaattaagcctccgaatcaaccgttagcagctattgactctgaaaacgttgaaaatgataaacttcctccaccactgcaacctcaagtttatgcaggatgatcacaatttagtggagagtatttatttgagcctaaattgtaggtagcccttactacactcaactgattgggatctagaatgtaactaaattgcttataaatgtcagagcattttttaaaggtacagtatatggggattgtttcgtttttcctagcaggggaaccttagttaataataaaatactacttatttgagttactgatacagattcatttaaggcttgtgtgcaaattttgtctcaatcttttttccctccatgattttcctatgtgcttcctctgggattcactgtggttttgggtaaataattgccttttaaagggattaaacaaatgaatgctacaaagtgtatgttcaaggaaaattaaatggtaccactcttccacagtttgggaataattttataattgtaaagataggnaaattatattgataagtaaatatgtaaaattgtaaatatgtaaaaaaaagaatggtgtctgctgtgcatggcattttatatgttaattttttagcttaaaacgaagcatattgaatgtttgcctttagcaccattttatttggtttgtcccacctaaaatgactccaagaagtgtttaaaacaaacctcccccttaaaaagtggcacctccaattttttataaaacgtgcttaaactcaaacctttggagggttcctataattagtcagaaaaccatggaacacccccctaaggggttcccaaaaataacagttctaaggccccccaataaaaaacctgcctggccccaaaggggtaaaatccctaaggggcaaagaaacccttttccaaaaccccattgcgcctccccccaaaaccctttaaac

SEQ ID NO: 353967 - DNA, 976 bp, Homo Sapiens
  misc_feature (202)..(235): n is a, c, g, or t
  misc_feature (350)..(350): n is a, c, g, or t
  misc_feature (352)..(352): n is a, c, g, or t
  misc_feature (396)..(396): n is a, c, g, or t
  misc_feature (402)..(403): n is a, c, g, or t
  misc_feature (405)..(405): n is a, c, g, or t
  misc_feature (415)..(415): n is a, c, g, or t
  misc_feature (702)..(702): n is a, c, g, or t
gacaattgtgttcaacttgtgaaaggaatttttattttcctaccaacttgacaatgatacatctaagaagataaaccagttgaggatcaagtggttagcctaccttctgtatgttaagagttgtgcaggagaccagagacaggccaaggaaacactttgaactctttgtcttgcatctcagcactatctctgatgccaatcnnnnnnnnnnnnnnnnnnnnnnnnnnnnnnnnnntacatgtttctcagccaggagatgtaatactgttaaactgtcaatatttctgagtattgtacaaattcaatgtcatccttattaaaattccaatgttacttatttggcagagatntnttatataattctaaaattcatgtgtaatctcaaggtaccatgantggccnncngctttggaanagaacaaagtaccatacctcatgatgtcaaaagagtccaaagctacaaaaataaaaccaatgtggtaatggcataaagtgaaaaaaagatacatgacagaacaaagaacccagaaataaacctgtgcaagtattatcatataatcttttactaggttaccatgaccaaacagtgaagaaaaggtcagactccccaaccaatggtgtgagaaaactcaacgtctaaatgaaagataacgaacttggacctttctcttcaatgcaaacaaaatactttacacacactanacataaaaacataaaattaaaagacatataactcttgaacacttagaagaaaatatagggagaagcctagtaacattggttttggcaggtttttcgaatatcacattaaaagcaggaacaacaagaagggaattagaaaaggtactatatcaaactttcaaaaccttctgcatatccacacatcaagggaaacactaagtggagtacaaatgccatccaccatttgacttctgaaacataaccaccaccaagggtgaataacttcattttttta

SEQ ID NO: 353968 - DNA, 1083 bp, Homo Sapiens
  misc_feature (933)..(933): n is a, c, g, or t
  misc_feature (1011)..(1012): n is a, c, g, or t
  misc_feature (1066)..(1066): n is a, c, g, or t
ggggtttccgaagggaccaccgggaacagacggatcggcagggcggggcggaacggcgtttgcaatggctgctactgtgaacttggaacttgatcccatttttttgaaagcactaggtttcttgcattcaaagagtaaagattctgctgaaaagctaaaagcactgcttgatgaatctttggctcggggcattgattccagttaccgtccatctcaaaaggatgtggagccacccaaaatttcaagcacaaaaaacatttccattaagcaagagcccaaaatatcatccagtcttccttctggtaataataatggcaaggtcctcacaactgaaaaggtaaagaaggaagctgaaaagagacctgctgataaaatgaaatcagacatcactgaaggagttgatattccaaagaaacctagattggagaaaccagaaacacagtcatctcccattactgtccaaagtagcaaggatttacctatggctgacctttccagttttgaggagaccagtgctgatgattttgccatggagatgggattggcctgcgttgtttgtaggcaaatgatggtggcatctggcaatcaattagtagaatgtcaggagtgccataatctctaccaccgagattgtcataaaccccaggtgacagacaaggaagcgaatgaccctcgcctggtgtggtattgtgcccgatgtaccagacaaatgaaaagaatggctcaaaaaactcagaaaccaccgcagaaaccagcccctgcagttgtttctgtaactccagctgtcaaagatccattggttaagaaaccagaaactaaactgaaacaagagacaacttttctagcgtttaagagaacagaagtcaagacatccacagttatttcaggaaaattcttctagtgccagcgtttccctcgtcagtaactagtggncttaactgggatgggcagcttttgcagccaaaacttcctctgctggtcctttcaccagcaaaattgagtttcaacacnncaaacaatactgggaaacctgctacttcgtcagctacccagaaaacctgtgggntttgactggtctggcca

SEQ ID NO: 353969 - DNA, 324 bp, Homo Sapiens
  misc_feature (221)..(221): n is a, c, g, or t
  misc_feature (232)..(232): n is a, c, g, or t
  misc_feature (277)..(278): n is a, c, g, or t
gtgagttgaccagagaaggatgagagaattgccaagttgtactgaacgccaagctgagaatggtgattctgaagatagaatgcgtttgcaatggctgctactgtgaacttggaacttgatcccatttttttgaaagcactaggtttcttgcattcaaagagtaaagattctgctgaaaagctaaaagcactgcttgatgaatctttggctcggggcattgnttccagttacngtccatctcaaaaggatgtggagccacccaaaatttcaagcacannaaacatttccattaagcaagagcccaaaatatcatccagtcttcct

SEQ ID NO: 353970 - DNA, 1731 bp, Homo Sapiens
  misc_feature (488)..(488): n is a, c, g, or t
ttcagcttcgttacctcccctgttagctgctgcagcaattgaggccctcaacatcatggaagagaatccaggtatttttgcagtgttgaaggaaaagtgcggacaaattcataaagctttacaaggcatttctggattaaaagtggtgggggagtccctttctccagcctttcacctacaactggaagagagcactgggtctcgcgagcaagatgtcagactgcttcaggaaattgtagatcaatgcatgaacagaagtattgcattaactcaggcgcgctacttggagaaagaagagaagtgtctccctcctcccagcattcgggttgtggtcacggtggaacaaacagaggaagaactggagagagctgcgtccaccatcaaggaggtagcccaggccgtcctgctctaggcagagtcccgggaccatggcctcctgccacacaacacgcagagaggactcaagactcccgctggccatggagtgnctcgaaagagagcaagaacatgtggatctttgataggattgttaccaaatggtgtcagtatggaccaattgtgtgaccatgagaaggatgcttattttttttaaaaagaaaacacatctaaaagcccaggaactgatttttttaagaggaaaactaatgacagtgtataactgatgtttaaattgtgcatttagtactatttaaatgttttcttatactagtattttatattcttttgttgtcgtttaaaactggagcttcagtgtctcttccctccctctaatagtaatggttcagtaagcactccttaactccttagtatttcatagaaaaatgactgcaacattaaagctaagaggaacacttcaacatatgtggtacaaatttatattgaagatctaaataaaccacgtattttccagtcttcgttgtgtgaagctaaatggtggctaaaaggaacactttttgtgtgattattataaactttgcattgtatttgaatcttagaacttttgtacacactaaatattgatgtcacaccatttctaatctgagcatccttagccagagaatattcattatacttcctaagtgagcaataatttaaatcagaagctattttattttaatgtaattaacctttctttacatttcttatgtgttcacctctaatctgttttaggaagagagttggttattatgttgatcccataatataaatcatatcctttatattttagaatatctcaaatgtattccttttttgtatggtgggtttgcctagggacgtgtaactacaggcttttactaagccaaggaaaaagagaatttttcttttcatcttacaaattccagatatctacaaaagatgtgaaagcactaaaaataccatttttaagcagtactttacctgttttttctttagcaaaccaggttatgtggtgtaaaggtttgttatacgtgccacaatatagcatataaatattatgccatcattccttctcttgttaaaggtagaagaataaaattgtgatttttataacctgtgcttattactcaaatggtcttcaacatctttttaaacaacacatactttttgaatgttcagtttctattttgcttgaggtattttgtacatatgtgccttgtgattgctgctgctttaaaggataaagtactctttgggggatgagtctggtttgttttgttttattttttaatgaaataaacctatattcctgaa

SEQ ID NO: 353971 - DNA, 406 bp, Homo Sapiens
  misc_feature (192)..(229): n is a, c, g, or t
cttgagttcactttggatccttattttgtatgacttctgctgaaggacagaacattgccttcctcgtgcagagctggggctgccagcctgagcggaggctcggccgtgggccgggaggcagtgctgatccggctgctcctccagcccttcagacgagatcctgtttcagctaaatgcagggaaactcaatgnnnnnnnnnnnnnnnnnnnnnnnnnnnnnnnnnnnnnnaggccacattgacagtggtgggcggggagaagatagggaacactcatccctggtcgtctatcccagtgtgtgtttaacattcacagcccagaaccacagatgtgtctgggagagcctggcaaggcattcctcatcaccatcgtgtttgcaaaggttaaaacaaaaacaaaagaccac

SEQ ID NO: 353972 - DNA, 1063 bp, Homo Sapiens
  misc_feature (5)..(5): n is a, c, g, or t
  misc_feature (17)..(17): n is a, c, g, or t
  misc_feature (22)..(22): n is a, c, g, or t
  misc_feature (24)..(24): n is a, c, g, or t
  misc_feature (29)..(29): n is a, c, g, or t
  misc_feature (32)..(32): n is a, c, g, or t
  misc_feature (49)..(49): n is a, c, g, or t
  misc_feature (52)..(52): n is a, c, g, or t
  misc_feature (60)..(101): n is a, c, g, or t
ggaantatacagggagntggcntntttcnggncccagcactggggctgnganccattggnnnnnnnnnnnnnnnnnnnnnnnnnnnnnnnnnnnnnnnnnncaacaaactggaagcccccaaagtggttctaaaggctaccacaggaaactggacttctaaattcttcagtgacctcaatcccaggttgggggaatgttttttatagatcatcaccgaccgacctggctttcatgatgagagtgccatctaccccgtgggctattgcagaactcgaatatatgccagcatgaagtgcccagaccagaagtgtctatatacctgtcagatcaaggatggtggtgtgcagcctcagtttgaaattgttcctgaagatgacccccagaatgccattgtcagctcttctgcagatgcttgtcatgcagaactgctcaggactataagcactactatggggaaactaatgcctaacctgcttccagctggagctgacttttttggattttctcatccagccatccacaacctgatccagagctgtccaggagctcgaaaatgcatcaattaccagtgggtgaaatttgatgtgtgcaaacctggagatgggcagctacctgaggggctgccggagaatgatgcagctatgagctttgaagcctttcagagacagatctttgatgaagatcagaatgatccccttctgccaggatccttggacctcccagagcttcagcctgcagcctttgtgtcttcttaccagcccatgtacctgacacatgaacccttggtagatactcacctgcagcacttgaagtctccatcacagggtagcccaattcagtcttcagattgaacaagaagggatcagatgccacatcgtttttgtcgtgattaatttaacttaaactaaaattttgggtatatgaaagaaggcagcaattcagaagtaaagaagatactaacgtatttcatcatggaaggtcctgtggtgatggttttccctgggaaaaccttcagctgctttatttttagtaataaatttctcttgtcaattctgtctaaaa

SEQ ID NO: 353973 - DNA, 1388 bp, Homo Sapiens
  misc_feature (296)..(331): n is a, c, g, or t
tcctgtcctcgtgtccccgacccccgagaggccacctccaagccgcgggtgccccctagggcgacaggagccagcgggacgccgcacgcggccccagactcagggagcagggccaggcgggctcgggggccggccaggggagcaccccactcaactactcagaattttaaaccatgtaagctctcttcttctcgaaaaggtgctactgcaatgccctactgagcaacctttgagattgtcacttctgtacataaaccaacctttgtgaggctctttctataaatacatattgtttnnnnnnnnnnnnnnnnnnnnnnnnnnnnnnnnnnnntatccccaaagttgttttctagatttgtggctttaagaaaaacaaaacaaaacaaacacattgtttttctcagaaccaggattctctgagaggtcagagcatctcgctgtttttttgttgttgttttaaaatattatgatttggctacagaccaggcagggaaagagacccggtaattggagggtgagcctcggggggggggcaggacgccccgggtttcggcacagcccggtcactcacggcctcgctctcgcctcaccccggctcctgggctttgatggtctggtgccagtgcctgtgcccactctgtgcctgctgggaggaggcccaggctctctggtggccgcccctgtgcacctggccaggggaagcccgggggtctggggcctccctccgtctgcgcccacctttgcagaataaactctctcctgggggtttgtctatctttgtttctctcacccgagagaaacgcaggtgttccagaggcttccttgcagacaaagcacccctgcacctcccatggctcaggatgagggaggcccccaggcccttctggttggtagtgagtgtggacagcttcccagctcttcgggtacaaccctgagcaggtcgggggacacagggccgaggcaggccttcggggcccctttcgcctgcttccgggcagggacgaggcctggtgtcctcgctccacccacccacgctgctgtcacctgaggggaatctgcttcttaggagtgggttgagctgatagagaaaaaacggccttcagcccaggctgggaagcgccttctcccaggtgcctctccctcacccagctctgcacccctctggggagccttccccaccttagctgtctcctgccccagggagggatggaggagataatttgcttatattaaaaacaaaaaatggctgaggcaggagtttgggacccagcctgggctatatagcaagaccccatcactacaaattttttacaaattagctaggtgtggtggtgcgacacctgtggtcctcaactactcgggaggctgtggtgggtggattgattgag

SEQ ID NO: 353974 - DNA, 1049 bp, Homo Sapiens
  misc_feature (27)..(27): n is a, c, g, or t
  misc_feature (32)..(34): n is a, c, g, or t
  misc_feature (36)..(36): n is a, c, g, or t
  misc_feature (48)..(48): n is a, c, g, or t
  misc_feature (55)..(55): n is a, c, g, or t
  misc_feature (75)..(75): n is a, c, g, or t
  misc_feature (77)..(77): n is a, c, g, or t
  misc_feature (108)..(108): n is a, c, g, or t
  misc_feature (178)..(178): n is a, c, g, or t
  misc_feature (194)..(195): n is a, c, g, or t
  misc_feature (200)..(200): n is a, c, g, or t
  misc_feature (242)..(243): n is a, c, g, or t
  misc_feature (253)..(254): n is a, c, g, or t
  misc_feature (265)..(265): n is a, c, g, or t
  misc_feature (271)..(273): n is a, c, g, or t
  misc_feature (281)..(282): n is a, c, g, or t
  misc_feature (285)..(286): n is a, c, g, or t
  misc_feature (288)..(288): n is a, c, g, or t
  misc_feature (290)..(290): n is a, c, g, or t
  misc_feature (296)..(299): n is a, c, g, or t
  misc_feature (303)..(305): n is a, c, g, or t
  misc_feature (309)..(312): n is a, c, g, or t
  misc_feature (314)..(316): n is a, c, g, or t
  misc_feature (318)..(322): n is a, c, g, or t
  misc_feature (324)..(324): n is a, c, g, or t
  misc_feature (327)..(327): n is a, c, g, or t
  misc_feature (364)..(364): n is a, c, g, or t
  misc_feature (373)..(373): n is a, c, g, or t
  misc_feature (420)..(480): n is a, c, g, or t
  misc_feature (495)..(507): n is a, c, g, or t
  misc_feature (509)..(509): n is a, c, g, or t
ggccgagcaagcttcggccctttcgcntcttnnngncaggacgaggcntgtgtcntcctccacccacccacgctntntcacctgagggaatctgctcttaggagtggntgagctgatagagaaaaaacgccttcagcccaggctggaagcgccttctccaggtgcctctccctcaccngttctgcatccttctnnggagncttccccaccttagctgtctcctgccccagggagggatggannagataatttnnttatattaaanacaaannnttgctganncannantntaaaannnncccnnncccnnnngnnngnnnnngnggntacaaattttttacaaattagctaggtgttgtggttngcacctgtngtcccagctactcgggaagctgtggtgggaggattgcttgagtccannnnnnnnnnnnnnnnnnnnnnnnnnnnnnnnnnnnnnnnnnnnnnnnnnnnnnnnnnnnngagaccctgtctccnnnnnnnnnnnnngnaatgtttatattataaaagagtgtcctaacagtccccgggctagagaggactaaggaaaacagagagagtgttacgcaggagcaagcctttcatttccttggtgggggaggggggcggttgccctggagagggccggggtcggggaggttggggggtgtcagacaaaacgtggaggtgtccctctgcacgcagccctcgcccggcgtggcgctgacactgtattcttatgttgtttgaaaatgctatttatattgtaaagaagcgggcgggtgcccctgctgcccttgtcccttgggggtcacacccatcccctggtgggctcctgggcggcctgcgcagatgggccacagaagggcaggccggagctgcacactctccccacgaaggtatctctgtgtcttactctgtgcaaagacgcggcaaaacccagtgccctggtttttccccacccgagatgaaggatacgctgtattttttgcctaatgtccctgcctctaggttcataatgaattaaaggttcatgaacgctgcgaaaaaaa

SEQ ID NO: 353975 - DNA, 224 bp, Homo Sapiens
gcggccgcctactactactatacggctgcgagaagacgacagaagggcaggccggagctgcacactctccccacgaaggtatctctgtgtcttactctgtgcaaagacgcggcaaaacccagtgccctggtttttccccacccgagatgaaggatacgctgtattttttgcctaatgtccctgcctctaggttcataatgaattaaaggttcatgaacgctgcc

SEQ ID NO: 353976 - DNA, 219 bp, Homo Sapiens
gcggccgcctactacctactactactatacggctgcgagaagacgacagaagggcagtgactcgacaaaggccacaggcagtccaggcctctctctgctccatccccctgcctcccattctgcaccacacctggcatggtgcagggagacatctgcacccctgagttgggcagccaggagtgcccccgggaatggataataaagatactagagaactgg

SEQ ID NO: 353977 - DNA, 1548 bp, Homo Sapiens
  misc_feature (1485)..(1494): n is a, c, g, or t
gagcgaggcctgggtggcgaattcggcacgaggggaggtggatccacgtgatctgtgccatcgcagtccccgaggcgcgcttcctgaacgtgattgagcgccaccctgtggacatcagcgccatccccgagcagcggtggaagctgaaatgcgtgtactgccggaagcggatgaagaaggtgtcaggtgcctgtatccagtgctcctacgagcactgctccacgtccttccacgtgacctgcgcccacgccgcaggcgtgctcatggagccggacgactggccctatgtggtctccatcacctgcctcaagcacaagtcggggggtcacgctgtccaactcctgagggccgtgtccctaggccaggtggtcatcaccaagaaccgcaacgggctgtactaccgctgtcgcgtcatcggtgccgcctcgcagacctgctacgaagtgaacttcgacgatggctcctacagcgacaacctgtaccctgagagcatcacgagtagggactgtgtccagctgggacccccttccgagggggagctggtggagctccggtggactgacggcaacctctacaaggccaagttcatctcctccgtcaccagccacatctaccaggtggagtttgaggacgggtcccagctgacggtgaagcgtggggacatcttcaccctggaggaggagctgccaagagggtccgtctcggtgtcactgagcacgggggcaccgcaggagcccgccttctcgggggaggaggccaaggccgccaagcgcccgcgtgtgggcaccccgcttgccacggaggactccgggcggagccaggactacgtggccttcgtggagagcctcctgcaggtgcagggccggcccggagcccccttctaggacagctggccgctcaggcgaccctcagcccggcggggaggccatggcatgccccgggcgttcgcttgctgtgaattcctgtcctcgtgtcccccgaccccgagaggccacctccaagccgcgggtgccccctagggcgacaggagccagcgggacgccgcacgcggccccagactcagggagcagggccaggcgggctcgggggccggccaggggagcaccccactcaactactcagaattttaaaccatgtaagctctcttcttctcgaaaaggtgctactgcaatgccctactgagcaacctttgagattgtcacttctgtacataaaccacctttgtgaggctctttctataaatacatattgtttaaacaaaatagcaagaaacacaggaaaacaaaggaaaatatccccaaagttgttttctagatttgtggctttaagaaaaacaaaacaaaacaaacacattgtttttctcagaaccaggattctctgagaggtcagagcatctcgctgtttttttgttgttgttttaaaatattatgatttggctacagaccaggcagggaaagagacccggtaattggagggtgagcctcnnnnnnnnnncaggacgccccggtttcggcacagcccggtcactcacggcctcgctctcgcctc

SEQ ID NO: 353978 - DNA, 232 bp, Homo Sapiens
aaacaatatgtatttatagaaagagcctcacaaaggtggtttatgtacagaagtgacaatctcaaaggttgctcagtagggcattgcagtagcaccttttcgagaagaagagagcttacatggtttaaaattctgagtagttgagtggggtgctcccctggccggcccccgagcccgcctggccctgctcggccttccatctcttgtacctgtcgatgagctcggtcaagta

SEQ ID NO: 353979 - DNA, 476 bp, Homo Sapiens
  misc_feature (27)..(27): n is a, c, g, or t
  misc_feature (41)..(41): n is a, c, g, or t
  misc_feature (49)..(49): n is a, c, g, or t
  misc_feature (239)..(239): n is a, c, g, or t
  misc_feature (329)..(338): n is a, c, g, or t
ccaccccgggtgtaaagaagggaaaanggaaaaaacaaatnatatatanaatcccccctttaaatggtggggggcctactggagaggagagaccagcaagtcccacccctaacctgttaacacagccacatacccacaggttcctggaaatcctcatccttcgaaccctagagaaataggtgcctataaacagggaattaagcaaaatgcctggatgcctatagatccttttaattgtncttaaatttttttcctattattaaactacaggctgtagatttcttagttctcacagaacttctatcattttaaactgacttgtatatttnnnnnnnnnntcttcagtaggatgttttgtactattgctagaccctcttctgtaatgggtaatgcgtttgattgtttgagattttctgtttttaaaaatgtagcacttgactttttgccaaggaaaaaaataaaaattattccagtgc

SEQ ID NO: 353980 - DNA, 460 bp, Homo Sapiens
gggggagtcggcgccatgaccccatcgaggcttccctggttgcttagctgggtctcggccacggcgtggagagcggcaagatcaccccttctgtgtcattctctgaggaaaacaagttcttctcaaggaggaaagtctgaacttgtcaaacagtcccttaagaagccgaagttaccagaaggtcgttttgatgcaccagaggattcccatttagagaaagaaccactggaaaaatttccagatgatgttaatccagtgaccaaagaaaaaggtggacccaggggcccagaacctacccgatatggagattgggaacgaaaaggacgctgtattgatttttaagtcgcatattctttaacttcaatattgttttctgaatatgtacatctgaattaacttatttctgattattttctttctttatatcctttatgtcgtgtagtttgtataatgtgtttaa

SEQ ID NO: 353981 - DNA, 1068 bp, Homo Sapiens
  misc_feature (505)..(572): n is a, c, g, or t
  misc_feature (890)..(890): n is a, c, g, or t
  misc_feature (918)..(918): n is a, c, g, or t
  misc_feature (940)..(940): n is a, c, g, or t
gggcttttcccgggcgctgattcctgagtgctgagcgcgaacccgaggagatgaaccctttaactaaggtgaagctgatcaacgagctgaatgaacgagaggtccagcttggggtggccgataaggtgtcctggcactccgagtacaaggacagcgcctggatcttcctgggagggcttccttatgaactgactgaaggggacatcatctgtgtgttctcacaatatggggagattgttaacattaatctcgtgcgggacaagaaaactgggaaatccaaaggattctgtttcctctgctatgaagaccagaggagcacaattctggccgtcgacaattttaatgggatcaagatcaaaggaagaactatccgagtggatcatgtgtctaactatcgggctcctaaggactcagaagaaatagatgatgtgaccagacaactccaggagaagggctgtggggctcgtaccccctcaccaagtttgtctgagagctctgaagatgnnnnnnnnnnnnnnnnnnnnnnnnnnnnnnnnnnnnnnnnnnnnnnnnnnnnnnnnnnnnnnnnnnnngccgaccgggaggtacaggcagagcaaccatcctcttcgtcacccagacgcaagacagtaaaggaaaaggatgacactggccctgagaagcacagcagcaagaactcagagagagctcagaagtcagagcccagggaggggcagaagctccccaaatccaggacggcctactctggtggagcagaagacctagagagggagctgaagaaggagaaacccaagcacgagcacaagtccctcagcaggagggaggcaagaagaaaaaaagaccaggattagggacagagggcgggagctcagatgcacattctagctggntataatggggcttcctgaaagggcgtanttattagaaagtaaaagtaggnagccgaggataaatccccataggcataaaaagggcccggacgcttccccccggaagcgggaggtccttcaaatcccaaatggacccgttggccgtccccctgaaaaaacttcacgctgggcacacagc

SEQ ID NO: 353982 - DNA, 822 bp, Homo Sapiens
  misc_feature (49)..(116): n is a, c, g, or t
agcgggcttgtaccccctcaccaagtttgtctgagagctctgaagatgnnnnnnnnnnnnnnnnnnnnnnnnnnnnnnnnnnnnnnnnnnnnnnnnnnnnnnnnnnnnnnnnnnnngccgaccgggaggtacaggcagagcaaccatcctcttcgtcacccagacgcaagacagtaaaggaaaaggatgacactggccctaagaagcacagcagcaagaactcagagagagctcagaagtcagagcccagggaggggcagaagctcccaaaatccaggacggcctactctggtggagcagaggacctagagagggagctgaagaaggagaaacccaagcacgagcacaagtcctcaagcaggagggaggcaagagaagaaaagaccaggattagggacagagggcggagctcagatgcacattctagctggtataatgggcgttctgaagggcgtagttatagaagtagaagtaggagccgagataaatcccataggcataaaagggcccgacgctcccgggagcgggagtcttcgaatcccagtgaccgttggcgtcactgaagacttcagctgcacagtagatttggaaataattatgttttttaaatgcagtcaaattcagttgggtggttactatttttgtatctaaaacttctggggctggattcttttaatcccttgactatttagagtcattgggagggctgcagtttcaacagctagatatcctggatattgtgtgcaccatccattgtccctgtaccagaggtatgtatcctgaactttggtcataatatggctcttgaacccatagacccag

SEQ ID NO: 353983 - DNA, 801 bp, Homo Sapiens
tttcctgagtgctgagcgcgaacccgaggagatgaaccctttaactaaggtgaagctgatcaacgagctgaatgaacgagaggtccagcttggggtggccgataaggtgtcctggcactccgagtacaaggacagcgcctggatcttcctgggagggcttccttatgaactgactgaaggggacatcatctgtgtgttctcacagtaagtgtcctttcatttcctgcctcctgagtcgacagagtactttgtttctgtaatacattttgtggcatcacaaaaaccacttattttcactctaggctgaatggcatccctgcatggggagggctggagcttctgttctagatcagtcccaggacatggttctagaatgttctgtgggagatccaagaggtttgttaatttgggagggcatcttggggatcctagtctatttctgttgtttttcactgaggcttgttcagcctgggcctagactggaacagactggactccttgggctcttgcaaactaggggtaacccatggtcacagggcccttctggcccttacctgtgtggcgtcatacgattggggcaaagcacagaggaaattggggtaaaaaacagaaggtcgtagtttgctttctttgtttctcgatgagtgtaaggttagtgagcaaaggcaatctctgcctggaggctgagaatcacagcccgaagggaacaagaatgaataggagacctgtatattcttcattctgctgaggtgttagcagcagcatttcatgggagagggtgttggcagctcatactggtag

SEQ ID NO: 353984 - DNA, 510 bp, Homo Sapiens
  misc_feature (37)..(37): n is a, c, g, or t
  misc_feature (304)..(327): n is a, c, g, or t
ctttttcttgatcttaaagatcgtgtagattggggtnggggagggatgaagggcgagtgaatctaaggataatgaaataatcagtgactgaaaccattttcccatcatcctttgttctgagcattcgctgtaccctttaagatatccatctttttctttttaaccctaatctttcacttgaaagattttattgtataaaaagtttcacaggtcaataaacttagaggaaaatgagtatttggtccaaaaaaaggaaaaataatcaagattttagggcttttattttttcttttgtaattgtgtnnnnnnnnnnnnnnnnnnnnnnnngcagaattttaatgtgaagacattttttgctataatcattagttttagaggcattgttagtttagtgtgtgtgcagagtccatttcccacatctttcctcaagtatcttctatttttatcatgaattcccttttaatcaactgtaggttatttaaaataaattcctacaacttaatggaaaaa

SEQ ID NO: 353985 - DNA, 1134 bp, Homo Sapiens
  misc_feature (393)..(419): n is a, c, g, or t
  misc_feature (438)..(438): n is a, c, g, or t
ggatcctgcaagtgatcagccgctccttcctctatgggagcaacgcggccttcctcacccttgctttcccttcaaagcactttggcaagctctttgggctggtgatggccttgtcggctgtggtgtctctgctccagttccccatcttcaccctcatcaaaggctcccttcagaatgacccattttacgtgaatgtgatgttcatgcttgccattcttctgacattcttccacccctttctggtatatcgggaatgccgtacttggaaagaaagtccctctgcaattgcatagttcagaagccctcacttttcagccccgaggatggttttgttcatcttccaccacctttgaggacctcgtgtcccaaaagactttgcctatcccagcaaannnnnnnnnnnnnnnnnnnnnnnnnnnaaataaagacacacaaggnacgtctgcgcagcaagaaaagaatctcagttgccaagcagattgatatcacacagactcaaagcaaaggcatgtggaacttctttatttcaaaacagaagtgtctccttgcacttagccttggcagacccttgactccaggggagatgacctgggggaggaagtgtgtcaactatttctttaggcctgtttggctccgaagcctatatgtgcctggatcctctgccacgggttaaattttcaggtgaagagtgaggttgtcatggcctcagctatgcttcctggctctccctcaagagtgcagccttggctagagaactcacagctctgggaaaaagaggagcagacagggttccctgggcccagtctcagcccagccactgatgctggatgaccttggcctgaccctggtctggtctcagaatcacttttcccatctgtaaaattgagatgaattttggtgttgaaagttcttcctggagcagatgtcctagaaggttttaggaatagtgacagagtcaggccaccccaagggccatgggagccagctgacctgcttgaccgaaggatttctgacagactatctttggggatgttttcaagaagggatataagttatttactttgggcatttaaaagaaaatttctctcgggaataattttatagaaaaataaagcttctgtgtctaaggcaaaa

SEQ ID NO: 353986 - DNA, 662 bp, Homo Sapiens
  misc_feature (188)..(188): n is a, c, g, or t
cagatggagaacaacaatttggatgaactaaataaaagcaagatcattgttaaaaagaaacccaaacaattaaatccatttcatttaaaagtgggtcatgaagttttaagacaaaggaaaaatgggtggaaggatggccgttttcaagcctgaatgggtgggcccttgtgccatagactatattacangaaagtggatgtgctgcccctgagagacaacactggggttagactgaaaagacctatccaaaatgtccccaccttaagcccctacataagagaatcccagtgaacaagaaagtcctttatccccttgcaaggttcagtagtggcagatcatgacctacattggattgcctgaaattccgattggagcatatcaagcaaatattctggtggaagatgcaactattggtatagtcgataatgaattactgacatcaagcaaggatcgtgaactattagaatatagaaatacgaaaatctctccattgatagacgatcatagttctcttgaaaagcagactttcagtctgttggactcttcaaaccaggttcttgaatacttaagttagtaaataccaaaatttatttaaattgtttgtttagaatataaattcttaatgatatcttattcattaaaaacgttgtatagaaaaaaaa

SEQ ID NO: 353987 - DNA, 635 bp, Homo Sapiens
ttgaacgaacatcaatgttaacgcaaccctgcactggatccagggcagcatgactgtttgaactgaggcagaaagatggggtctggaggcagagaaattaaagtcattcatggtgaatcaagggaaaacacctgggggcagggaacttaaggccaattaatgccaacttcctaaagctgaaccagaaaggaaaaccccatctccccatgcccacatagcaaaggctactctccctacaatcctctcccttctgccaggtctcaggtggaaagagagagtgccctggactgggccacgggccaagcagggaccatcccttcatctgcacagggggccaattcacctcagccttttattagtattagaccaaatccttcatccagataaggggcaaccaataaggacctcaaaaggagtacttaaaaccaagaagactttgtaactcagccctagagccacttgctcaggcccattcccaccctattcagtgctttcttgctttaacaaatttctgctttcgctgcttcgttcctttgttgtttacgcattttgtccaatcctttgttcaaaacgccaagaacctggacaattaacactcaagactttccttccgttaacagaagtacaaagacttg

SEQ ID NO: 353988 - DNA, 819 bp, Homo Sapiens
gttgagaaacaaacagagagccgcaccatcacccccacctgctgcaccccaaacccaaaaacgggaggagaacccctcagaaacttgcccttccatggtgtcccctagggttggtaacacatgacccatctagaagaaatcccaaagcaagaggcaagagcgaaaaagaagaacaacagcaaatccggtctacagtggagcagtctttgagccagagcgtaagaagagtgcagtgacatacctaaacagcacaatgcaccctgggacccggaagagagccaatgaggaacactggccaaagggtgatattcatgaggatttttgcagcgtttgcagaaaaagtggccagttactgatgtgcgacacatgttcccgtgtatatcatttggactgcttagacccccctctgaaaacaattcccaagggcatgtggatctgtcccagatgtcaggaccagatgctgaagaaggaagaagcaattccatggcctggaactttagcaattgttcattcctatattgcctacaaagcagcaaaagaagaagagaaacagaagttacttaaatggagttcagatttaaaacaagaacgagaacaactagagcaaaaggtgaaacagctcagcaattccataagtaaatgcatggaaatgaagaacaccatcctggcccggcagaaggagatgcacagctccctggagaaggtaaaacagctgattcgcctcatccacggcatcgacctctccaaacctgtagactctgaggccactgtgggggccatctccaatggcccggactgcaccccccctgccaatgccgc

SEQ ID NO: 353989 - DNA, 532 bp, Homo Sapiens
gcggccgccaaggaaatgagcaggcctggccggcccgggccccgagggaggccagccgcgagcggagaggtcggcggtccgcagagcagggtcccgtggaccggagagcgggatgccgaggtgctcaggaacagcccatggaagaatcatatgaagaggtggtgactgaggtcgtaagcaggagtggacatgtttggatttccaacagctaccctgctggactgtcatggaagatatgcccagaatgtagcgttcttcaatgtgatgactgaagcccaccacaaatatgaccactctgaggctacaggatcctcaagctgggatatccaaaattctttcagaagagagaagctggaacaaaaatccccagattcgaagacactacaggaagattcacctggagtgagacaaagggtctatgagtgccaggagtgtggaaaatccttccggcaaaaaggtagtctaacgttacatgagagaatccacactggtcaaaagccttttgagtgcacccactgtggaaaaagcttca

SEQ ID NO: 353990 - DNA, 1632 bp, Homo Sapiens
ggacgactggactgcctggttcctgttgctcttcacagaagctccatgaaagcgggcttcgctttgttcatgcagccagaggctcaacacatgacctcgaagccgccaaggctttatcaaacggatttctcccaaaaacttcgtttccttccgcgacgccctgcaagaaccctgtattcctgagtccctggctcagcgtctgctaccccgatgctgtcaatcagatcctgctaatctgagcggccgtggctccgtcccggctccgcgtccgctgacaggtcaccgctgtgagtctccggattaccagtccaaacgggacggcttgaggtccccgcgccctagggacctgcggggcccgagcgcagggcgcgccagagaactacatttcccacagagctcttgggaagccggggccgccgagacccacggcccggcgggcgggctcgcggggagactcctgggagttgtagtccattccgccggcgccggcgctggcgctgctgcgggctcggcgccggcctttgtctgcgggcacgcgccgctgcggtgctcaggaacagcccatggaagaatcatatgaagaggtggtgactgaggtcgtaagcaggagtggacatgtttggatttccaacagctaccctgctggactgtcatggaagatatgcccagaatgtagcgttcttcaatgtgatgactgaagcccaccacaaatatgaccactctgaggctacaggatcctcaagctgggatatccaaaattctttcagaagagagaagctggaacaaaaatccccagattcgaagacactacaggaagattcacctggagtgagacaaagggtctatgagtgccaggagtgtggaaaatccttccggcaaaaaggtagtctaacgttacatgagagaatccacactggtcaaaagccttttgagtgcacccactgtggaaaaagcttcagggccaaaggcaatcttgttacacatcaacggatacacacgggagagaagccttatcagtgcaaggagtgtgggaaaagcttcagtcaacgaggtagtctcgctgtccacgagagactccacactggacagaaaccctacgagtgtgctatttgtcagagaagcttcaggaatcagagtaaccttgctgttcacaggagagttcacagtggtgagaagccctatagatgtgatcagtgtggaaaagccttcagtcagaaaggaagcttaattgttcacatcagagtccacacaggcctgaagccctatgcctgtacccagtgcaggaagagtttccacaccagggggaattgtattctgcatggcaaaatccacacaggagagacaccctatctgtgcggccagtgtggaaaaagcttcacccagagagggagtctggctgtgcaccagcgaagctgctcacagaggctcaccctttgaccactttcctgaagagaagttctctttatgaattaagagtacaaaatcctctgagatgaagcaacctatccagttctatggaatgaatggagaatctttcagaaagaccatcattgggtagggcaaactgatttttttcctttcccccaaaagagtatgaaaaataaatgtcttgtttattatgattaaaaaaaa

SEQ ID NO: 353991 - DNA, 500 bp, Homo Sapiens
agttgactttttccttctcacatatcaattattctgccctttcctgtttgtttctgtttgtttttctccctcaggtgctcaggaacagcccatggaagaatcatatgaagaggtggtgactgaggtcgtaagcaggagtggacatgtttggatttccaacagctaccctgctggactgtcatggaagatatgcccagaatgtagcgttcttcagtgagtgagtcagttgatggctggatgcgctcagctcacagatattcagtgtccctgttctcagcactggtcggcagtctgaggaagcagaggagaccttgctttgatgtgatgactgaagcccaccacaaatatgaccactctgaggctacaggatcctcaagctgggatatccaaaattctttcagaagagagaagctgggaacaaaaatccccaggattcggagacactacaggaagattcacctggaagtgagacaaaagggtcttatgaagtgcccaggagt

SEQ ID NO: 353992 - DNA, 631 bp, Homo Sapiens
  misc_feature (589)..(589): n is a, c, g, or t
gagggggcgtatgtgtgccgagagtgcgggcgaggctttagccaccaggccggtctcatcaggcacaaagcggaagcactcgagggagaagccctacatgtgcaggcagtgtggactgggctttggcaataagtcagctctaatcacacacaagcgggctcactcggaagagaagccttgtgtgtgcagagagtgtggccaaggctttctccaaaagtcacacctcaccttacatcaaatgacacatacgggggagaagccatatgtgtgcaagacgtgtgggcggggcttcagcctcaagtctcacctcagcagacacaggaagaccacgtctgtccaccacagactgccagtgcagcccgaccctgagccgtgtgcagggcaaccttcggattccttatactctctctgaaggcaaagatggggacaaggactaagagtcagaatgttgacactttgatgaaatggagtagagaaatgcattctgtaagtggtcaaaggacatttgactgtttactttctccacactaagtcttctccatgttttgtggccttcggttgtaataaacttggcttctttatacaaaancacagggccttaacaaaaacacaaacgtggtgggccgccctc

SEQ ID NO: 353993 - DNA, 1121 bp, Homo Sapiens
agcgcattccgcctctcctttggccctgcggcttcctttgcaacccgccgcccacccttgctctccgtggtttacccctgggctctgaggcctggtggtagcggccactgccgcggattggctgttgcggacccggggcggggcaggtgggagaggctcgttctccgcgggtttcgttgtgtttcgcgccatgtcgtttgctgagagcgggtggcggtcggctctgcggcgccgcggtcccggcaccccgggccctgtggctcggccatcgtattcctcctttactcagggggacagctggggtgaaggcgaagtcgacgaggaggagggatgcgaccaagtggcccgcgacctgcgggcggagttctcggctggggcgtggtcagagcccagaaagcgctcggtgctcccgccggacgggaacgggtcgcccgttctgcccgataagcgcaatggtatctttcccgcggccgcgggcagcagagcccagcctcggcggtggccggtccaggtcctctctattctctgctcgctgctcttcgccattcttctcgccttcctcctcgccatcgcctacttgatcgttaaagagttgcatgctgagaatttgaaaaatgaagatgatgtagacactggactattaggattctggactctacttataatatccctaactgctggattctcctgttgcagcttttcttggacagtgacttactttgattcttttgaaccaggaatgtttcctcctactcctctttcacctgccaggttcaagaaactgactggacattctttccacatgggctatagcatggcgattttgaatggcatcgtagctgctcttactgtagcatggtgcctcatgtaaacccacactggagcgatattgttggcaaaacttaatcatgattgttttgtaataacaagaaggagcatcactgtctactccgcaggactgagaaaacctgctggtcacttatgttcggttccagatttcttttcacaatcatcctcatatggggagacctttaaagcatggtttagaatgtctgcgtttaagataggcattattgggatatctgagtattaagaacttcttcagagttacgaggttactc

SEQ ID NO: 353994 - DNA, 565 bp, Homo Sapiens
ctttgggtttacttgtaagagtatttcagtggaggaaaagtatcagaagtttagcactgagtgcctgcctaactattttatgtcttctttcatgatgatgcttaatcgcaacataatgactcagtttaccattgtaaactctttgtaggatgtcactgattttatcagtcatttgttcatgcagctgggaactgtggggatatatgatttgccacatctgaggaacaaactgggtgagctccattgaaaaattcctaactttcttattacaaagcaagcttcctcactacctgatggcttatgcaaactaatgcctattcattcatcagagggtgactggagagattatggttttcttatgaatttcttgcttgagcctgcttgtctgctgtttctaagttgtctgcactattttatgtgagtaattttctactttatttgcatgcaaaatgcaaaggagtcctggtgacctacctccaaggcagctgccctcctgaacactcccttggaaaacagtaaacatcattttggaatgtgaacaaccagagactacacaggagaaagg

SEQ ID NO: 353995 - DNA, 760 bp, Homo Sapiens
ggggtccccttgcccgcgtgaaagtctcattcctcctcagctcagaaacactccaaggtctcggcgccctatactggccttccctcatccgaatacccctcgtgctcctgatgtacttttccattcccactccctactctggcagtctagcttctaagctgaggagtttggccttcgctccaggtgcggggactcgtggaaggatttgattcgcgcttgagaaagatcgctccgctcctgtaaggaagagagcgtgtaggggctgcaaccagagacacagtcagaagctccgaggctaccgcgatggtccaggtgccacaggacacagcctaacagaggcccaggttggagccatggaccatggagtcatgagaatggaagggaagctgacgccatgtgggatggggtagaactgtccgcaaattcgtcccgcctctggagtcttcagaccagtcaaggccgaaattcaaccaagcctctcctctctctagctgttatttgtttgcagcacgcggtctggtggcaccctgcaggatttaccagctttttgccaacattctggcctatgcaatcaatacgtcccttcagcgttgcacttggatggattggacctatagttgttatatatggatattgtctaatttatttattacagtattaactgactcctatgttctggccttcagaatttctcctttggatcaattactagcctgtcttacattttctgcttcattcttttaaaatgtttagagatgaa

SEQ ID NO: 353996 - DNA, 1915 bp, Homo Sapiens
  misc_feature (1881)..(1882): n is a, c, g, or t
ggtggactcaccgctagcccgcagcgctcggcttcctggtaattcttcacctcttttctcagctccctgcagcatgggtgctgggccctccttgctgctcgccgccctcctgctgcttctctccggcgacggcgccgtgcgctgcgacacacctgccaactgcacctatcttgacctgctgggcacctgggtcttccaggtgggctccagcggttcccagcgcgatgtcaactgctcggttatgggaccacaagaaaaaaaagtagtggtgtaccttcagaagctggatacagcatatgatgaccttggcaattctggccatttcaccatcatttacaaccaaggctttgagattgtgttgaatgactacaagtggtttgccttttttaagtataaagaagagggcagcaaggtgaccacttactgcaacgagacaatgactgggtgggtgcatgatgtgttgggccggaactgggcttgtttcaccggaaagaaggtgggaactgcctctgagaatgtgtatgtcaacacagcacaccttaagaattctcaggaaaagtattctaataggctctacaagtatgatcacaactttgtgaaagctatcaatgccattcagaagtcttggactgcaactacatacatggaatatgagactcttaccctgggagatatgattaggagaagtggtggccacagtcgaaaaatcccaaggcccaaacctgcaccactgactgctgaaatacagcaaaagattttgcatttgccaacatcttgggactggagaaatgttcatggtatcaattttgtcagtcctgttcgaaaccaagcatcctgtggcagctgctactcatttgcttctatgggtatgctagaagcgagaatccgtatactaaccaacaattctcagaaccccaatcctaagccctcaggaggttgtgtcttgtagccagtatgctcaaggctgtgaaggcggcttcccataccttattgcaggaaagtacgcccaagattttgggctggtggaagaagcttgcttcccctacacaggcactgattctccatgcaaaatgaaggaagactgctttcgttattactcctctgagtaccactatgtaggaggtttctatggaggctgcaatgaagccctgatgaagcttgagttggtccatcatgggcccatggcagttgcttttgaagtatatgatgacttcctccactacaaaaaggggatctaccaccacactggtctaagagaccctttcaacccctttgagctgactaatcatgctgttctgcttgtgggctatggcactgactcagcctctgggatggattactggattgttaaaaacagctggggcaccggctggggtgagaatggctacttccggatccgcagaggaactgatgagtgtgcaattgagagcatagcagtggcagccacaccaattcctaaattgtagggtatgccttccagtatttcataatgatctgcatcagttgtaaaggggaattggtatattcacagactgtagactttcagcagcaatctcagaagcttacaaatagatttccatgaagatatttgtcttcagaattaaaactgcccttaattttaatatacctttcaatcggccactggccatttttttctaagtattcaattaagtgggaattttctggaagatggtcagctatgaagtaatagagtttgcttaatcatttgtaattcaaacatgctatattttttaaaatcaatgtgaaaacatagacttatttttaaattgtaccaatcacaagaaaataatggcaataattatcaaaacttttaaaatagatgctcatatttttaaaataaagttttaaaaataactaccnnaaccaataaacaaaaaacaaaataaaccttgtc

SEQ ID NO: 353997 - DNA, 774 bp, Homo Sapiens; identical to SEQ ID NO: 164484

SEQ ID NO: 353998 - DNA, 1026 bp, Homo Sapiens
  misc_feature (785)..(785): n is a, c, g, or t
ggagggaaaaaaacataggtctaaggtacgaggccgcgtggtgaatcggcacgaggaattcttccacctcttttctcaggctcctgcagcatgggtgctgggccctccttgctgctcgccgcctcctgctgcttctctccggcgacggcgccgtgcgctgcgacacacctgccaactgcacctatcttgacctgctgggccctgggtcttccaggtgggctccagcggtttcccagcgcgatgtcaactgctcggttatgggaccacaagaaaaaaaagtagtggagtaccttcagaagctggatacagcatatgatgaccttggcaattctggccatttcaccatcatttacaaccaaggctttgagattgcgttgaatgactacaagtggtttgcctttttttaaggatgtcactgattttatcagtcatttgttcatgcagctgggaactgtggggatatatgatttgccacatctgaggaacaaactggttattaaatagagcatctgttgagggactcttttaaaaccacagccatgaacagacgttggggctaagagacagagcagcctgcgacagtgtggacctacctgtagcagctagcaaaggcctctagcagctacagtcccttctggagtctttatttgcatgcaaaatgcaaaggagtcctggtgacctacctccaaggcagctgccctcctgaacactcccttggaaaacagtaaacatcattttggaatgtgaacaaccagagactacacaggagcaaaggaaaaaagcanttctgaagatgcaaaatcttgggtggacttcaccggtcacttatttaataaaaggaacaatataccccctctccttaatctcactgggccccatcccttgctggcgccccctcggcccctccgagaagattgctaagaccaattcctttggccccccccggaccctgtgtaggaaaagtggaaacattggcccctaaacctgtttttccctaaggaataatccctgggcccctgacttagg

SEQ ID NO: 353999 - DNA, 217 bp, Homo Sapiens
accgtgcctgaccagggctcttttagcaaggaaaacgtgaggaatgaatggctgttggtgtgcaacagaatcatacttgctacatgttgtgaaacctgaagttatttgttagtctgtatgaagaatgtaccccagagatgcaccctgtatctgccttatgtctcttacaatggaggttctctcctgttatattgctgaataaactatgtgaactgct

SEQ ID NO: 354000 - DNA, 352 bp, Homo Sapiens
gataatgaaaattagctttatttatgtaatttagaaaaaatgattgtagtgttagagtttgtcaaatgttttcactctgaacaatttacaatagtatttatatacaaacataataaaataggtacatcacattgttcttgcttcaaaatgtcttctcaattctgacatgcttctatcacttcggtttgtaatttttaagagggaaatgctctgttttgacacagtgcttgattcacacagtataacactgaagtagaaggagaatcaacaatcatgaacacagttaaaaaatatttttcaaccaatatgactttatcattaatcttttttctataataaaatgtttcctgtt

SEQ ID NO: 354001 - DNA, 865 bp, Homo Sapiens
  misc_feature (481)..(619): n is a, c, g, or t
  misc_feature (634)..(644): n is a, c, g, or t
  misc_feature (668)..(678): n is a, c, g, or t
  misc_feature (699)..(821): n is a, c, g, or t
gcagaggaaagaaaaatgtctttcacaccacaaactgtgtgtctgaactccagccaaacaaatgtgttccattggtccaatatataagcattaacaacaacaacaaaaaatttaaaacaagtaaattaatgcattcacatgatcacttcttgaaaatggttcaaagcatgttttcctgatggtgggattgtttaaatgacatgttttaaagtttttaatactttattagttatgaagtgcttcttttatatgttaagtttaggttgccagtactcataatttttatttctgcaattatgttataatgagttgtttgcatgcctacttaacccaagtaaaacgatgctgtttgctctggaatgttcatcttttagacaggttttggctcatttccaatcatggtgcaatatagtgtaacattcatttgttttcattcaacagttttatttttgtcataataaataattacttttccaatagnnnnnnnnnnnnnnnnnnnnnnnnnnnnnnnnnnnnnnnnnnnnnnnnnnnnnnnnnnnnnnnnnnnnnnnnnnnnnnnnnnnnnnnnnnnnnnnnnnnnnnnnnnnnnnnnnnnnnnnnnnnnnnnnnnnnnnnnnnngaaattgggggcccnnnnnnnnnnnaaaaaatttttaaaaacttttttnnnnnnnnnnncccccaaaggaaaaagaaacnnnnnnnnnnnnnnnnnnnnnnnnnnnnnnnnnnnnnnnnnnnnnnnnnnnnnnnnnnnnnnnnnnnnnnnnnnnnnnnnnnnnnnnnnnnnnnnnnnnnnnnnnnnnnnnnnnnnnnnnnnntctttggggggtttcaaacaggagggggccccagcggggccccc

SEQ ID NO: 354002 - DNA, 2191 bp, Homo Sapiens
  misc_feature (131)..(139): n is a, c, g, or t
  misc_feature (1938)..(1959): n is a, c, g, or t
agcggggccgatcagtcacccagtcggctggagtcggaggcgatatttctaggggtgtacttgttggggtcagggtaagcaccagccacaaaaacctacaaaagaagggaaattactgtctttaaatattnnnnnnnnncaagatccatgagtgggcatcgatcaacaaggaaaagatgtggagattctcacccggagtccccagtgggcttcgggcatatgagtactacaggatgtgtattaaataaattgtttcagttaccaacaccaccattgtcaagacaccaactaaagcggctagaagaacacagatatcaaagtgctggacggtccctgcttgagcccttaatgcaagggtattgggaatggctcgttagaagagttccctcctggattgccccaaatctcatcaccatcattggactgtcaataaacatctgtacaactattttattagtcttctactgccctacagctacagagcaggcacctctgtgggcatatattgcttgtgcctgtggccttttcatttaccagtctttggatgctattgatgggaaacaggcaagaagaaccaatagtagttctcctctgggagaactttttgatcatggctgtgattcactatcaacagtttttgtggttcttggaacttgtattgcagtgcagctggggacaaaccctgattggatgtttttttgttgttttgcggggacatttatgttctattgtgcgcactggcaaacgtatgtttctggaacattgcgatttggaataattgatgtgactgaagtgcaaatcttcataataatcatgcatttgctggcagtgattggaggaccacctttttggcaatctatgattccagtgctgaatattcaaatgaaaatttttcctgcactttgtactgtagcagggaccatattttcctgtacaaattacttccgtgtaatcttcacaggtggtgttggcaaaaatggatcaacaatagcaggaacaagtgtcctttctccttttctccatattggatcagtgattacattagctgcaatgatctacaagaaatctgcagttcagctttttgaaaagcatccctgtctttatatactgacatttggttttgtgtctgctaaaatcactaataagcttgtggttgcacacatgacgaaaagtgaaatgcatttgcatgacacagcattcataggtccggcacttttgtttctggaccagtattttaacagctttattgatgaatatattgtactttggattgccctggttttctctttctttgatttgatccgctactgtgtcagtgtttgcaatcagattgcgtctcacctgcacatacatgtcttcagaatcaaggtctctacagctcattctaatcatcattaatgatgtaattggtatataggaacatcatgttttctgcaggaaagaaagtaacatattaaggagaatgggggtggataagaacaaatataatttataataatcaatgttgtataacttttattctttattattggtaacacgccctaactatcctgtgtgagaatgggaatttcaagtcccatcttgtaaattgtatatgttgtcatgcagggtttgggccaagaaagcatgcagaaaaaaatgccatgtgattgtaattatcctggattcagaataatactgtgatggggagccagatccgcagtggtggagagttctaatgttgactgtttgcaggccaaaagatgattgctttataattttaacaaatcattgtcttttagtaacatccttgtttagtgtcttctcaagctttctttactgaggaattcagcttgtgacacagatacatcccactagcttgtgaggtggaactagtaataaagaccttgaatttggattgaaaagtttcctatctttacattgttgaggaagtcccgnnnnnnnnnnnnnnnnnnnnnncagtgctcaacaaatgattctctcacaggcttgggaaatccatgttagcatgcattataatgtggtcactttgtcaatttcccactttatttttttgtaataaatatatgatctaagacgcctactttttctcagtttttctcagtggtaaagatgaactaagttttagtgttctctttttatgttaagcaacaggatttctgtcctctataaaaagacgaatgggaccact

SEQ ID NO: 354003 - DNA, 644 bp, Homo Sapiens; identical to SEQ ID NO: 178345
  misc_feature (281)..(300): n is a, c, g, or t
